(19) United States
(12) Patent Application Publication
(10) Pub. No.: US 2012/0260373 A1
(43) Pub. Date: Oct. 11, 2012

(54) TRANSGENIC PLANTS HAVING ENHANCED BIOMASS COMPOSITION

(76) Inventor: Nestor Apuya, Culver City, CA (US)

(21) Appl. No.: 13/500,581

(22) PCT Filed: Oct. 6, 2010
(86) PCT No.: PCT/US10/51657

§ 371 Date: Jun. 21, 2012

Related U.S. Application Data
(60) Provisional application No. 61/249,508, filed on Oct. 7, 2009.

(51) Int. Cl. A01H 5/00; C12N 5/10

(52) U.S. Cl. 800/306; 435/419; 800/298; 800/320.1; 800/312; 800/320.3; 800/314; 800/320.2; 800/322; 800/320

(57) ABSTRACT

Methods and materials for modulating biomass composition in plants are disclosed. For example, nucleic acids encoding biomass-modulating polypeptides are disclosed as well as methods for using such nucleic acids to transform plant cells. Also disclosed are plants having enhanced biomass composition and plant products produced from plants having enhanced biomass composition.

### CROSS-REFERENCE TO RELATED APPLICATION

[0001] This application claims the benefit of U.S. Provisional Application No. 61/249,508, filed Oct. 7, 2009. The disclosure of the foregoing application is hereby incorporated by reference in its entirety.

### STATEMENT AS TO FEDERALLY SPONSORED RESEARCH

[0002] This invention was made with government support under USDA Biomass Research and Development Initiative Grant 68-3A75-7-601. The government has certain rights in the invention.

### INCORPORATION-BY-REFERENCE OF SEQUENCE LISTING OR TABLE

[0003] The material in the accompanying sequence listing is hereby incorporated by reference into this application. The accompanying file, 9-24-09_sequence_listing.txt was created on Sep. 24, 2009 and is 8,553 KB. The file can be accessed using Microsoft Word on a computer that uses Windows OS.

### TECHNICAL FIELD

[0004] This document relates to methods and materials involved in modulating biomass levels in plants. For example, this document provides plants having enhanced biomass composition as well as materials and methods for making plants and plant products having enhanced biomass composition.

### BACKGROUND

[0005] The present invention relates to methods of increasing biomass in plants and plants generated thereby. Plants having increased and/or improved biomass are useful for agriculture, horticulture, biomass to energy conversion, paper production, plant product production, and other industries. In particular, there is a need for increases in biomass for dedicated energy crops such as Panicum virgatum L. (switchgrass), Miscanthus×gigantus (miscanthus), Sorghum sp., and Saccharum sp. (sugar cane). Throughout human history, access to plant biomass for both food and fuel has been essential to maintaining and increasing population levels. Scientists are continually striving to improve biomass in agricultural crops. The large amount of research related to increasing plant biomass, particularly for dedicated energy crops, indicates the level of importance placed on providing sustainable sources of energy for the population. The urgency of developing sustainable and stable sources of plant biomass for energy is underscored by current events, such as rising oil prices. The amount of biomass produced by plants is a quantitative trait affected by a number of biochemical pathways. There is a need for molecular genetic approaches to more rapidly produce plants having increased biomass. There is also a need to produce plant species that grow more efficiently and produce more biomass in various geographic and/or climatic environments. It would be desirable for such approaches to be applicable to multiple plant species (Zhang et al., Plant Physiol. 135: 615-621 (2004)). Despite some progress in molecular genetic approaches, there is also a need to identify specific genes and/or sequences that can be used to effectively increase biomass in plants.

[0006] Conversion of biomass into cellulosic ethanol biofuel is impeded by lignin, a major structural component of secondarily thickened cell walls of tissues. As the second most abundant polymer on earth, exceeded only by cellulose, lignin is a major carbon sink in the biosphere, accounting for about 30% of the carbon sequestered into terrestrial plant material each year (Battle et al., Science, 287:2467 (2000)). Lignin is a major structural component of secondarily thickened cell walls of tissues with conducting and/or mechanical functions. Angiosperm lignin is composed of three main units named p-hydroxyphenyl (H), guaiacyl (G), and syringyl (S) units. These components originate from the polymerization of three monolignols, p-coumaryl, coniferyl, and sinapyl alcohols, respectively. The monolignols are synthesized from phenylalanine through successive deamination, reduction, hydroxylation, and methylation steps. The proportions of H, G, and S units in the cell wall vary according to plant species and tissue type.

[0007] Cellulosic ethanol, which exhibits a net energy content three times higher than corn ethanol, can be produced from a wide variety of cellulosic biomass feedstocks including agricultural plant wastes, plant wastes from industrial processes and energy crops grown specifically for fuel production. Cellulosic biomass is composed largely of cellulose, hemicellulose and lignin, with smaller amounts of proteins, lipids and ash, an undesirable remnant of combustion. Processing cellulosic biomass aims to extract fermentable sugars from the feedstock, which requires disruption of the hemicellulose/lignin sheath that surrounds the cellulose in plant material. Technological developments that increase the yield and drive down the production cost of cellulosic ethanol can help to reduce our oil dependency in a sustainable way. Given the role of lignin in the recalcitrance of biomass for conversion to biobased fuels, in addition to the many other roles of lignin, it is desirable to have the ability to produce plants with modulated levels of lignin.

[0008] As a major polymer of cell walls, lignin also has a direct impact on the characteristics of plants and plant products, such as wood. Highly lignified wood is durable and therefore a good raw material for many applications. Since lignin yields more energy when burned than cellulose, lignified wood is also an excellent fuel. The mechanical support provided by lignin prevents lodging, a problem in many agronomically important plants. On the other hand, lignin is detrimental to paper manufacture and must be removed from pulp before paper can be manufactured. This is costly both in terms of energy and the environment.

### SUMMARY

[0009] This document provides methods and materials related to plants having enhanced biomass composition. For example, this document provides transgenic plants and plant cells having modulated levels of biomass, nucleic acids used to generate transgenic plants and plant cells having modulated composition of biomass, methods for making plants having modulated composition of biomass, and methods for making plant cells that can be used to generate plants having modulated level of biomass components such as glucan, lignin, or ash. Such plants and plant cells can be grown to produce, for example, plants having enhanced biomass composition, e.g., increased dry weight, decreased ash content, increased or decreased lignin content, or increased glucan content. Plants having enhanced biomass composition may be useful to produce biomass for food and feed, which may benefit both humans and animals. Plants having enhanced biomass composition may be useful in converting such biomass to a liquid fuel (e.g., ethanol), or other chemicals, or may be useful as a thermochemical fuel.

[0010] Methods of producing a plant having increased biomass are provided herein. In one aspect, a method comprises growing a plant cell comprising an exogenous nucleic acid. The exogenous nucleic acid comprises a regulatory region operably linked to a nucleotide sequence encoding a polypeptide. The Hidden Markov Model (HMM) bit score of the amino acid sequence of the polypeptide is greater than about 915, 1149, 618, 324, 752, 866, 703, 862, 883, 393, 232, 815, 1251, 1066, 1398, 370, 328, 133, 265, 843, 93, 175, 2105, 1213, 1174, 1138, 1126, 1812, 824, 1240, 1078, 873, 1102, 754, 539, 657, 1925, 1104, 1347, 1096, 851, 761, 815, 1121, 681, 677, 146, 286, 493, or 316 using an HMM generated from the amino acid sequences depicted in one of FIG. 1, 2, 3, 4, 5, 6, 7, 8, 9, 10, 11, 12, 13, 14, 15, 16, 17, 18, 19, 20, 21, 22, 23, 24, 25, 26, 27, 28, 29, 30, 31, 32, 33, 34, 35, 36, 37, 38, 39, 40, 41, 42, 43, 44, 45, 46, 47, 48, 49, or 50, respectively. The plant has a difference in the level of biomass as compared to the corresponding level of biomass of a control plant that does not comprise the exogenous nucleic acid.

[0011] In another aspect, a method comprises growing a plant cell comprising an exogenous nucleic acid. The exogenous nucleic acid comprises a regulatory region operably linked to a nucleotide sequence encoding a polypeptide having 80 percent or greater sequence identity to an amino acid sequence set forth in SEQ ID NOs: 2, 4, 5, 6, 8, 10, 12, 13, 15, 17, 18, 20, 22, 24, 25, 26, 27, 29, 30, 32, 34, 35, 37, 38, 39, 41, 43, 45, 47, 49, 51, 53, 55, 56, 57, 59, 60, 62, 63, 64, 65, 67, 69, 70, 71, 73, 74, 75, 77, 79, 80, 81, 82, 83, 84, 85, 86, 88, 90, 91, 92, 93, 94, 95, 96, 97, 98, 99, 100, 101, 102, 103, 104, 105, 106, 107, 108, 109, 110, 111, 112, 113, 115, 117, 119, 120, 121, 122, 123, 124, 126, 128, 129, 131, 133, 135, 137, 139, 140, 141, 142, 144, 146, 147, 148, 149, 150, 152, 154, 155, 157, 158, 160, 162, 163, 165, 167, 169, 171, 173, 175, 176, 178, 180, 182, 183, 185, 187, 189, 191, 193, 194, 195, 196, 197, 198, 199, 200, 201, 203, 205, 207, 208, 209, 211, 213, 214, 215, 217, 218, 219, 220, 222, 223, 224, 226, 228, 229, 231, 232, 233, 234, 235, 236, 237, 238, 239, 240, 242, 244, 245, 246, 247, 248, 249, 250, 251, 252, 254, 255, 256, 257, 258, 259, 260, 261, 262, 263, 264, 265, 266, 267, 268, 269, 270, 271, 272, 273, 274, 275, 276, 277, 278, 279, 281, 282, 284, 286, 287, 288, 289, 291, 293, 294, 295, 297, 299, 300, 302, 304, 306, 307, 308, 310, 311, 313, 315, 316, 317, 318, 319, 320, 322, 324, 326, 328, 330, 331, 333, 335, 337, 338, 340, 342, 343, 345, 346, 347, 349, 350, 351, 353, 354, 355, 357, 358, 360, 362, 363, 364, 365, 367, 369, 370, 371, 372, 373, 374, 375, 377, 378, 379, 380, 382, 383, 384, 385, 386, 387, 389, 390, 391, 393, 395, 396, 398, 400, 401, 403, 404, 406, 408, 409, 410, 411, 412, 414, 415, 417, 419, 420, 421, 422, 423, 424, 425, 426, 427, 428, 429, 430, 431, 432, 433, 434, 435, 436, 437, 438, 439, 440, 441, 442, 443, 444, 445, 446, 447, 448, 449, 450, 451, 452, 453, 454, 456, 457, 459, 461, 462, 464, 466, 467, 468, 469, 470, 472, 474, 475, 477, 479, 480, 482, 483, 484, 485, 487, 488, 489, 490, 491, 492, 493, 494, 495, 497, 499, 501, 502, 503, 504, 506, 507, 509, 510, 511, 512, 514, 515, 516, 517, 518, 520, 522, 524, 526, 528, 530, 531, 532, 533, 534, 535, 536, 537, 538, 539, 540, 542, 543, 545, 546, 547, 548, 550, 551, 553, 554, 555, 557, 559, 560, 562, 563, 565, 566, 568, 570, 572, 573, 575, 576, 577, 579, 580, 581, 582, 583, 584, 585, 586, 587, 589, 590, 591, 592, 593, 595, 596, 597, 598, 599, 601, 602, 604, 605, 607, 609, 610, 611, 612, 613, 614, 615, 616, 617, 618, 619, 620, 621, 622, 623, 624, 625, 626, 627, 629, 631, 633, 634, 635, 636, 637, 638, 640, 642, 644, 646, 648, 650, 651, 653, 654, 655, 656, 657, 658, 659, 660, 662, 663, 664, 665, 666, 667, 669, 671, 672, 674, 676, 677, 679, 680, 682, 684, 685, 687, 689, 690, 691, 693, 694, 696, 697, 698, 700, 702, 704, 705, 706, 707, 709, 710, 712, 714, 715, 717, 718, 719, 720, 721, 722, 723, 725, 726, 727, 728, 730, 731, 732, 733, 734, 735, 737, 739, 741, 743, 744, 745, 746, 747, 749, 751, 752, 753, 755, 757, 759, 760, 762, 764, 766, 768, 770, 772, 773, 775, 776, 778, 780, 782, 784, 786, 788, 789, 791, 793, 794, 795, 796, 798, 800, 801, 802, 804, 805, 807, 809, 811, 813, 815, 817, 819, 820, 822, 823, 824, 825, 827, 828, 830, 832, 834, 836, 838, 840, 842, 843, 844, 846, 848, 849, 850, 851, 853, 855, 856, 857, 858, 860, 861, 863, 864, 866, 868, 870, 871, 873, 874, 876, 878, 880, 882, 883, 885, 887, 889, 890, 892, 893, 895, 896, 897, 899, 901, 902, 903, 905, 907, 908, 909, 910, 912, 914, 915, 916, 917, 919, 921, 923, 925, 926, 928, 930, 932, 934, 935, 936, 937, 939, 941, 943, 945, 947, 949, 950, 952, 953, 955, 957, 959, 960, 962, 964, 965, 967, 968, 970, 972, 974, 976, 978, 980, 981, 983, 985, 86, 87, 989, 991, 993, 995, 997, 998, 1000, 1002, 1003, 1005, 1007, 1008, 1009, 1011, 1013, 1014, 1016, 1018, 1020, 1022, 1023, 1024, 1025, 1026, 1027, 1029, 1031, 1033, 1034, 1036, 1038, 1039, 1041, 1042, 1043, 1044, 1045, 1046, 1048, 1049, 1050, 1051, 1052, 1054, 1056, 1058, 1060, 1061, 1062, 1064, 1066, 1067, 1069, 1070, 1071, 1072, 1074, 1076, 1077, 1078, 1079, 1081, 1083, 1085, 1087, 1088, 1090, 1092, 1093, 1095, 1096, 1097, 1099, 1101, 1102, 1104, 1105, 1107, 1108, 1110, 1111, 1112, 1113, 1114, 1115, 1117, 1119, 1120, 1121, 1122, 1124, 1126, 1128, 1130, 1132, 1133, 1135, 1137, 1139, 1141, 1142, 1144, 1146, 1148, 1150, 1152, 1154, 1156, 1157, 1158, 1160, 1162, 1164, 1166, 1168, 1169, 1171, 1173, 1175, 1176, 1177, 1179, 1180, 1181, 1183, 1185, 1187, 1188, 1190, 1192, 1193, 1194, 1196, 1198, 1200, 1201, 1203, 1205, 1207, 1209, 1210, 1212, 1214, 1216, 1218, 1219, 1221, 1222, 1224, 1226, 1228, 1230, 1232, 1234, 1235, 1236, 1238, 1240, 1241, 1243, 1245, 1247, 1249, 1251, 1252, 1253, 1255, 1257, 1259, 1261, 1263, 1265, 1266, 1268, 1270, 1272, 1274, 1276, 1278, 1279, 1281, 1283, 1285, 1287, 1289, 1291, 1293, 1294, 1296, 1297, 1299, 1300, 1302, 1304, 1306, 1308, 1309, 1310, 1312, 1313, 1314, 1316, 1318, 1320, 1322, 1324, 1325, 1326, 1328, 1329, 1330, 1332, 1333, 1334, 1336, 1338, 1339, 1340, 1341, 1342, 1343, 1344, 1345, 1347, 1349, 1350, 1352, 1353, 1355, 1357, 1358, 1359, 1360, 1361, 1363, 1364, 1366, 1367, 1369, 1370, 1371, 1372, 1373, 1375, 1376, 1377, 1379, 1380, 1381, 1382, 1384, 1386, 1388, 1389, 1391, 1393, 1395, 1397, 1399, 1401, 1402, 1403, 1405, 1407, 1409, 1410, 1412, 1414, 1416, 1418, 1420, 1421, 1422, 1424, 1426, 1428, 1429, 1431, 1433, 1435, 1437, 1439, 1440, 1441, 1443, 1445, 1446, 1448, 1450, 1452, 1454, 1456, 1457, 1459, 1461, 1463, 1465, 1467, 1469, 1471, 1473, 1475, 1477, 1479, 1481, 1482, 1483, 1485, 1486, 1488, 1489, 1490, 1492, 1493, 1495, 1497, 1498, 1500, 1502, 1503, 1505, 1506, 1507, 1508, 1509, 1511, 1512, 1514, 1515, 1516, 1518, 1520, 1522, 1523, 1524, 1525, 1526, 1528, 1529, 1531, 1533, 1534, 1535, 1537, 1538, 1540, 1542, 1544, 1546, 1547, 1549, 1550, 1552, 1554, 1555, 1557, 1558, 1560, 1562, 1563, 1564, 1565, 1568, 1569, 1571, 1572, 1574, 1575, 1577, 1578, 1580, 1581, 1583, 1584, 1586, 1588, 1589, 1591, 1593, 1594, 1595, 1596, 1598, 1599, 1600, 1602, 1603, 1604, 1605, 1607, 1609, 1611, 1612, 1613, 1615, 1616, 1618, 1619, 1621, 1622, 1624, 1626, 1628, 1629, 1630, 1632, 1634, 1636, 1637, 1639, 1640, 1642, 1644, 1646, 1647, 1648, 1649, 1650, 1652, 1654, 1656, 1657, 1658, 1660, 1661, 1662, 1664, 1666, 1668, 1669, 1670, 1671, 1672, 1674, 1676, 1677, 1679, 1680, 1681, 1682, 1683, 1684, 1686, 1688, 1689, 1691, 1693, 1695, 1697, 1699, 1700, 1701, 1702, 1704, 1705, 1706, 1707, 1708, 1710, 1711, 1712, 1713, 1714, 1715, 1717, 1719, 1721, 1723, 1724, 1725, 1727, 1729, 1731, 1732, 1734, 1735, 1737, 1739, 1741, 1743, 1745, 1746, 1747, 1749, 1751, 1753, 1755, 1757, 1758, 1759, 1761, 1762, 1764, 1765, 1766, 1767, 1769, 1770, 1772, 1773, 1774, 1776, 1777, 1779, 1781, 1783, 1784, 1786, 1788, 1790, 1792, 1794, 1795, 1797, 798, 1799, 1801, 1803, 1804, 1805, 1806, 1807, 1808, 1809, 1810, 1811, 1812, 1813, 1815, 1816, 1817, 1819, 1821, 1822, 1823, 1825, 1826, 1827, 1828, 1829, 1831, 1833, 1834, 1835, 1837, 1839, 1841, 1842, 1844, 1845, 1847, 1849, 1850, 1852, 1853, 1854, 1855, 1856, 1857, 1858, 1859, 1861, 1863, 1865, 1866, 1867, 1869, 1871, 1872, 1874, 1876, 1877, 1879, 1881, 1882, 1883, 1885, 1887, 1889, 1891, 1893, 1894, 1895, 1897, 1898, 1900, 1902, 1903, 1904, 1906, 1908, 1910, 1912, 1913, 1915, 1917, 1918, 1919, 1920, 1922, 1924, 1926, 1928, 1929, 1931, 1933, 1935, 1936, 1938, 1940, 1942, 1944, 1946, 1948, 1949, 1951, 1953, 1955, 1957, 1959, 1961, 1963, 1965, 1967, 1969, 1971, 1972, 1973, 1974, 1975, 1976, 1978, 1979, 1980, 1982, 1983, 1985, 1986, 1987, 1989, 1990, 1992, 1994, 1996, 1997, 1999, 2000, 2002, 2003, 2005, 2007, 2008, 2009, 2010, 2011, 2013, 2015, 2016, 2017, 2018, 2019, 2021, 2022, 2023, 2024, 2026, 2028, 2030, 2031, 2032, 2034, 2036, 2037, 2038, 2040, 2041, 2042, 2043, 2044, 2046, 2047, 2048, 2049, 2051, 2053, 2055, 2056, 2058, 2060, 2062, 2064, 2066, 2067, 2069, 2070, 2072, 2073, 2074, 2075, 2076, 2077, 2078, 2079, 2081, 2083, 2085, 2087, 2088, 2090, 2091, 2092, 2093, 2095, 2097, 2098, 2100, 2102, 2104, 2105, 2106, 2108, 2110, 2112, 2113, 2115, 2117, 2118, 2119, 2120, 2121, 2122, 2124, 2126, 2128, 2129, 2130, 2132, 2133, 2135, 2136, 2137, 2138, 2140, 2141, 2142, 2143, 2144, 2146, 2148, 2149, 2150, 2151, 2152, 2153, 2154, 2156, 2158, 2159, 2160, 2161, 2162, 2163, 2165, 2167, 2169, 2170, 2171, 2172, 2173, 2174, 2175, 2176, 2177, 2178, 2179, 2181, 2183, 2184, 2186, 2187, 2188, 2190, 2192, 2194, 2195, 2196, 2197, 2198, 2199, 2200, 2201, 2202, 2203, 2205, 2207, 2209, 2211, 2213, 2215, 2217, 2219, 2221, 2223, 2225, 2226, 2228, 2229, 2231, 2233, 2235, 2236, 2237, 2238, 2239, 2240, 2241, 2243, 2244, 2246, 2248, 2250, 2251, 2253, 2255, 2257, 2259, 2261, 2262, 2264, 2265, 2267, 2269, 2270, 2272, 2273, 2275, 2276, 2278, 2279, 2281, 2282, 2284, 2285, 2286, 2288, 2289, 2291, 2293, 2295, 2296, 2297, 2298, 2299, 2300, 2302, 2304, 2306, 2307, 2309, 2310, 2312, 2313, 2314, 2315, 2316, 2317, 2318, 2320, 2321, 2323, 2325, 2327, 2329, 2330, 2332, 2334, 2335, 2337, 2339, 2341, 2343, 2345, 2346, 2347, 2348, 2350, 2352, 2354, 2356, 2357, 2358, 2360, 2361, 2362, 2364, 2366, 2367, 2369, 2371, 2373, 2375, 2376, 2378, 2380, 2381, 2383, 2384, 2386, 2388, 2390, 2391, 2392, 2394, 2396, 2397, 2399, 2401, 2402, 2403, 2405, 2407, 2408, 2409, 2411, 2413, 2415, 2417, 2418, 2419, 2421, 2422, 2423, 2424, 2425, 2427, 2428, 2429, 2430, 2432, 2434, 2435, 2437, 2439, 2440, 2441, 2442, 2443, 2445, 2446, 2448, 2449, 2451, 2452, 2454, 2456, 2457, 2458, 2459, 2460, 2461, 2462, 2463, 2464, 2466, 2468, 2469, 2470, 2471, 2472, 2474, 2475, 2476, 2477, 2478, 2480, 2482, 2483, 2484, 2485, 2486, 2487, 2488, 2489, 2490, 2491, 2493, 2494, 2495, 2496, 2497, 2498, 2499, 2500, 2502, 2503, 2505, 2506, 2507, 2509, 2510, 2511, 2512, 2513, 2514, 2516, 2517, 2518, 2519, 2521, 2522, 2523, 2525, 2527, 2529, 2530, 2531, 2533, 2535, 2537, 2539, 2540, 2541, 2542, 2544, 2546, 2547, 2548, 2550, 2551, 2552, 2554, 2556, 2557, 2558, 2559, 2561, 2562, 2564, 2565, 2567, 2569, 2571, 2572, 2573, 2574, 2575, 2576, 2578, 2580, 2581, 2583, 2584, 2585, 2587, 2588, 2589, 2590, 2592, 2593, 2594, 2595, 2597, 2599, 2601, 2603, 2604, 2606, 2608, 2609, 2611, 2612, 2614, 2615, 2616, 2617, 2619, 2621, 2623, 2624, 2626, 2627, 2628, 2629, 2631, 2632, 2634, 2636, 2638, 2640, 2641, 2642, 2644, 2646, 2647, 2648, 2649, 2650, 2652, 2654, 2656, 2658, 2659, 2661, 2663, 2665, 2667, 2668, 2670, 2672, 2674, 2675, 2677, 2679, 2681, 2683, 2685, 2687, 2689, 2691, 2693, 2695, 2697, 2699, 2701, 2703, 2704, 2706, 2708, 2710, 2711, 2712, 2714, 2716, 2717, 2719, 2721, 2722, 2724, 2726, 2728, 2730, 2732, 2734, 2735, 2736, 2738, 2739, 2740, 2741, 2743, 2745, 2746, 2748, 2750, 2751, 2753, 2754, 2756, 2758, 2760, 2762, 2764, 2766, 2768, 2770, 2771, 2772, 2773, 2775, 2777, 2778, 2780, 2781, 2782, 2784, 2786, 2788, 2790, 2791, 2792, 2794, 2796, 2797, 2799, 2801, 2802, 2803, 2804, 2806, 2807, 2809, 2810, 2811, 2813, 2815, 2816, 2818, 2819, 2821, 2822, 2823, 2825, 2826, 2828, 2830, 2832, 2833, 2835, 2836, 2838, 2840, 2842, 2844, 2845, 2846, 2847, 2849, 2850, 2851, 2852, 2853, 2855, 2856, 2857, 2858, 2859, 2861, 2862, 2863, 2864, 2866, 2867, 2868, 2869, 2870, 2872, 2873, 2875, 2876, 2877, 2878, 2880, 2882, 2883, 2885, 2886, 2888, 2890, 2891, 2892, 2893, 2894, 2896, 2898, 2900, 2902, 2903, 2904, 2906, 2907, 2908, 2909, 2910, 2911, 2915, 2917, 2918, 2919, 2920, 2921, 2922, 2923, 2924, or 2926. A plant produced from the plant cell can be used to generate a plant that has a difference in the level of biomass as compared to the corresponding level of biomass of a control plant that does not comprise the exogenous nucleic acid.

[0012] In another aspect, a method comprises growing a plant cell comprising an exogenous nucleic acid. The exogenous nucleic acid comprises a regulatory region operably linked to a nucleotide sequence having 80 percent or greater sequence identity to a nucleotide sequence, or a fragment thereof, set forth in SEQ ID NO:1, 3, 7, 9, 11, 14, 16, 19, 21, 23, 28, 31, 33, 36, 40, 42, 44, 46, 48, 50, 52, 54, 58, 61, 66, 68, 72, 76, 78, 87, 89, 114, 116, 118, 125, 127, 130, 132, 134, 136, 138, 143, 145, 151, 153, 156, 159, 161, 164, 166, 168, 170, 172, 174, 177, 179, 181, 184, 186, 188, 190, 192, 202, 204, 206, 210, 212, 216, 221, 225, 227, 230, 241, 243, 253, 280, 283, 285, 290, 292, 296, 298, 301, 303, 305, 309, 312, 314, 321, 323, 325, 327, 329, 332, 334, 336, 339, 341, 344, 348, 352, 356, 359, 361, 366, 368, 376, 381, 388, 392, 394, 397, 399, 402, 405, 407, 413, 416, 418, 455, 458, 460, 463, 465, 471, 473, 476, 478, 481, 486, 496, 498, 500, 505, 508, 513, 519, 521, 523, 525, 527, 529, 541, 544, 549, 552, 556, 558, 561, 564, 567, 569, 571, 574, 578, 588, 594, 600, 603, 606, 608, 628, 630, 632, 639, 641, 643, 645, 647, 649, 652, 661, 668, 670, 673, 675, 678, 681, 683, 686, 688, 692, 695, 699, 701, 703, 708, 711, 713, 716, 724, 729, 736, 738, 740, 742, 748, 750, 754, 756, 758, 761, 763, 765, 767, 769, 771, 774, 777, 779, 781, 783, 785, 787, 790, 792, 797, 799, 803, 806, 808, 810, 812, 814, 816, 818, 821, 826, 829, 831, 833, 835, 837, 839, 841, 845, 847, 852, 854, 859, 862, 865, 867, 869, 872, 875, 877, 879, 881, 884, 886, 888, 891, 894, 898, 900, 904, 906, 911, 913, 918, 920, 922, 924, 927, 929, 931, 933, 938, 940, 942, 944, 946, 948, 951, 954, 956, 958, 961, 963, 966, 969, 971, 973, 975, 977, 979, 982, 984, 988, 990, 992, 994, 996, 999, 1001, 1004, 1006, 1010, 1012, 1015, 1017, 1019, 1021, 1028, 1030, 1032, 1035, 1037, 1040, 1047, 1053, 1055, 1057, 1059, 1063, 1065, 1068, 1073, 1075, 1080, 1082, 1084, 1086, 1089, 1091, 1094, 1098, 1100, 1103, 1106, 1109, 1116, 1118, 1123, 1125, 1127, 1129, 1131, 1134, 1136, 1138, 1140, 1143, 1145, 1147, 1149, 1151, 1153, 1155, 1159, 1161, 1163, 1165, 1167, 1170, 1172, 1174, 1178, 1182, 1184, 1186, 1189, 1191, 1195, 1197, 1199, 1202, 1204, 1206, 1208, 1211, 1213, 1215, 1217, 1220, 1223, 1225, 1227, 1229, 1231, 1233, 1237, 1239, 1242, 1244, 1246, 1248, 1250, 1254, 1256, 1258, 1260, 1262, 1264, 1267, 1269, 1271, 1273, 1275, 1277, 1280, 1282, 1284, 1286, 1288, 1290, 1292, 1295, 1298, 1301, 1303, 1305, 1307, 1311, 1315, 1317, 1319, 1321, 1323, 1327, 1331, 1335, 1337, 1346, 1348, 1351, 1354, 1356, 1362, 1365, 1368, 1374, 1378, 1383, 1385, 1387, 1390, 1392, 1394, 1396, 1398, 1400, 1404, 1406, 1408, 1411, 1413, 1415, 1417, 1419, 1423, 1425, 1427, 1430, 1432, 1434, 1436, 1438, 1442, 1444, 1447, 1449, 1451, 1453, 1455, 1458, 1460, 1462, 1464, 1466, 1468, 1470, 1472, 1474, 1476, 1478, 1480, 1484, 1487, 1491, 1494, 1496, 1499, 1501, 1504, 1510, 1513, 1517, 1519, 1521, 1527, 1530, 1532, 1536, 1539, 1541, 1543, 1545, 1548, 1551, 1553, 1556, 1559, 1561, 1566, 1568, 1570, 1573, 1576, 1579, 1582, 1585, 1587, 1590, 1592, 1597, 1601, 1606, 1608, 1610, 1614, 1617, 1620, 1623, 1625, 1627, 1631, 1633, 1635, 1638, 1641, 1643, 1645, 1651, 1653, 1655, 1659, 1663, 1665, 1667, 1673, 1675, 1678, 1685, 1687, 1690, 1692, 1694, 1696, 1698, 1703, 1709, 1716, 1718, 1720, 1722, 1726, 1728, 1730, 1733, 1736, 1738, 1740, 1742, 1744, 1748, 1750, 1752, 1754, 1756, 1760, 1763, 1768, 1771, 1775, 1778, 1780, 1782, 1785, 1787, 1789, 1791, 1793, 1796, 1800, 1802, 1814, 1818, 1820, 1824, 1830, 1832, 1836, 1838, 1840, 1843, 1846, 1848, 1851, 1860, 1862, 1864, 1868, 1870, 1873, 1875, 1878, 1880, 1884, 1886, 1888, 1890, 1892, 1896, 1899, 1901, 1905, 1907, 1909, 1911, 1914, 1916, 1921, 1923, 1925, 1927, 1930, 1932, 1934, 1937, 1939, 1941, 1943, 1945, 1947, 1950, 1952, 1954, 1956, 1958, 1960, 1962, 1964, 1966, 1968, 1970, 1977, 1981, 1984, 1988, 1991, 1993, 1995, 1998, 2001, 2004, 2006, 2012, 2014, 2020, 2025, 2027, 2029, 2033, 2035, 2039, 2045, 2050, 2052, 2054, 2057, 2059, 2061, 2063, 2065, 2068, 2071, 2080, 2082, 2084, 2086, 2089, 2094, 2096, 2099, 2101, 2103, 2107, 2109, 2111, 2114, 2116, 2123, 2125, 2127, 2131, 2134, 2139, 2145, 2147, 2155, 2157, 2164, 2166, 2168, 2180, 2182, 2185, 2189, 2191, 2193, 2204, 2206, 2208, 2210, 2212, 2214, 2216, 2218, 2220, 2222, 2224, 2227, 2230, 2232, 2234, 2242, 2245, 2247, 2249, 2252, 2254, 2256, 2258, 2260, 2263, 2266, 2268, 2271, 2274, 2277, 2280, 2283, 2287, 2290, 2292, 2294, 2301, 2303, 2305, 2308, 2311, 2319, 2322, 2324, 2326, 2328, 2331, 2333, 2336, 2338, 2340, 2342, 2344, 2349, 2351, 2353, 2355, 2359, 2363, 2365, 2368, 2370, 2372, 2374, 2377, 2379, 2382, 2385, 2387, 2389, 2393, 2395, 2398, 2400, 2404, 2406, 2410, 2412, 2414, 2416, 2420, 2426, 2431, 2433, 2436, 2438, 2444, 2447, 2450, 2453, 2455, 2465, 2467, 2473, 2479, 2481, 2492, 2501, 2504, 2508, 2515, 2520, 2524, 2526, 2528, 2532, 2534, 2536, 2538, 2543, 2545, 2549, 2553, 2555, 2560, 2563, 2566, 2568, 2570, 2577, 2579, 2582, 2586, 2591, 2596, 2598, 2600, 2602, 2605, 2607, 2610, 2613, 2618, 2620, 2622, 2625, 2630, 2633, 2635, 2637, 2639, 2643, 2645, 2651, 2653, 2655, 2657, 2660, 2662, 2664, 2666, 2669, 2671, 2673, 2676, 2678, 2680, 2682, 2684, 2686, 2688, 2690, 2692, 2694, 2696, 2698, 2700, 2702, 2705, 2707, 2709, 2713, 2715, 2718, 2720, 2723, 2725, 2727, 2729, 2731, 2733, 2737, 2742, 2744, 2747, 2749, 2752, 2755, 2757, 2759, 2761, 2763, 2765, 2767, 2769, 2774, 2776, 2779, 2783, 2785, 2787, 2789, 2793, 2795, 2798, 2800, 2805, 2808, 2812, 2814, 2817, 2820, 2824, 2827, 2829, 2831, 2834, 2837, 2839, 2841, 2843, 2848, 2854, 2860, 2865, 2871, 2874, 2879, 2881, 2884, 2887, 2889, 2895, 2897, 2899, 2901, 2905, 2912, 2914, 2916, or 2925. A plant produced from the plant cell has a difference in the level of biomass as compared to the corresponding level of biomass of a control plant that does not comprise the exogenous nucleic acid.

[0013] Methods of modulating the level of biomass in a plant are provided herein. In one aspect, a method comprises introducing into a plant cell an exogenous nucleic acid that comprises a regulatory region operably linked to a nucleotide sequence encoding a polypeptide. The HMM bit score of the amino acid sequence of the polypeptide is greater than about 915, 1149, 618, 324, 752, 866, 703, 862, 883, 393, 232, 815, 1251, 1066, 1398, 370, 328, 133, 265, 843, 93, 175, 2105, 1213, 1174, 1138, 1126, 1812, 824, 1240, 1078, 873, 1102, 754, 539, 657, 1925, 1104, 1347, 1096, 851, 761, 815, 1121, 681, 677, 146, 286, 493, or 316, using an HMM generated from the amino acid sequences depicted in one of FIGS. 1, 2, 3, 4, 5, 6, 7, 8, 9, 10, 11, 12, 13, 14, 15, 16, 17, 18, 19, 20, 21, 22, 23, 24, 25, 26, 27, 28, 29, 30, 31, 32, 33, 34, 35, 36, 37, 38, 39, 40, 41, 42, 43, 44, 45, 46, 47, 48, 49, or 50, respectively. A plant produced from the plant cell has a difference in the level of biomass as compared to the corresponding level of biomass of a control plant that does not comprise the exogenous nucleic acid.

[0014] In certain embodiments, the HMM score of the amino acid sequence of the polypeptide is greater than about 915, using an HMM generated from the amino acid sequences depicted in FIG. 1, wherein the polypeptide comprises a Myb-like DNA-binding domain, having at least 60 percent or greater (e.g., 65, 70, 75, 80, 85, 90, 95, 99, or 100%) sequence identity to residues 14 to 61 or 67 to 112 of SEQ ID NO: 2880, or polypeptides comprising Myb-like DNA-binding domains identified in the sequence listing.

[0015] In certain embodiments, the HMM score of the amino acid sequence of the polypeptide is greater than about 618, using an HMM generated from the amino acid sequences depicted in FIG. 3, wherein the polypeptide comprises a K-box domain having at least 60 percent or greater (e.g., 65, 70, 75, 80, 85, 90, 95, 99, or 100%) sequence identity to residues 75 to 176 of SEQ ID NO:403 and a SRF-type transcription factor domain (DNA-binding and dimerisation domain) having at least 60 percent or greater (e.g., 65, 70, 75, 80, 85, 90, 95, 99, or 100%) sequence identity to residues 9 to 59 of SEQ ID NO:403, or polypeptides comprising Domain K-box domains and SRF-type transcription factors identified in the sequence listing.

[0016] In certain embodiments, the HMM score of the amino acid sequence of the polypeptide is greater than about 324, using an HMM generated from the amino acid sequences depicted in FIG. 4, wherein the polypeptide comprises a Basic region leucine zipper domain or a bZIP transcription factor domain having at least 60 percent or greater (e.g., 65, 70, 75, 80, 85, 90, 95, 99, or 100%) sequence identity to residues 68 to 122 of SEQ ID NO:669, or Basic region leucine zipper or bZIP transcription factor domains identified in the sequence listing.

[0017] In certain embodiments, the HMM score of the amino acid sequence of the polypeptide is greater than about 752, using an HMM generated from the amino acid sequences depicted in FIG. 5, wherein the polypeptide comprises a KNOX2 domain, a KNOX1 domain, and an ELK domain having at least 60 percent or greater (e.g., 65, 70, 75, 80, 85, 90, 95, 99, or 100%) sequence identity to residues 213 to 268, 157 to 201, and 322 to 343, respectively, of SEQ ID NO: 1797, or KNOX2, KNOX1, and ELK domains identified in the sequence listing.

[0018] In certain embodiments, the HMM score of the amino acid sequence of the polypeptide is greater than about 866, using an HMM generated from the amino acid sequences depicted in FIG. 6, wherein the polypeptide comprises a O-methyltransferase and a dimerisation domain having at least 60 percent or greater (e.g., 65, 70, 75, 80, 85, 90, 95, 99, or 100%) sequence identity to residues 31 to 82 and 91 to 255 of SEQ ID NO:717, or O-methyltransferase and dimerisation domains identified in the sequence listing.

[0019] In certain embodiments, the HMM score of the amino acid sequence of the polypeptide is greater than about 703, using an HMM generated from the amino acid sequences depicted in FIG. 7, wherein the polypeptide comprises an AP2 domain having at least 60 percent or greater (e.g., 65, 70, 75, 80, 85, 90, 95, 99, or 100%) sequence identity to residues 209 to 260 of SEQ ID NO:693, or AP2 domains identified in the sequence listing.

[0020] In certain embodiments, the HMM score of the amino acid sequence of the polypeptide is greater than about 862, using an HMM generated from the amino acid sequences depicted in FIG. 8, wherein the polypeptide comprises a Fasciclin domain having at least 60 percent or greater (e.g., 65, 70, 75, 80, 85, 90, 95, 99, or 100%) sequence identity to residues 202 to 334 of SEQ ID NO:1517, or Fasciclin domains identified in the sequence listing.

[0021] In certain embodiments, the HMM score of the amino acid sequence of the polypeptide is greater than about 883, using an HMM generated from the amino acid sequences depicted in FIG. 9, wherein the polypeptide comprises a NAD dependent epimerase/dehydratase family domain having at least 60 percent or greater (e.g., 65, 70, 75, 80, 85, 90, 95, 99, or 100%) sequence identity to residues 21 to 253 of SEQ ID NO: 1624, or NAD dependent epimerase/dehydratase family domains identified in the sequence listing.

[0022] In certain embodiments, the HMM score of the amino acid sequence of the polypeptide is greater than about 393, using an HMM generated from the amino acid sequences depicted in FIG. 10, wherein the polypeptide comprises a X8 domain having at least 60 percent or greater (e.g., 65, 70, 75, 80, 85, 90, 95, 99, or 100%) sequence identity to residues 21 to 106 of SEQ ID NO:1887, or X8 domains identified in the sequence listing.

[0023] In certain embodiments, the HMM score of the amino acid sequence of the polypeptide is greater than about 815, using an HMM generated from the amino acid sequences depicted in FIG. 12, wherein the polypeptide comprises a peroxidase domain having at least 60 percent or greater (e.g., 65, 70, 75, 80, 85, 90, 95, 99, or 100%) sequence identity to residues 88 to 453 of SEQ ID NO:1318, or peroxidase domains identified in the sequence listing.

[0024] In certain embodiments, the HMM score of the amino acid sequence of the polypeptide is greater than about 1251, using an HMM generated from the amino acid sequences depicted in FIG. 13, wherein the polypeptide comprises a DUF563 domain having at least 60 percent or greater (e.g., 65, 70, 75, 80, 85, 90, 95, 99, or 100%) sequence identity to residues 109 to 357 of SEQ ID NO:459, or DUF563 domains identified in the sequence listing.

[0025] In certain embodiments, the HMM score of the amino acid sequence of the polypeptide is greater than about 1066, using an HMM generated from the amino acid sequences depicted in FIG. 14, wherein the polypeptide comprises a UDP-glucoronosyl and UDP-glucosyl transferase domain having at least 60 percent or greater (e.g., 65, 70, 75, 80, 85, 90, 95, 99, or 100%) sequence identity to residues 4 to 457 of SEQ ID NO:335, or UDP-glucoronosyl and UDP-glucosyl transferase domains identified in the sequence listing.

[0026] In certain embodiments, the HMM score of the amino acid sequence of the polypeptide is greater than about 1398, using an HMM generated from the amino acid sequences depicted in FIG. 15, wherein the polypeptide comprises a DUF563 domain having at least 60 percent or greater (e.g., 65, 70, 75, 80, 85, 90, 95, 99, or 100%) sequence identity to residues 98 to 342 of SEQ ID NO: 846, or DUF563 domains identified in the sequence listing.

[0027] In certain embodiments, the HMM score of the amino acid sequence of the polypeptide is greater than about 370, using an HMM generated from the amino acid sequences depicted in FIG. 16, wherein the polypeptide comprises an aminotransferase class I and II domain having at least 60 percent or greater (e.g., 65, 70, 75, 80, 85, 90, 95, 99, or 100%) sequence identity to residues 88 to 453 of SEQ ID NO: 645, or Aminotransferase class I and II domains identified in the sequence listing.

[0028] In certain embodiments, the HMM score of the amino acid sequence of the polypeptide is greater than about 328, using an HMM generated from the amino acid sequences depicted in FIG. 17, wherein the polypeptide comprises a Dirigent-like protein domain having at least 60 percent or greater (e.g., 65, 70, 75, 80, 85, 90, 95, 99, or 100%) sequence identity to residues 1 to 146 of SEQ ID NO: 2525, or Dirigent-like protein domains identified in the sequence listing.

[0029] In certain embodiments, the HMM score of the amino acid sequence of the polypeptide is greater than about 133, using an HMM generated from the amino acid sequences depicted in FIG. 18, wherein the polypeptide comprises a DUF1070 domain having at least 60 percent or greater (e.g., 65, 70, 75, 80, 85, 90, 95, 99, or 100%) sequence identity to residues 8 to 61 of SEQ ID NO: 1272, or DUF1070 domains identified in the sequence listing.

[0030] In certain embodiments, the HMM score of the amino acid sequence of the polypeptide is greater than about 843, using an HMM generated from the amino acid sequences depicted in FIG. 20, wherein the polypeptide comprises a Pectinesterase domain having at least 60 percent or greater (e.g., 65, 70, 75, 80, 85, 90, 95, 99, or 100%) sequence identity to residues 88 to 453 of SEQ ID NO: 1660, or Pectinesterase domains identified in the sequence listing.

[0031] In certain embodiments, the HMM score of the amino acid sequence of the polypeptide is greater than about 175, using an HMM generated from the amino acid sequences depicted in FIG. 22, wherein the polypeptide comprises a Myb-like DNA-binding domain having at least 60 percent or greater (e.g., 65, 70, 75, 80, 85, 90, 95, 99, or 100%) sequence identity to residues 10 to 59 of SEQ ID NO: 1137, or Myb-like DNA-binding domains identified in the sequence listing.

[0032] In certain embodiments, the HMM score of the amino acid sequence of the polypeptide is greater than about 2105, using an HMM generated from the amino acid sequences depicted in FIG. 23, wherein the polypeptide comprises a Glycosyl hydrolase family 35 domain and a Galactose binding lectin domain having at least 60 percent or greater (e.g., 65, 70, 75, 80, 85, 90, 95, 99, or 100%) sequence identity to residues 70 to 376 and 830 to 906 of SEQ ID NO: 2466, or Glycosyl hydrolase family 35 and Galactose binding lectin domains identified in the sequence listing.

[0033] In certain embodiments, the HMM score of the amino acid sequence of the polypeptide is greater than about 1213, using an HMM generated from the amino acid sequences depicted in FIG. 24, wherein the polypeptide comprises a DUF563 domain having at least 60 percent or greater (e.g., 65, 70, 75, 80, 85, 90, 95, 99, or 100%) sequence identity to residues 252 to 501 of SEQ ID NO:1106, or DUF563 domains identified in the sequence listing.

[0034] In certain embodiments, the HMM score of the amino acid sequence of the polypeptide is greater than about 1174, using an HMM generated from the amino acid sequences depicted in FIG. 25, wherein the polypeptide comprises a UDP-glucoronosyl and UDP-glucosyl transferases domain having at least 60 percent or greater (e.g., 65, 70, 75, 80, 85, 90, 95, 99, or 100%) sequence identity to residues 24 to 465 of SEQ ID NO: 1946, or UDP-glucoronosyl and UDP-glucosyl transferases domains identified in the sequence listing.

[0035] In certain embodiments, the HMM score of the amino acid sequence of the polypeptide is greater than about 1138, using an HMM generated from the amino acid sequences depicted in FIG. 26, wherein the polypeptide comprises a NAD dependent epimerase/dehydratase family domain having at least 60 percent or greater (e.g., 65, 70, 75, 80, 85, 90, 95, 99, or 100%) sequence identity to residues 20 to 290 of SEQ ID NO:1054, or Epimerase domains identified in the sequence listing.

[0036] In certain embodiments, the HMM score of the amino acid sequence of the polypeptide is greater than about 1126, using an HMM generated from the amino acid sequences depicted in FIG. 27, wherein the polypeptide comprises an Exostosin domain having at least 60 percent or greater (e.g., 65, 70, 75, 80, 85, 90, 95, 99, or 100%) sequence identity to residues 54 to 358 of SEQ ID NO:115, or Exostosin domains identified in the sequence listing.

[0037] In certain embodiments, the HMM score of the amino acid sequence of the polypeptide is greater than about 1812, using an HMM generated from the amino acid sequences depicted in FIG. 28, wherein the polypeptide comprises a NAD dependent epimerase/dehydratase family domain and a RmlD substrate binding domain having at least 60 percent or greater (e.g., 65, 70, 75, 80, 85, 90, 95, 99, or 100%) sequence identity to residues 10 to 253 and 381 to 659 of SEQ ID NO:2708, or a NAD dependent epimerase/dehydratase family and RmlD substrate binding domains identified in the sequence listing.

[0038] In certain embodiments, the HMM score of the amino acid sequence of the polypeptide is greater than about 824, using an HMM generated from the amino acid sequences depicted in FIG. 29, wherein the polypeptide comprises a Glycosyltransferase family 43 domain having at least 60 percent or greater (e.g., 65, 70, 75, 80, 85, 90, 95, 99, or 100%) sequence identity to residues 138 to 364 of SEQ ID NO:1481, or Glycosyltransferase family 43 domains identified in the sequence listing.

[0039] In certain embodiments, the HMM score of the amino acid sequence of the polypeptide is greater than about 1240, using an HMM generated from the amino acid sequences depicted in FIG. 30, wherein the polypeptide comprises a Glycosyl hydrolase family 17 domain and a X8 domain having at least 60 percent or greater (e.g., 65, 70, 75, 80, 85, 90, 95, 99, or 100%) sequence identity to residues 30 to 348 and 368 to 452 of SEQ ID NO:2748, or Glycosyl hydrolase family 17 and X8 domains identified in the sequence listing.

[0040] In certain embodiments, the HMM score of the amino acid sequence of the polypeptide is greater than about 1078, using an HMM generated from the amino acid sequences depicted in FIG. 31, wherein the polypeptide comprises a Transferase family domain having at least 60 percent or greater (e.g., 65, 70, 75, 80, 85, 90, 95, 99, or 100%) sequence identity to residues 5 to 439 of SEQ ID NO:947, or Transferase family domains identified in the sequence listing.

[0041] In certain embodiments, the HMM score of the amino acid sequence of the polypeptide is greater than about 873, using an HMM generated from the amino acid sequences depicted in FIG. 32, wherein the polypeptide comprises an alpha/beta hydrolase fold domain having at least 60 percent or greater (e.g., 65, 70, 75, 80, 85, 90, 95, 99, or 100%) sequence identity to residues 88 to 453 of SEQ ID NO:1727, or alpha/beta hydrolase fold domains identified in the sequence listing.

[0042] In certain embodiments, the HMM score of the amino acid sequence of the polypeptide is greater than about 1102, using an HMM generated from the amino acid sequences depicted in FIG. 33, wherein the polypeptide comprises a UDP-glycoronosyl and UDP-glucosyl transferases domain having at least 60 percent or greater (e.g., 65, 70, 75, 80, 85, 90, 95, 99, or 100%) sequence identity to residues 24 to 247 of SEQ ID NO: 2146, or UDP-glycoronosyl and UDP-glucosyl transferases domains identified in the sequence listing.

[0043] In certain embodiments, the HMM score of the amino acid sequence of the polypeptide is greater than about 754, using an HMM generated from the amino acid sequences depicted in FIG. 34, wherein the polypeptide comprises a Myb-like DNA-binding domain having at least 60 percent or greater (e.g., 65, 70, 75, 80, 85, 90, 95, 99, or 100%) sequence identity to residues 223 to 274 of SEQ ID NO:2619, or Myb-like DNA binding domains identified in the sequence listing.

[0044] In certain embodiments, the HMM score of the amino acid sequence of the polypeptide is greater than about 539, using an HMM generated from the amino acid sequences depicted in FIG. 35, wherein the polypeptide comprises a Chitinase class I domain having at least 60 percent or greater (e.g., 65, 70, 75, 80, 85, 90, 95, 99, or 100%) sequence identity to residues 29 to 246 of SEQ ID NO:211, or Chitinase class I domains identified in the sequence listing.

[0045] In certain embodiments, the HMM score of the amino acid sequence of the polypeptide is greater than about 657, using an HMM generated from the amino acid sequences depicted in FIG. 36, wherein the polypeptide comprises a Pollen allergen domain and a rare lipoprotein A (RlpA)-like double psi beta barrel domain having at least 60 percent or greater (e.g., 65, 70, 75, 80, 85, 90, 95, 99, or 100%) sequence identity to residues 164 to 241 and 67 to 153 of SEQ ID NO: 629, or Pollen allergen and rare lipoprotein A (RlpA)-like double psi beta barrel domains identified in the sequence listing.

[0046] In certain embodiments, the HMM score of the amino acid sequence of the polypeptide is greater than about 1925, using an HMM generated from the amino acid sequences depicted in FIG. 37, wherein the polypeptide comprises a Raffinose synthase or seed inhibition (Sip1) protein domain having at least 60 percent or greater (e.g., 65, 70, 75, 80, 85, 90, 95, 99, or 100%) sequence identity to residues 7 to 752 of SEQ ID NO:2544, or Raffinose synthase or seed inhibition (Sip1) protein domains identified in the sequence listing.

[0047] In certain embodiments, the HMM score of the amino acid sequence of the polypeptide is greater than about 1104, using an HMM generated from the amino acid sequences depicted in FIG. 38, wherein the polypeptide comprises a Glycosyl hydrolase family 28 domain having at least 60 percent or greater (e.g., 65, 70, 75, 80, 85, 90, 95, 99, or 100%) sequence identity to residues 59 to 417 of SEQ ID NO:2599, or Glycosyl hydrolase family 28 domains identified in the sequence listing.

[0048] In certain embodiments, the HMM score of the amino acid sequence of the polypeptide is greater than about 1347, using an HMM generated from the amino acid sequences depicted in FIG. 39, wherein the polypeptide comprises a 4-alpha-glucanotransferase domain having at least 60 percent or greater (e.g., 65, 70, 75, 80, 85, 90, 95, 99, or 100%) sequence identity to residues 90 to 579 of SEQ ID NO: 2437, or 4-alpha-glucanotransferase domains identified in the sequence listing.

[0049] In certain embodiments, the HMM score of the amino acid sequence of the polypeptide is greater than about 1096, using an HMM generated from the amino acid sequences depicted in FIG. 40, wherein the polypeptide comprises a NAD dependent epimerase/dehydratase family domain having at least 60 percent or greater (e.g., 65, 70, 75, 80, 85, 90, 95, 99, or 100%) sequence identity to residues 79 to 342 of SEQ ID NO: 2090, or NAD dependent epimerase/dehydratase family domains identified in the sequence listing.

[0050] In certain embodiments, the HMM score of the amino acid sequence of the polypeptide is greater than about 851, using an HMM generated from the amino acid sequences depicted in FIG. 41, wherein the polypeptide comprises a NAD dependent epimerase/dehydratase family domain having at least 60 percent or greater (e.g., 65, 70, 75, 80, 85, 90, 95, 99, or 100%) sequence identity to residues 14 to 258 of SEQ ID NO: 2323, or NAD dependent epimerase/dehydratase family domains identified in the sequence listing.

[0051] In certain embodiments, the HMM score of the amino acid sequence of the polypeptide is greater than about 761, using an HMM generated from the amino acid sequences depicted in FIG. 42, wherein the polypeptide comprises a No apical meristem (NAM) protein domain having at least 60 percent or greater (e.g., 65, 70, 75, 80, 85, 90, 95, 99, or 100%) sequence identity to residues 12 to 154 of SEQ ID NO:2, or No apical meristem (NAM) protein domains identified in the sequence listing.

[0052] In certain embodiments, the HMM score of the amino acid sequence of the polypeptide is greater than about 815, using an HMM generated from the amino acid sequences depicted in FIG. 43, wherein the polypeptide comprises a NAD dependent epimerase/dehydratase family domain having at least 60 percent or greater (e.g., 65, 70, 75, 80, 85, 90, 95, 99, or 100%) sequence identity to residues 13 to 258 of SEQ ID NO: 2028, or NAD dependent epimerase/dehydratase family domains identified in the sequence listing.

[0053] In certain embodiments, the HMM score of the amino acid sequence of the polypeptide is greater than about 1121, using an HMM generated from the amino acid sequences depicted in FIG. 44, wherein the polypeptide comprises a Transferase family domain having at least 60 percent or greater (e.g., 65, 70, 75, 80, 85, 90, 95, 99, or 100%) sequence identity to residues 4 to 436 of SEQ ID NO:1569, or Transferase family domains identified in the sequence listing.

[0054] In certain embodiments, the HMM score of the amino acid sequence of the polypeptide is greater than about 681, using an HMM generated from the amino acid sequences depicted in FIG. 45, wherein the polypeptide comprises a Glycosyl hydrolase family 18 domain having at least 60 percent or greater (e.g., 65, 70, 75, 80, 85, 90, 95, 99, or 100%) sequence identity to residues 26 to 290 of SEQ ID NO:501, or Glycosyl hydrolase family 18 domains identified in the sequence listing.

[0055] In certain embodiments, the HMM score of the amino acid sequence of the polypeptide is greater than about 677, using an HMM generated from the amino acid sequences depicted in FIG. 46, wherein the polypeptide comprises a Glycosyl hydrolase family 16 domain and a Xyloglucan endo-transglycosylase (XET) domain having at least 60 percent or greater (e.g., 65, 70, 75, 80, 85, 90, 95, 99, or 100%) sequence identity to residues 23 to 204 and 228 to 280 of SEQ ID NO:2190, or a Glycosyl hydrolase family 16 and Xyloglucan endo-transglycosylase (XET) domains identified in the sequence listing.

[0056] In certain embodiments, the HMM score of the amino acid sequence of the polypeptide is greater than about 146, using an HMM generated from the amino acid sequences depicted in FIG. 47, wherein the polypeptide comprises a Potato inhibitor I family domain having at least 60 percent or greater (e.g., 65, 70, 75, 80, 85, 90, 95, 99, or 100%) sequence identity to residues 17 to 76 of SEQ ID NO: 749, or potato inhibitor I family domains identified in the sequence listing.

[0057] In certain embodiments, the HMM score of the amino acid sequence of the polypeptide is greater than about 286, using an HMM generated from the amino acid sequences depicted in FIG. 48, wherein the polypeptide comprises a Plant Thionin domain having at least 60 percent or greater (e.g., 65, 70, 75, 80, 85, 90, 95, 99, or 100%) sequence identity to residues 25 to 67 of SEQ ID NO:79, or Plant Thionin domains identified in the sequence listing.

[0058] In certain embodiments, the HMM score of the amino acid sequence of the polypeptide is greater than about 493, using an HMM generated from the amino acid sequences depicted in FIG. 49, wherein the polypeptide comprises a No apical meristem (NAM) protein domain having at least 60 percent or greater (e.g., 65, 70, 75, 80, 85, 90, 95, 99, or 100%) sequence identity to residues 7 to 125 of SEQ ID NO:284, or No apical meristem (NAM) protein domains identified in the sequence listing.

[0059] In certain embodiments, the HMM score of the amino acid sequence of the polypeptide is greater than about 316, using an HMM generated from the amino acid sequences depicted in FIG. 50, wherein the polypeptide comprises a HMA domain having at least 60 percent or greater (e.g., 65, 70, 75, 80, 85, 90, 95, 99, or 100%) sequence identity to residues 6 to 73 of SEQ ID NO:2915, or HMA domains identified in the sequence listing.

[0060] In another aspect, a method comprises introducing into a plant cell an exogenous nucleic acid that comprises a regulatory region operably linked to a nucleotide sequence encoding a polypeptide having 80 percent or greater sequence identity to an amino acid sequence set forth in SEQ ID NO:2, 4, 5, 6, 8, 10, 12, 13, 15, 17, 18, 20, 22, 24, 25, 26, 27, 29, 30, 32, 34, 35, 37, 38, 39, 41, 43, 45, 47, 49, 51, 53, 55, 56, 57, 59, 60, 62, 63, 64, 65, 67, 69, 70, 71, 73, 74, 75, 77, 79, 80, 81, 82, 83, 84, 85, 86, 88, 90, 91, 92, 93, 94, 95, 96, 97, 98, 99, 100, 101, 102, 103, 104, 105, 106, 107, 108, 109, 110, 111, 112, 113, 115, 117, 119, 120, 121, 122, 123, 124, 126, 128, 129, 131, 133, 135, 137, 139, 140, 141, 142, 144, 146, 147, 148, 149, 150, 152, 154, 155, 157, 158, 160, 162, 163, 165, 167, 169, 171, 173, 175, 176, 178, 180, 182, 183, 185, 187, 189, 191, 193, 194, 195, 196, 197, 198, 199, 200, 201, 203, 205, 207, 208, 209, 211, 213, 214, 215, 217, 218, 219, 220, 222, 223, 224, 226, 228, 229, 231, 232, 233, 234, 235, 236, 237, 238, 239, 240, 242, 244, 245, 246, 247, 248, 249, 250, 251, 252, 254, 255, 256, 257, 258, 259, 260, 261, 262, 263, 264, 265, 266, 267, 268, 269, 270, 271, 272, 273, 274, 275, 276, 277, 278, 279, 281, 282, 284, 286, 287, 288, 289, 291, 293, 294, 295, 297, 299, 300, 302, 304, 306, 307, 308, 310, 311, 313, 315, 316, 317, 318, 319, 320, 322, 324, 326, 328, 330, 331, 333, 335, 337, 338, 340, 342, 343, 345, 346, 347, 349, 350, 351, 353, 354, 355, 357, 358, 360, 362, 363, 364, 365, 367, 369, 370, 371, 372, 373, 374, 375, 377, 378, 379, 380, 382, 383, 384, 385, 386, 387, 389, 390, 391, 393, 395, 396, 398, 400, 401, 403, 404, 406, 408, 409, 410, 411, 412, 414, 415, 417, 419, 420, 421, 422, 423, 424, 425, 426, 427, 428, 429, 430, 431, 432, 433, 434, 435, 436, 437, 438, 439, 440, 441, 442, 443, 444, 445, 446, 447, 448, 449, 450, 451, 452, 453, 454, 456, 457, 459, 461, 462, 464, 466, 467, 468, 469, 470, 472, 474, 475, 477, 479, 480, 482, 483, 484, 485, 487, 488, 489, 490, 491, 492, 493, 494, 495, 497, 499, 501, 502, 503, 504, 506, 507, 509, 510, 511, 512, 514, 515, 516, 517, 518, 520, 522, 524, 526, 528, 530, 531, 532, 533, 534, 535, 536, 537, 538, 539, 540, 542, 543, 545, 546, 547, 548, 550, 551, 553, 554, 555, 557, 559, 560, 562, 563, 565, 566, 568, 570, 572, 573, 575, 576, 577, 579, 580, 581, 582, 583, 584, 585, 586, 587, 589, 590, 591, 592, 593, 595, 596, 597, 598, 599, 601, 602, 604, 605, 607, 609, 610, 611, 612, 613, 614, 615, 616, 617, 618, 619, 620, 621, 622, 623, 624, 625, 626, 627, 629, 631, 633, 634, 635, 36, 637, 638, 640, 642, 644, 646, 648, 650, 651, 653, 654, 655, 656, 657, 658, 659, 660, 662, 663, 664, 665, 666, 667, 669, 671, 672, 674, 676, 677, 679, 680, 682, 684, 685, 687, 689, 690, 691, 693, 694, 696, 697, 698, 00, 702, 704, 705, 706, 707, 709, 710, 712, 714, 715, 717, 718, 719, 720, 721, 722, 723, 725, 726, 727, 728, 730, 731, 732, 733, 734, 735, 737, 739, 741, 743, 744, 745, 746, 747, 749, 751, 752, 753, 755, 757, 759, 760, 762, 764, 766, 768, 770, 772, 773, 775, 776, 778, 780, 782, 784, 786, 788, 789, 791, 793, 794, 795, 796, 798, 800, 801, 802, 804, 805, 807, 809, 811, 813, 815, 817, 819, 820, 822, 823, 824, 825, 827, 828, 830, 832, 834, 836, 838, 840, 842, 843, 844, 846, 848, 849, 850, 851, 853, 855, 856, 857, 858, 860, 861, 863, 864, 866, 868, 870, 871, 873, 874, 876, 878, 880, 882, 883, 885, 887, 889, 890, 892, 893, 895, 896, 897, 899, 901, 902, 903, 905, 907, 908, 909, 910, 912, 914, 915, 916, 917, 919, 921, 923, 925, 926, 928, 930, 932, 934, 935, 936, 937, 939, 941, 943, 945, 947, 949, 950, 952, 953, 955, 957, 959, 960, 962, 964, 965, 967, 968, 970, 972, 974, 976, 978, 980, 981, 983, 985, 86, 87, 989, 991, 993, 995, 997, 998, 1000, 1002, 1003, 1005, 1007, 1008, 1009, 1011, 1013, 1014, 1016, 1018, 1020, 1022, 1023, 1024, 1025, 1026, 1027, 1029, 1031, 1033, 1034, 1036, 1038, 1039, 1041, 1042, 1043, 1044, 1045, 1046, 1048, 1049, 1050, 1051, 1052, 1054, 1056, 1058, 1060, 1061, 1062, 1064, 1066, 1067, 1069, 1070, 1071, 1072, 1074, 1076, 1077, 1078, 1079, 1081, 1083, 1085, 1087, 1088, 1090, 1092, 1093, 1095, 1096, 1097, 1099, 1101, 1102, 1104, 1105, 1107, 1108, 1110, 1111, 1112, 1113, 1114, 1115, 1117, 1119, 1120, 1121, 1122, 1124, 1126, 1128, 1130, 1132, 1133, 1135, 1137, 1139, 1141, 1142, 1144, 1146, 1148, 1150, 1152, 1154, 1156, 1157, 1158, 1160, 1162, 1164, 1166, 1168, 1169, 1171, 1173, 1175, 1176, 1177, 1179, 1180, 1181, 1183, 1185, 1187, 1188, 1190, 1192, 1193, 1194, 1196, 1198, 1200, 1201, 1203, 1205, 1207, 1209, 1210, 1212, 1214, 1216, 1218, 1219, 1221, 1222, 1224, 1226, 1228, 1230, 1232, 1234, 1235, 1236, 1238, 1240, 1241, 1243, 1245, 1247, 1249, 1251, 1252, 1253, 1255, 1257, 1259, 1261, 1263, 1265, 1266, 1268, 1270, 1272, 1274, 1276, 1278, 1279, 1281, 1283, 1285, 1287, 1289, 1291, 1293, 1294, 1296, 1297, 1299, 1300, 1302, 1304, 1306, 1308, 1309, 1310, 1312, 1313, 1314, 1316, 1318, 1320, 1322, 1324, 1325, 1326, 1328, 1329, 1330, 1332, 1333, 1334, 1336, 1338, 1339, 1340, 1341, 1342, 1343, 1344, 1345, 1347, 1349, 1350, 1352, 1353, 1355, 1357, 1358, 1359, 1360, 1361, 1363, 1364, 1366, 1367, 1369, 1370, 1371, 1372, 1373, 1375, 1376, 1377, 1379, 1380, 1381, 1382, 1384, 1386, 1388, 1389, 1391, 1393, 1395, 1397, 1399, 1401, 1402, 1403, 1405, 1407, 1409, 1410, 1412, 1414, 1416, 1418, 1420, 1421, 1422, 1424, 1426, 1428, 1429, 1431, 1433, 1435, 1437, 1439, 1440, 1441, 1443, 1445, 1446, 1448, 1450, 1452, 1454, 1456, 1457, 1459, 1461, 1463, 1465, 1467, 1469, 1471, 1473, 1475, 1477, 1479, 1481, 1482, 1483, 1485, 1486, 1488, 1489, 1490, 1492, 1493, 1495, 1497, 1498, 1500, 1502, 1503, 1505, 1506, 1507, 1508, 1509, 1511, 1512, 1514, 1515, 1516, 1518, 1520, 1522, 1523, 1524, 1525, 1526, 1528, 1529, 1531, 1533, 1534, 1535, 1537, 1538, 1540, 1542, 1544, 1546, 1547, 1549, 1550, 1552, 1554, 1555, 1557, 1558, 1560, 1562, 1563, 1564, 1565, 1568, 1569, 1571, 1572, 1574, 1575, 1577, 1578, 1580, 1581, 1583, 1584, 1586, 1588, 1589, 1591, 1593, 1594, 1595, 1596, 1598, 1599, 1600, 1602, 1603, 1604, 1605, 1607, 1609, 1611, 1612, 1613, 1615, 1616, 1618, 1619, 1621, 1622, 1624, 1626, 1628, 1629, 1630, 1632, 1634, 1636, 1637, 1639, 1640, 1642, 1644, 1646, 1647, 1648, 1649, 1650, 1652, 1654, 1656, 1657, 1658, 1660, 1661, 1662, 1664, 1666, 1668, 1669, 1670, 1671, 1672, 1674, 1676, 1677, 1679, 1680, 1681, 1682, 1683, 1684, 1686, 1688, 1689, 1691, 1693, 1695, 1697, 1699, 1700, 1701, 1702, 1704, 1705, 1706, 1707, 1708, 1710, 1711, 1712, 1713, 1714, 1715, 1717, 1719, 1721, 1723, 1724, 1725, 1727, 1729, 1731, 1732, 1734, 1735, 1737, 1739, 1741, 1743, 1745, 1746, 1747, 1749, 1751, 1753, 1755, 1757, 1758, 1759, 1761, 1762, 1764, 1765, 1766, 1767, 1769, 1770, 1772, 1773, 1774, 1776, 1777, 1779, 1781, 1783, 1784, 1786, 1788, 1790, 1792, 1794, 1795, 1797, 798, 1799, 1801, 1803, 1804, 1805, 1806, 1807, 1808, 1809, 1810, 1811, 1812, 1813, 1815, 1816, 1817, 1819, 1821, 1822, 1823, 1825, 1826, 1827, 1828, 1829, 1831, 1833, 1834, 1835, 1837, 1839, 1841, 1842, 1844, 1845, 1847, 1849, 1850, 1852, 1853, 1854, 1855, 1856, 1857, 1858, 1859, 1861, 1863, 1865, 1866, 1867, 1869, 1871, 1872, 1874, 1876, 1877, 1879, 1881, 1882, 1883, 1885, 1887, 1889, 1891, 1893, 1894, 1895, 1897, 1898, 1900, 1902, 1903, 1904, 1906, 1908, 1910, 1912, 1913, 1915, 1917, 1918, 1919, 1920, 1922, 1924, 1926, 1928, 1929, 1931, 1933, 1935, 1936, 1938, 1940, 1942, 1944, 1946, 1948, 1949, 1951, 1953, 1955, 1957, 1959, 1961, 1963, 1965, 1967, 1969, 1971, 1972, 1973, 1974, 1975, 1976, 1978, 1979, 1980, 1982, 1983, 1985, 1986, 1987, 1989, 1990, 1992, 1994, 1996, 1997, 1999, 2000, 2002, 2003, 2005, 2007, 2008, 2009, 2010, 2011, 2013, 2015, 2016, 2017, 2018, 2019, 2021, 2022, 2023, 2024, 2026, 2028, 2030, 2031, 2032, 2034, 2036, 2037, 2038, 2040, 2041, 2042, 2043, 2044, 2046, 2047, 2048, 2049, 2051, 2053, 2055, 2056, 2058, 2060, 2062, 2064, 2066, 2067, 2069, 2070, 2072, 2073, 2074, 2075, 2076, 2077, 2078, 2079, 2081, 2083, 2085, 2087, 2088, 2090, 2091, 2092, 2093, 2095, 2097, 2098, 2100, 2102, 2104, 2105, 2106, 2108, 2110, 2112, 2113, 2115, 2117, 2118, 2119, 2120, 2121, 2122, 2124, 2126, 2128, 2129, 2130, 2132, 2133, 2135, 2136, 2137, 2138, 2140, 2141, 2142, 2143, 2144, 2146, 2148, 2149, 2150, 2151, 2152, 2153, 2154, 2156, 2158, 2159, 2160, 2161, 2162, 2163, 2165, 2167, 2169, 2170, 2171, 2172, 2173, 2174, 2175, 2176, 2177, 2178, 2179, 2181, 2183, 2184, 2186, 2187, 2188, 2190, 2192, 2194, 2195, 2196, 2197, 2198, 2199, 2200, 2201, 2202, 2203, 2205, 2207, 2209, 2211, 2213, 2215, 2217, 2219, 2221, 2223, 2225, 2226, 2228, 2229, 2231, 2233, 2235, 2236, 2237, 2238, 2239, 2240, 2241, 2243, 2244, 2246, 2248, 2250, 2251, 2253, 2255, 2257, 2259, 2261, 2262, 2264, 2265, 2267, 2269, 2270, 2272, 2273, 2275, 2276, 2278, 2279, 2281, 2282, 2284, 2285, 2286, 2288, 2289, 2291, 2293, 2295, 2296, 2297, 2298, 2299, 2300, 2302, 2304, 2306, 2307, 2309, 2310, 2312, 2313, 2314, 2315, 2316, 2317, 2318, 2320, 2321, 2323, 2325, 2327, 2329, 2330, 2332, 2334, 2335, 2337, 2339, 2341, 2343, 2345, 2346, 2347, 2348, 2350, 2352, 2354, 2356, 2357, 2358, 2360, 2361, 2362, 2364, 2366, 2367, 2369, 2371, 2373, 2375, 2376, 2378, 2380, 2381, 2383, 2384, 2386, 2388, 2390, 2391, 2392, 2394, 2396, 2397, 2399, 2401, 2402, 2403, 2405, 2407, 2408, 2409, 2411, 2413, 2415, 2417, 2418, 2419, 2421, 2422, 2423, 2424, 2425, 2427, 2428, 2429, 2430, 2432, 2434, 2435, 2437, 2439, 2440, 2441, 2442, 2443, 2445, 2446, 2448, 2449, 2451, 2452, 2454, 2456, 2457, 2458, 2459, 2460, 2461, 2462, 2463, 2464, 2466, 2468, 2469, 2470, 2471, 2472, 2474, 2475, 2476, 2477, 2478, 2480, 2482, 2483, 2484, 2485, 2486, 2487, 2488, 2489, 2490, 2491, 2493, 2494, 2495, 2496, 2497, 2498, 2499, 2500, 2502, 2503, 2505, 2506, 2507, 2509, 2510, 2511, 2512, 2513, 2514, 2516, 2517, 2518, 2519, 2521, 2522, 2523, 2525, 2527, 2529, 2530, 2531, 2533, 2535, 2537, 2539, 2540, 2541, 2542, 2544, 2546, 2547, 2548, 2550, 2551, 2552, 2554, 2556, 2557, 2558, 2559, 2561, 2562, 2564, 2565, 2567, 2569, 2571, 2572, 2573, 2574, 2575, 2576, 2578, 2580, 2581, 2583, 2584, 2585, 2587, 2588, 2589, 2590, 2592, 2593, 2594, 2595, 2597, 2599, 2601, 2603, 2604, 2606, 2608, 2609, 2611, 2612, 2614, 2615, 2616, 2617, 2619, 2621, 2623, 2624, 2626, 2627, 2628, 2629, 2631, 2632, 2634, 2636, 2638, 2640, 2641, 2642, 2644, 2646, 2647, 2648, 2649, 2650, 2652, 2654, 2656, 2658, 2659, 2661, 2663, 2665, 2667, 2668, 2670, 2672, 2674, 2675, 2677, 2679, 2681, 2683, 2685, 2687, 2689, 2691, 2693, 2695, 2697, 2699, 2701, 2703, 2704, 2706, 2708, 2710, 2711, 2712, 2714, 2716, 2717, 2719, 2721, 2722, 2724, 2726, 2728, 2730, 2732, 2734, 2735, 2736, 2738, 2739, 2740, 2741, 2743, 2745, 2746, 2748, 2750, 2751, 2753, 2754, 2756, 2758, 2760, 2762, 2764, 2766, 2768, 2770, 2771, 2772, 2773, 2775, 2777, 2778, 2780, 2781, 2782, 2784, 2786, 2788, 2790, 2791, 2792, 2794, 2796, 2797, 2799, 2801, 2802, 2803, 2804, 2806, 2807, 2809, 2810, 2811, 2813, 2815, 2816, 2818, 2819, 2821, 2822, 2823, 2825, 2826, 2828, 2830, 2832, 2833, 2835, 2836, 2838, 2840, 2842, 2844, 2845, 2846, 2847, 2849, 2850, 2851, 2852, 2853, 2855, 2856, 2857, 2858, 2859, 2861, 2862, 2863, 2864, 2866, 2867, 2868, 2869, 2870, 2872, 2873, 2875, 2876, 2877, 2878, 2880, 2882, 2883, 2885, 2886, 2888, 2890, 2891, 2892, 2893, 2894, 2896, 2898, 2900, 2902, 2903, 2904, 2906, 2907, 2908, 2909, 2910, 2911, 2915, 2917, 2918, 2919, 2920, 2921, 2922, 2923, 2924, or 2926. A plant produced from the plant cell has a difference in the level of biomass as compared to the corresponding level of biomass of a control plant that does not comprise the exogenous nucleic acid. The polypeptide in any of the above methods can have the amino acid sequence set forth in SEQ ID NO:2, 4, 5, 6, 8, 10, 12, 13, 15, 17, 18, 20, 22, 24, 25, 26, 27, 29, 30, 32, 34, 35, 37, 38, 39, 41, 43, 45, 47, 49, 51, 53, 55, 56, 57, 59, 60, 62, 63, 64, 65, 67, 69, 70, 71, 73, 74, 75, 77, 79, 80, 81, 82, 83, 84, 85, 86, 88, 90, 91, 92, 93, 94, 95, 96, 97, 98, 99, 100, 101, 102, 103, 104, 105, 106, 107, 108, 109, 110, 111, 112, 113, 115, 117, 119, 120, 121, 122, 123, 124, 126, 128, 129, 131, 133, 135, 137, 139, 140, 141, 142, 144, 146, 147, 148, 149, 150, 152, 154, 155, 157, 158, 160, 162, 163, 165, 167, 169, 171, 173, 175, 176, 178, 180, 182, 183, 185, 187, 189, 191, 193, 194, 195, 196, 197, 198, 199, 200, 201, 203, 205, 207, 208, 209, 211, 213, 214, 215, 217, 218, 219, 220, 222, 223, 224, 226, 228, 229, 231, 232, 233, 234, 235, 236, 237, 238, 239, 240, 242, 244, 245, 246, 247, 248, 249, 250, 251, 252, 254, 255, 256, 257, 258, 259, 260, 261, 262, 263, 264, 265, 266, 267, 268, 269, 270, 271, 272, 273, 274, 275, 276, 277, 278, 279, 281, 282, 284, 286, 287, 288, 289, 291, 293, 294, 295, 297, 299, 300, 302, 304, 306, 307, 308, 310, 311, 313, 315, 316, 317, 318, 319, 320, 322, 324, 326, 328, 330, 331, 333, 335, 337, 338, 340, 342, 343, 345, 346, 347, 349, 350, 351, 353, 354, 355, 357, 358, 360, 362, 363, 364, 365, 367, 369, 370, 371, 372, 373, 374, 375, 377, 378, 379, 380, 382, 383, 384, 385, 386, 387, 389, 390, 391, 393, 395, 396, 398, 400, 401, 403, 404, 406, 408, 409, 410, 411, 412, 414, 415, 417, 419, 420, 421, 422, 423, 424, 425, 426, 427, 428, 429, 430, 431, 432, 433, 434, 435, 436, 437, 438, 439, 440, 441, 442, 443, 444, 445, 446, 447, 448, 449, 450, 451, 452, 453, 454, 456, 457, 459, 461, 462, 464, 466, 467, 468, 469, 470, 472, 474, 475, 477, 479, 480, 482, 483, 484, 485, 487, 488, 489, 490, 491, 492, 493, 494, 495, 497, 499, 501, 502, 503, 504, 506, 507, 509, 510, 511, 512, 514, 515, 516, 517, 518, 520, 522, 524, 526, 528, 530, 531, 532, 533, 534, 535, 536, 537, 538, 539, 540, 542, 543, 545, 546, 547, 548, 550, 551, 553, 554, 555, 557, 559, 560, 562, 563, 565, 566, 568, 570, 572, 573, 575, 576, 577, 579, 580, 581, 582, 583, 584, 585, 586, 587, 589, 590, 591, 592, 593, 595, 596, 597, 598, 599, 601, 602, 604, 605, 607, 609, 610, 611, 612, 613, 614, 615, 616, 617, 618, 619, 620, 621, 622, 623, 624, 625, 626, 627, 629, 631, 633, 634, 635, 36, 637, 638, 640, 642, 644, 646, 648, 650, 651, 653, 654, 655, 656, 657, 658, 659, 660, 662, 663, 664, 665, 666, 667, 669, 671, 672, 674, 676, 677, 679, 680, 682, 684, 685, 687, 689, 690, 691, 693, 694, 696, 697, 698, 00, 702, 704, 705, 706, 707, 709, 710, 712, 714, 715, 717, 718, 719, 720, 721, 722, 723, 725, 726, 727, 728, 730, 731, 732, 733, 734, 735, 737, 739, 741, 743, 744, 745, 746, 747, 749, 751, 752, 753, 755, 757, 759, 760, 762, 764, 766, 768, 770, 772, 773, 775, 776, 778, 780, 782, 784, 786, 788, 789, 791, 793, 794, 795, 796, 798, 800, 801, 802, 804, 805, 807, 809, 811, 813, 815, 817, 819, 820, 822, 823, 824, 825, 827, 828, 830, 832, 834, 836, 838, 840, 842, 843, 844, 846, 848, 849, 850, 851, 853, 855, 856, 857, 858, 860, 861, 863, 864, 866, 868, 870, 871, 873, 874, 876, 878, 880, 882, 883, 885, 887, 889, 890, 892, 893, 895, 896, 897, 899, 901, 902, 903, 905, 907, 908, 909, 910, 912, 914, 915, 916, 917, 919, 921, 923, 925, 926, 928, 930, 932, 934, 935, 936, 937, 939, 941, 943, 945, 947, 949, 950, 952, 953, 955, 957, 959, 960, 962, 964, 965, 967, 968, 970, 972, 974, 976, 978, 980, 981, 983, 985, 86, 87, 989, 991, 993, 995, 997, 998, 1000, 1002, 1003, 1005, 1007, 1008, 1009, 1011, 1013, 1014, 1016, 1018, 1020, 1022, 1023, 1024, 1025, 1026, 1027, 1029, 1031, 1033, 1034, 1036, 1038, 1039, 1041, 1042, 1043, 1044, 1045, 1046, 1048, 1049, 1050, 1051, 1052, 1054, 1056, 1058, 1060, 1061, 1062, 1064, 1066, 1067, 1069, 1070, 1071, 1072, 1074, 1076, 1077, 1078, 1079, 1081, 1083, 1085, 1087, 1088, 1090, 1092, 1093, 1095, 1096, 1097, 1099, 1101, 1102, 1104, 1105, 1107, 1108, 1110, 1111, 1112, 1113, 1114, 1115, 1117, 1119, 1120, 1121, 1122, 1124, 1126, 1128, 1130, 1132, 1133, 1135, 1137, 1139, 1141, 1142, 1144, 1146, 1148, 1150, 1152, 1154, 1156, 1157, 1158, 1160, 1162, 1164, 1166, 1168, 1169, 1171, 1173, 1175, 1176, 1177, 1179, 1180, 1181, 1183, 1185, 1187, 1188, 1190, 1192, 1193, 1194, 1196, 1198, 1200, 1201, 1203, 1205, 1207, 1209, 1210, 1212, 1214, 1216, 1218, 1219, 1221, 1222, 1224, 1226, 1228, 1230, 1232, 1234, 1235, 1236, 1238, 1240, 1241, 1243, 1245, 1247, 1249, 1251, 1252, 1253, 1255, 1257, 1259, 1261, 1263, 1265, 1266, 1268, 1270, 1272, 1274, 1276, 1278, 1279, 1281, 1283, 1285, 1287, 1289, 1291, 1293, 1294, 1296, 1297, 1299, 1300, 1302, 1304, 1306, 1308, 1309, 1310, 1312, 1313, 1314, 1316, 1318, 1320, 1322, 1324, 1325, 1326, 1328, 1329, 1330, 1332, 1333, 1334, 1336, 1338, 1339, 1340, 1341, 1342, 1343, 1344, 1345, 1347, 1349, 1350, 1352, 1353, 1355, 1357, 1358, 1359, 1360, 1361, 1363, 1364, 1366, 1367, 1369, 1370, 1371, 1372, 1373, 1375, 1376, 1377, 1379, 1380, 1381, 1382, 1384, 1386, 1388, 1389, 1391, 1393, 1395, 1397, 1399, 1401, 1402, 1403, 1405, 1407, 1409, 1410, 1412, 1414, 1416, 1418, 1420, 1421, 1422, 1424, 1426, 1428, 1429, 1431, 1433, 1435, 1437, 1439, 1440, 1441, 1443, 1445, 1446, 1448, 1450, 1452, 1454, 1456, 1457, 1459, 1461, 1463, 1465, 1467, 1469, 1471, 1473, 1475, 1477, 1479, 1481, 1482, 1483, 1485, 1486, 1488, 1489, 1490, 1492, 1493, 1495, 1497, 1498, 1500, 1502, 1503, 1505, 1506, 1507, 1508, 1509, 1511, 1512, 1514, 1515, 1516, 1518, 1520, 1522, 1523, 1524, 1525, 1526, 1528, 1529, 1531, 1533, 1534, 1535, 1537, 1538, 1540, 1542, 1544, 1546, 1547, 1549, 1550, 1552, 1554, 1555, 1557, 1558, 1560, 1562, 1563, 1564, 1565, 1568, 1569, 1571, 1572, 1574, 1575, 1577, 1578, 1580, 1581, 1583, 1584, 1586, 1588, 1589, 1591, 1593, 1594, 1595, 1596, 1598, 1599, 1600, 1602, 1603, 1604, 1605, 1607, 1609, 1611, 1612, 1613, 1615, 1616, 1618, 1619, 1621, 1622, 1624, 1626, 1628, 1629, 1630, 1632, 1634, 1636, 1637, 1639, 1640, 1642, 1644, 1646, 1647, 1648, 1649, 1650, 1652, 1654, 1656, 1657, 1658, 1660, 1661, 1662, 1664, 1666, 1668, 1669, 1670, 1671, 1672, 1674, 1676, 1677, 1679, 1680, 1681, 1682, 1683, 1684, 1686, 1688, 1689, 1691, 1693, 1695, 1697, 1699, 1700, 1701, 1702, 1704, 1705, 1706, 1707, 1708, 1710, 1711, 1712, 1713, 1714, 1715, 1717, 1719, 1721, 1723, 1724, 1725, 1727, 1729, 1731, 1732, 1734, 1735, 1737, 1739, 1741, 1743, 1745, 1746, 1747, 1749, 1751, 1753, 1755, 1757, 1758, 1759, 1761, 1762, 1764, 1765, 1766, 1767, 1769, 1770, 1772, 1773, 1774, 1776, 1777, 1779, 1781, 1783, 1784, 1786, 1788, 1790, 1792, 1794, 1795, 1797, 798, 1799, 1801, 1803, 1804, 1805, 1806, 1807, 1808, 1809, 1810, 1811, 1812, 1813, 1815, 1816, 1817, 1819, 1821, 1822, 1823, 1825, 1826, 1827, 1828, 1829, 1831, 1833, 1834, 1835, 1837, 1839, 1841, 1842, 1844, 1845, 1847, 1849, 1850, 1852, 1853, 1854, 1855, 1856, 1857, 1858, 1859, 1861, 1863, 1865, 1866, 1867, 1869, 1871, 1872, 1874, 1876, 1877, 1879, 1881, 1882, 1883, 1885, 1887, 1889, 1891, 1893, 1894, 1895, 1897, 1898, 1900, 1902, 1903, 1904, 1906, 1908, 1910, 1912, 1913, 1915, 1917, 1918, 1919, 1920, 1922, 1924, 1926, 1928, 1929, 1931, 1933, 1935, 1936, 1938, 1940, 1942, 1944, 1946, 1948, 1949, 1951, 1953, 1955, 1957, 1959, 1961, 1963, 1965, 1967, 1969, 1971, 1972, 1973, 1974, 1975, 1976, 1978, 1979, 1980, 1982, 1983, 1985, 1986, 1987, 1989, 1990, 1992, 1994, 1996, 1997, 1999, 2000, 2002, 2003, 2005, 2007, 2008, 2009, 2010, 2011, 2013, 2015, 2016, 2017, 2018, 2019, 2021, 2022, 2023, 2024, 2026, 2028, 2030, 2031, 2032, 2034, 2036, 2037, 2038, 2040, 2041, 2042, 2043, 2044, 2046, 2047, 2048, 2049, 2051, 2053, 2055, 2056, 2058, 2060, 2062, 2064, 2066, 2067, 2069, 2070, 2072, 2073, 2074, 2075, 2076, 2077, 2078, 2079, 2081, 2083, 2085, 2087, 2088, 2090, 2091, 2092, 2093, 2095, 2097, 2098, 2100, 2102, 2104, 2105, 2106, 2108, 2110, 2112, 2113, 2115, 2117, 2118, 2119, 2120, 2121, 2122, 2124, 2126, 2128, 2129, 2130, 2132, 2133, 2135, 2136, 2137, 2138, 2140, 2141, 2142, 2143, 2144, 2146, 2148, 2149, 2150, 2151, 2152, 2153, 2154, 2156, 2158, 2159, 2160, 2161, 2162, 2163, 2165, 2167, 2169, 2170, 2171, 2172, 2173, 2174, 2175, 2176, 2177, 2178, 2179, 2181, 2183, 2184, 2186, 2187, 2188, 2190, 2192, 2194, 2195, 2196, 2197, 2198, 2199, 2200, 2201, 2202, 2203, 2205, 2207, 2209, 2211, 2213, 2215, 2217, 2219, 2221, 2223, 2225, 2226, 2228, 2229, 2231, 2233, 2235, 2236, 2237, 2238, 2239, 2240, 2241, 2243, 2244, 2246, 2248, 2250, 2251, 2253, 2255, 2257, 2259, 2261, 2262, 2264, 2265, 2267, 2269, 2270, 2272, 2273, 2275, 2276, 2278, 2279, 2281, 2282, 2284, 2285, 2286, 2288, 2289, 2291, 2293, 2295, 2296, 2297, 2298, 2299, 2300, 2302, 2304, 2306, 2307, 2309, 2310, 2312, 2313, 2314, 2315, 2316, 2317, 2318, 2320, 2321, 2323, 2325, 2327, 2329, 2330, 2332, 2334, 2335, 2337, 2339, 2341, 2343, 2345, 2346, 2347, 2348, 2350, 2352, 2354, 2356, 2357, 2358, 2360, 2361, 2362, 2364, 2366, 2367, 2369, 2371, 2373, 2375, 2376, 2378, 2380, 2381, 2383, 2384, 2386, 2388, 2390, 2391, 2392, 2394, 2396, 2397, 2399, 2401, 2402, 2403, 2405, 2407, 2408, 2409, 2411, 2413, 2415, 2417, 2418, 2419, 2421, 2422, 2423, 2424, 2425, 2427, 2428, 2429, 2430, 2432, 2434, 2435, 2437, 2439, 2440, 2441, 2442, 2443, 2445, 2446, 2448, 2449, 2451, 2452, 2454, 2456, 2457, 2458, 2459, 2460, 2461, 2462, 2463, 2464, 2466, 2468, 2469, 2470, 2471, 2472, 2474, 2475, 2476, 2477, 2478, 2480, 2482, 2483, 2484, 2485, 2486, 2487, 2488, 2489, 2490, 2491, 2493, 2494, 2495, 2496, 2497, 2498, 2499, 2500, 2502, 2503, 2505, 2506, 2507, 2509, 2510, 2511, 2512, 2513, 2514, 2516, 2517, 2518, 2519, 2521, 2522, 2523, 2525, 2527, 2529, 2530, 2531, 2533, 2535, 2537, 2539, 2540, 2541, 2542, 2544, 2546, 2547, 2548, 2550, 2551, 2552, 2554, 2556, 2557, 2558, 2559, 2561, 2562, 2564, 2565, 2567, 2569, 2571, 2572, 2573, 2574, 2575, 2576, 2578, 2580, 2581, 2583, 2584, 2585, 2587, 2588, 2589, 2590, 2592, 2593, 2594, 2595, 2597, 2599, 2601, 2603, 2604, 2606, 2608, 2609, 2611, 2612, 2614, 2615, 2616, 2617, 2619, 2621, 2623, 2624, 2626, 2627, 2628, 2629, 2631, 2632, 2634, 2636, 2638, 2640, 2641, 2642, 2644, 2646, 2647, 2648, 2649, 2650, 2652, 2654, 2656, 2658, 2659, 2661, 2663, 2665, 2667, 2668, 2670, 2672, 2674, 2675, 2677, 2679, 2681, 2683, 2685, 2687, 2689, 2691, 2693, 2695, 2697, 2699, 2701, 2703, 2704, 2706, 2708, 2710, 2711, 2712, 2714, 2716, 2717, 2719, 2721, 2722, 2724, 2726, 2728, 2730, 2732, 2734, 2735, 2736, 2738, 2739, 2740, 2741, 2743, 2745, 2746, 2748, 2750, 2751, 2753, 2754, 2756, 2758, 2760, 2762, 2764, 2766, 2768, 2770, 2771, 2772, 2773, 2775, 2777, 2778, 2780, 2781, 2782, 2784, 2786, 2788, 2790, 2791, 2792, 2794, 2796, 2797, 2799, 2801, 2802, 2803, 2804, 2806, 2807, 2809, 2810, 2811, 2813, 2815, 2816, 2818, 2819, 2821, 2822, 2823, 2825, 2826, 2828, 2830, 2832, 2833, 2835, 2836, 2838, 2840, 2842, 2844, 2845, 2846, 2847, 2849, 2850, 2851, 2852, 2853, 2855, 2856, 2857, 2858, 2859, 2861, 2862, 2863, 2864, 2866, 2867, 2868, 2869, 2870, 2872, 2873, 2875, 2876, 2877, 2878, 2880, 2882, 2883, 2885, 2886, 2888, 2890, 2891, 2892, 2893, 2894, 2896, 2898, 2900, 2902, 2903, 2904, 2906, 2907, 2908, 2909, 2910, 2911, 2915, 2917, 2918, 2919, 2920, 2921, 2922, 2923, 2924, or 2926. In another aspect, a method comprises introducing into a plant cell an exogenous nucleic acid, that comprises a regulatory region operably linked to a nucleotide sequence having 80 percent or greater sequence identity to a nucleotide sequence set forth in SEQ ID NO:1, 3, 7, 9, 11, 14, 16, 19, 21, 23, 28, 31, 33, 36, 40, 42, 44, 46, 48, 50, 52, 54, 58, 61, 66, 68, 72, 76, 78, 87, 89, 114, 116, 118, 125, 127, 130, 132, 134, 136, 138, 143, 145, 151, 153, 156, 159, 161, 164, 166, 168, 170, 172, 174, 177, 179, 181, 184, 186, 188, 190, 192, 202, 204, 206, 210, 212, 216, 221, 225, 227, 230, 241, 243, 253, 280, 283, 285, 290, 292, 296, 298, 301, 303, 305, 309, 312, 314, 321, 323, 325, 327, 329, 332, 334, 336, 339, 341, 344, 348, 352, 356, 359, 361, 366, 368, 376, 381, 388, 392, 394, 397, 399, 402, 405, 407, 413, 416, 418, 455, 458, 460, 463, 465, 471, 473, 476, 478, 481, 486, 496, 498, 500, 505, 508, 513, 519, 521, 523, 525, 527, 529, 541, 544, 549, 552, 556, 558, 561, 564, 567, 569, 571, 574, 578, 588, 594, 600, 603, 606, 608, 628, 630, 632, 639, 641, 643, 645, 647, 649, 652, 661, 668, 670, 673, 675, 678, 681, 683, 686, 688, 692, 695, 699, 701, 703, 708, 711, 713, 716, 724, 729, 736, 738, 740, 742, 748, 750, 754, 756, 758, 761, 763, 765, 767, 769, 771, 774, 777, 779, 781, 783, 785, 787, 790, 792, 797, 799, 803, 806, 808, 810, 812, 814, 816, 818, 821, 826, 829, 831, 833, 835, 837, 839, 841, 845, 847, 852, 854, 859, 862, 865, 867, 869, 872, 875, 877, 879, 881, 884, 886, 888, 891, 894, 898, 900, 904, 906, 911, 913, 918, 920, 922, 924, 927, 929, 931, 933, 938, 940, 942, 944, 946, 948, 951, 954, 956, 958, 961, 963, 966, 969, 971, 973, 975, 977, 979, 982, 984, 988, 990, 992, 994, 996, 999, 1001, 1004, 1006, 1010, 1012, 1015, 1017, 1019, 1021, 1028, 1030, 1032, 1035, 1037, 1040, 1047, 1053, 1055, 1057, 1059, 1063, 1065, 1068, 1073, 1075, 1080, 1082, 1084, 1086, 1089, 1091, 1094, 1098, 1100, 1103, 1106, 1109, 1116, 1118, 1123, 1125, 1127, 1129, 1131, 1134, 1136, 1138, 1140, 1143, 1145, 1147, 1149, 1151, 1153, 1155, 1159, 1161, 1163, 1165, 1167, 1170, 1172, 1174, 1178, 1182, 1184, 1186, 1189, 1191, 1195, 1197, 1199, 1202, 1204, 1206, 1208, 1211, 1213, 1215, 1217, 1220, 1223, 1225, 1227, 1229, 1231, 1233, 1237, 1239, 1242, 1244, 1246, 1248, 1250, 1254, 1256, 1258, 1260, 1262, 1264, 1267, 1269, 1271, 1273, 1275, 1277, 1280, 1282, 1284, 1286, 1288, 1290, 1292, 1295, 1298, 1301, 1303, 1305, 1307, 1311, 1315, 1317, 1319, 1321, 1323, 1327, 1331, 1335, 1337, 1346, 1348, 1351, 1354, 1356, 1362, 1365, 1368, 1374, 1378, 1383, 1385, 1387, 1390, 1392, 1394, 1396, 1398, 1400, 1404, 1406, 1408, 1411, 1413, 1415, 1417, 1419, 1423, 1425, 1427, 1430, 1432, 1434, 1436, 1438, 1442, 1444, 1447, 1449, 1451, 1453, 1455, 1458, 1460, 1462, 1464, 1466, 1468, 1470, 1472, 1474, 1476, 1478, 1480, 1484, 1487, 1491, 1494, 1496, 1499, 1501, 1504, 1510, 1513, 1517, 1519, 1521, 1527, 1530, 1532, 1536, 1539, 1541, 1543, 1545, 1548, 1551, 1553, 1556, 1559, 1561, 1566, 1568, 1570, 1573, 1576, 1579, 1582, 1585, 1587, 1590, 1592, 1597, 1601, 1606, 1608, 1610, 1614, 1617, 1620, 1623, 1625, 1627, 1631, 1633, 1635, 1638, 1641, 1643, 1645, 1651, 1653, 1655, 1659, 1663, 1665, 1667, 1673, 1675, 1678, 1685, 1687, 1690, 1692, 1694, 1696, 1698, 1703, 1709, 1716, 1718, 1720, 1722, 1726, 1728, 1730, 1733, 1736, 1738, 1740, 1742, 1744, 1748, 1750, 1752, 1754, 1756, 1760, 1763, 1768, 1771, 1775, 1778, 1780, 1782, 1785, 1787, 1789, 1791, 1793, 1796, 1800, 1802, 1814, 1818, 1820, 1824, 1830, 1832, 1836, 1838, 1840, 1843, 1846, 1848, 1851, 1860, 1862, 1864, 1868, 1870, 1873, 1875, 1878, 1880, 1884, 1886, 1888, 1890, 1892, 1896, 1899, 1901, 1905, 1907, 1909, 1911, 1914, 1916, 1921, 1923, 1925, 1927, 1930, 1932, 1934, 1937, 1939, 1941, 1943, 1945, 1947, 1950, 1952, 1954, 1956, 1958, 1960, 1962, 1964, 1966, 1968, 1970, 1977, 1981, 1984, 1988, 1991, 1993, 1995, 1998, 2001, 2004, 2006, 2012, 2014, 2020, 2025, 2027, 2029, 2033, 2035, 2039, 2045, 2050, 2052, 2054, 2057, 2059, 2061, 2063, 2065, 2068, 2071, 2080, 2082, 2084, 2086, 2089, 2094, 2096, 2099, 2101, 2103, 2107, 2109, 2111, 2114, 2116, 2123, 2125, 2127, 2131, 2134, 2139, 2145, 2147, 2155, 2157, 2164, 2166, 2168, 2180, 2182, 2185, 2189, 2191, 2193, 2204, 2206, 2208, 2210, 2212, 2214, 2216, 2218, 2220, 2222, 2224, 2227, 2230, 2232, 2234, 2242, 2245, 2247, 2249, 2252, 2254, 2256, 2258, 2260, 2263, 2266, 2268, 2271, 2274, 2277, 2280, 2283, 2287, 2290, 2292, 2294, 2301, 2303, 2305, 2308, 2311, 2319, 2322, 2324, 2326, 2328, 2331, 2333, 2336, 2338, 2340, 2342, 2344, 2349, 2351, 2353, 2355, 2359, 2363, 2365, 2368, 2370, 2372, 2374, 2377, 2379, 2382, 2385, 2387, 2389, 2393, 2395, 2398, 2400, 2404, 2406, 2410, 2412, 2414, 2416, 2420, 2426, 2431, 2433, 2436, 2438, 2444, 2447, 2450, 2453, 2455, 2465, 2467, 2473, 2479, 2481, 2492, 2501, 2504, 2508, 2515, 2520, 2524, 2526, 2528, 2532, 2534, 2536, 2538, 2543, 2545, 2549, 2553, 2555, 2560, 2563, 2566, 2568, 2570, 2577, 2579, 2582, 2586, 2591, 2596, 2598, 2600, 2602, 2605, 2607, 2610, 2613, 2618, 2620, 2622, 2625, 2630, 2633, 2635, 2637, 2639, 2643, 2645, 2651, 2653, 2655, 2657, 2660, 2662, 2664, 2666, 2669, 2671, 2673, 2676, 2678, 2680, 2682, 2684, 2686, 2688, 2690, 2692, 2694, 2696, 2698, 2700, 2702, 2705, 2707, 2709, 2713, 2715, 2718, 2720, 2723, 2725, 2727, 2729, 2731, 2733, 2737, 2742, 2744, 2747, 2749, 2752, 2755, 2757, 2759, 2761, 2763, 2765, 2767, 2769, 2774, 2776, 2779, 2783, 2785, 2787, 2789, 2793, 2795, 2798, 2800, 2805, 2808, 2812, 2814, 2817, 2820, 2824, 2827, 2829, 2831, 2834, 2837, 2839, 2841, 2843, 2848, 2854, 2860, 2865, 2871, 2874, 2879, 2881, 2884, 2887, 2889, 2895, 2897, 2899, 2901, 2905, 2912, 2914, 2916, or 2925, or a fragment thereof. A plant produced from the plant cell has a difference in the level of biomass as compared to the corresponding level of biomass of a control plant that does not comprise the exogenous nucleic acid.

[0061] Plant cells comprising an exogenous nucleic acid are provided herein. In one aspect, the exogenous nucleic acid comprises a regulatory region operably linked to a nucleotide sequence encoding a polypeptide. The HMM bit score of the amino acid sequence of the polypeptide is greater than about 915, 1149, 618, 324, 752, 866, 703, 862, 883, 393, 232, 815, 1251, 1066, 1398, 370, 328, 133, 265, 843, 93, 175, 2105, 1213, 1174, 1138, 1126, 1812, 824, 1240, 1078, 873, 1102, 754, 539, 657, 1925, 1104, 1347, 1096, 851, 761, 815, 1121, 681, 677, 146, 286, 493, or 316, using an HMM based on the amino acid sequences depicted in one of FIG. 1, 2, 3, 4, 5, 6, 7, 8, 9, 10, 11, 12, 13, 14, 15, 16, 17, 18, 19, 20, 21, 22, 23, 24, 25, 26, 27, 28, 29, 30, 31, 32, 33, 34, 35, 36, 37, 38, 39, 40, 41, 42, 43, 44, 45, 46, 47, 48, 49, or 50. The plant has a difference in the level of biomass as compared to the corresponding level of biomass of a control plant that does not comprise the exogenous nucleic acid. In another aspect, the exogenous nucleic acid comprises a regulatory region operably linked to a nucleotide sequence encoding a polypeptide having 80 percent or greater sequence identity to an amino acid sequence selected from the group consisting of SEQ ID NO:2, 4, 5, 6, 8, 10, 12, 13, 15, 17, 18, 20, 22, 24, 25, 26, 27, 29, 30, 32, 34, 35, 37, 38, 39, 41, 43, 45, 47, 49, 51, 53, 55, 56, 57, 59, 60, 62, 63, 64, 65, 67, 69, 70, 71, 73, 74, 75, 77, 79, 80, 81, 82, 83, 84, 85, 86, 88, 90, 91, 92, 93, 94, 95, 96, 97, 98, 99, 100, 101, 102, 103, 104, 105, 106, 107, 108, 109, 110, 111, 112, 113, 115, 117, 119, 120, 121, 122, 123, 124, 126, 128, 129, 131, 133, 135, 137, 139, 140, 141, 142, 144, 146, 147, 148, 149, 150, 152, 154, 155, 157, 158, 160, 162, 163, 165, 167, 169, 171, 173, 175, 176, 178, 180, 182, 183, 185, 187, 189, 191, 193, 194, 195, 196, 197, 198, 199, 200, 201, 203, 205, 207, 208, 209, 211, 213, 214, 215, 217, 218, 219, 220, 222, 223, 224, 226, 228, 229, 231, 232, 233, 234, 235, 236, 237, 238, 239, 240, 242, 244, 245, 246, 247, 248, 249, 250, 251, 252, 254, 255, 256, 257, 258, 259, 260, 261, 262, 263, 264, 265, 266, 267, 268, 269, 270, 271, 272, 273, 274, 275, 276, 277, 278, 279, 281, 282, 284, 286, 287, 288, 289, 291, 293, 294, 295, 297, 299, 300, 302, 304, 306, 307, 308, 310, 311, 313, 315, 316, 317, 318, 319, 320, 322, 324, 326, 328, 330, 331, 333, 335, 337, 338, 340, 342, 343, 345, 346, 347, 349, 350, 351, 353, 354, 355, 357, 358, 360, 362, 363, 364, 365, 367, 369, 370, 371, 372, 373, 374, 375, 377, 378, 379, 380, 382, 383, 384, 385, 386, 387, 389, 390, 391, 393, 395, 396, 398, 400, 401, 403, 404, 406, 408, 409, 410, 411, 412, 414, 415, 417, 419, 420, 421, 422, 423, 424, 425, 426, 427, 428, 429, 430, 431, 432, 433, 434, 435, 436, 437, 438, 439, 440, 441, 442, 443, 444, 445, 446, 447, 448, 449, 450, 451, 452, 453, 454, 456, 457, 459, 461, 462, 464, 466, 467, 468, 469, 470, 472, 474, 475, 477, 479, 480, 482, 483, 484, 485, 487, 488, 489, 490, 491, 492, 493, 494, 495, 497, 499, 501, 502, 503, 504, 506, 507, 509, 510, 511, 512, 514, 515, 516, 517, 518, 520, 522, 524, 526, 528, 530, 531, 532, 533, 534, 535, 536, 537, 538, 539, 540, 542, 543, 545, 546, 547, 548, 550, 551, 553, 554, 555, 557, 559, 560, 562, 563, 565, 566, 568, 570, 572, 573, 575, 576, 577, 579, 580, 581, 582, 583, 584, 585, 586, 587, 589, 590, 591, 592, 593, 595, 596, 597, 598, 599, 601, 602, 604, 605, 607, 609, 610, 611, 612, 613, 614, 615, 616, 617, 618, 619, 620, 621, 622, 623, 624, 625, 626, 627, 629, 631, 633, 634, 635, 36, 637, 638, 640, 642, 644, 646, 648, 650, 651, 653, 654, 655, 656, 657, 658, 659, 660, 662, 663, 664, 665, 666, 667, 669, 671, 672, 674, 676, 677, 679, 680, 682, 684, 685, 687, 689, 690, 691, 693, 694, 696, 697, 698, 00, 702, 704, 705, 706, 707, 709, 710, 712, 714, 715, 717, 718, 719, 720, 721, 722, 723, 725, 726, 727, 728, 730, 731, 732, 733, 734, 735, 737, 739, 741, 743, 744, 745, 746, 747, 749, 751, 752, 753, 755, 757, 759, 760, 762, 764, 766, 768, 770, 772, 773, 775, 776, 778, 780, 782, 784, 786, 788, 789, 791, 793, 794, 795, 796, 798, 800, 801, 802, 804, 805, 807, 809, 811, 813, 815, 817, 819, 820, 822, 823, 824, 825, 827, 828, 830, 832, 834, 836, 838, 840, 842, 843, 844, 846, 848, 849, 850, 851, 853, 855, 856, 857, 858, 860, 861, 863, 864, 866, 868, 870, 871, 873, 874, 876, 878, 880, 882, 883, 885, 887, 889, 890, 892, 893, 895, 896, 897, 899, 901, 902, 903, 905, 907, 908, 909, 910, 912, 914, 915, 916, 917, 919, 921, 923, 925, 926, 928, 930, 932, 934, 935, 936, 937, 939, 941, 943, 945, 947, 949, 950, 952, 953, 955, 957, 959, 960, 962, 964, 965, 967, 968, 970, 972, 974, 976, 978, 980, 981, 983, 985, 86, 87, 989, 991, 993, 995, 997, 998, 1000, 1002, 1003, 1005, 1007, 1008, 1009, 1011, 1013, 1014, 1016, 1018, 1020, 1022, 1023, 1024, 1025, 1026, 1027, 1029, 1031, 1033, 1034, 1036, 1038, 1039, 1041, 1042, 1043, 1044, 1045, 1046, 1048, 1049, 1050, 1051, 1052, 1054, 1056, 1058, 1060, 1061, 1062, 1064, 1066, 1067, 1069, 1070, 1071, 1072, 1074, 1076, 1077, 1078, 1079, 1081, 1083, 1085, 1087, 1088, 1090, 1092, 1093, 1095, 1096, 1097, 1099, 1101, 1102, 1104, 1105, 1107, 1108, 1110, 1111, 1112, 1113, 1114, 1115, 1117, 1119, 1120, 1121, 1122, 1124, 1126, 1128, 1130, 1132, 1133, 1135, 1137, 1139, 1141, 1142, 1144, 1146, 1148, 1150, 1152, 1154, 1156, 1157, 1158, 1160, 1162, 1164, 1166, 1168, 1169, 1171, 1173, 1175, 1176, 1177, 1179, 1180, 1181, 1183, 1185, 1187, 1188, 1190, 1192, 1193, 1194, 1196, 1198, 1200, 1201, 1203, 1205, 1207, 1209, 1210, 1212, 1214, 1216, 1218, 1219, 1221, 1222, 1224, 1226, 1228, 1230, 1232, 1234, 1235, 1236, 1238, 1240, 1241, 1243, 1245, 1247, 1249, 1251, 1252, 1253, 1255, 1257, 1259, 1261, 1263, 1265, 1266, 1268, 1270, 1272, 1274, 1276, 1278, 1279, 1281, 1283, 1285, 1287, 1289, 1291, 1293, 1294, 1296, 1297, 1299, 1300, 1302, 1304, 1306, 1308, 1309, 1310, 1312, 1313, 1314, 1316, 1318, 1320, 1322, 1324, 1325, 1326, 1328, 1329, 1330, 1332, 1333, 1334, 1336, 1338, 1339, 1340, 1341, 1342, 1343, 1344, 1345, 1347, 1349, 1350, 1352, 1353, 1355, 1357, 1358, 1359, 1360, 1361, 1363, 1364, 1366, 1367, 1369, 1370, 1371, 1372, 1373, 1375, 1376, 1377, 1379, 1380, 1381, 1382, 1384, 1386, 1388, 1389, 1391, 1393, 1395, 1397, 1399, 1401, 1402, 1403, 1405, 1407, 1409, 1410, 1412, 1414, 1416, 1418, 1420, 1421, 1422, 1424, 1426, 1428, 1429, 1431, 1433, 1435, 1437, 1439, 1440, 1441, 1443, 1445, 1446, 1448, 1450, 1452, 1454, 1456, 1457, 1459, 1461, 1463, 1465, 1467, 1469, 1471, 1473, 1475, 1477, 1479, 1481, 1482, 1483, 1485, 1486, 1488, 1489, 1490, 1492, 1493, 1495, 1497, 1498, 1500, 1502, 1503, 1505, 1506, 1507, 1508, 1509, 1511, 1512, 1514, 1515, 1516, 1518, 1520, 1522, 1523, 1524, 1525, 1526, 1528, 1529, 1531, 1533, 1534, 1535, 1537, 1538, 1540, 1542, 1544, 1546, 1547, 1549, 1550, 1552, 1554, 1555, 1557, 1558, 1560, 1562, 1563, 1564, 1565, 1568, 1569, 1571, 1572, 1574, 1575, 1577, 1578, 1580, 1581, 1583, 1584, 1586, 1588, 1589, 1591, 1593, 1594, 1595, 1596, 1598, 1599, 1600, 1602, 1603, 1604, 1605, 1607, 1609, 1611, 1612, 1613, 1615, 1616, 1618, 1619, 1621, 1622, 1624, 1626, 1628, 1629, 1630, 1632, 1634, 1636, 1637, 1639, 1640, 1642, 1644, 1646, 1647, 1648, 1649, 1650, 1652, 1654, 1656, 1657, 1658, 1660, 1661, 1662, 1664, 1666, 1668, 1669, 1670, 1671, 1672, 1674, 1676, 1677, 1679, 1680, 1681, 1682, 1683, 1684, 1686, 1688, 1689, 1691, 1693, 1695, 1697, 1699, 1700, 1701, 1702, 1704, 1705, 1706, 1707, 1708, 1710, 1711, 1712, 1713, 1714, 1715, 1717, 1719, 1721, 1723, 1724, 1725, 1727, 1729, 1731, 1732, 1734, 1735, 1737, 1739, 1741, 1743, 1745, 1746, 1747, 1749, 1751, 1753, 1755, 1757, 1758, 1759, 1761, 1762, 1764, 1765, 1766, 1767, 1769, 1770, 1772, 1773, 1774, 1776, 1777, 1779, 1781, 1783, 1784, 1786, 1788, 1790, 1792, 1794, 1795, 1797, 798, 1799, 1801, 1803, 1804, 1805, 1806, 1807, 1808, 1809, 1810, 1811, 1812, 1813, 1815, 1816, 1817, 1819, 1821, 1822, 1823, 1825, 1826, 1827, 1828, 1829, 1831, 1833, 1834, 1835, 1837, 1839, 1841, 1842, 1844, 1845, 1847, 1849, 1850, 1852, 1853, 1854, 1855, 1856, 1857, 1858, 1859, 1861, 1863, 1865, 1866, 1867, 1869, 1871, 1872, 1874, 1876, 1877, 1879, 1881, 1882, 1883, 1885, 1887, 1889, 1891, 1893, 1894, 1895, 1897, 1898, 1900, 1902, 1903, 1904, 1906, 1908, 1910, 1912, 1913, 1915, 1917, 1918, 1919, 1920, 1922, 1924, 1926, 1928, 1929, 1931, 1933, 1935, 1936, 1938, 1940, 1942, 1944, 1946, 1948, 1949, 1951, 1953, 1955, 1957, 1959, 1961, 1963, 1965, 1967, 1969, 1971, 1972, 1973, 1974, 1975, 1976, 1978, 1979, 1980, 1982, 1983, 1985, 1986, 1987, 1989, 1990, 1992, 1994, 1996, 1997, 1999, 2000, 2002, 2003, 2005, 2007, 2008, 2009, 2010, 2011, 2013, 2015, 2016, 2017, 2018, 2019, 2021, 2022, 2023, 2024, 2026, 2028, 2030, 2031, 2032, 2034, 2036, 2037, 2038, 2040, 2041, 2042, 2043, 2044, 2046, 2047, 2048, 2049, 2051, 2053, 2055, 2056, 2058, 2060, 2062, 2064, 2066, 2067, 2069, 2070, 2072, 2073, 2074, 2075, 2076, 2077, 2078, 2079, 2081, 2083, 2085, 2087, 2088, 2090, 2091, 2092, 2093, 2095, 2097, 2098, 2100, 2102, 2104, 2105, 2106, 2108, 2110, 2112, 2113, 2115, 2117, 2118, 2119, 2120, 2121, 2122, 2124, 2126, 2128, 2129, 2130, 2132, 2133, 2135, 2136, 2137, 2138, 2140, 2141, 2142, 2143, 2144, 2146, 2148, 2149, 2150, 2151, 2152, 2153, 2154, 2156, 2158, 2159, 2160, 2161, 2162, 2163, 2165, 2167, 2169, 2170, 2171, 2172, 2173, 2174, 2175, 2176, 2177, 2178, 2179, 2181, 2183, 2184, 2186, 2187, 2188, 2190, 2192, 2194, 2195, 2196, 2197, 2198, 2199, 2200, 2201, 2202, 2203, 2205, 2207, 2209, 2211, 2213, 2215, 2217, 2219, 2221, 2223, 2225, 2226, 2228, 2229, 2231, 2233, 2235, 2236, 2237, 2238, 2239, 2240, 2241, 2243, 2244, 2246, 2248, 2250, 2251, 2253, 2255, 2257, 2259, 2261, 2262, 2264, 2265, 2267, 2269, 2270, 2272, 2273, 2275, 2276, 2278, 2279, 2281, 2282, 2284, 2285, 2286, 2288, 2289, 2291, 2293, 2295, 2296, 2297, 2298, 2299, 2300, 2302, 2304, 2306, 2307, 2309, 2310, 2312, 2313, 2314, 2315, 2316, 2317, 2318, 2320, 2321, 2323, 2325, 2327, 2329, 2330, 2332, 2334, 2335, 2337, 2339, 2341, 2343, 2345, 2346, 2347, 2348, 2350, 2352, 2354, 2356, 2357, 2358, 2360, 2361, 2362, 2364, 2366, 2367, 2369, 2371, 2373, 2375, 2376, 2378, 2380, 2381, 2383, 2384, 2386, 2388, 2390, 2391, 2392, 2394, 2396, 2397, 2399, 2401, 2402, 2403, 2405, 2407, 2408, 2409, 2411, 2413, 2415, 2417, 2418, 2419, 2421, 2422, 2423, 2424, 2425, 2427, 2428, 2429, 2430, 2432, 2434, 2435, 2437, 2439, 2440, 2441, 2442, 2443, 2445, 2446, 2448, 2449, 2451, 2452, 2454, 2456, 2457, 2458, 2459, 2460, 2461, 2462, 2463, 2464, 2466, 2468, 2469, 2470, 2471, 2472, 2474, 2475, 2476, 2477, 2478, 2480, 2482, 2483, 2484, 2485, 2486, 2487, 2488, 2489, 2490, 2491, 2493, 2494, 2495, 2496, 2497, 2498, 2499, 2500, 2502, 2503, 2505, 2506, 2507, 2509, 2510, 2511, 2512, 2513, 2514, 2516, 2517, 2518, 2519, 2521, 2522, 2523, 2525, 2527, 2529, 2530, 2531, 2533, 2535, 2537, 2539, 2540, 2541, 2542, 2544, 2546, 2547, 2548, 2550, 2551, 2552, 2554, 2556, 2557, 2558, 2559, 2561, 2562, 2564, 2565, 2567, 2569, 2571, 2572, 2573, 2574, 2575, 2576, 2578, 2580, 2581, 2583, 2584, 2585, 2587, 2588, 2589, 2590, 2592, 2593, 2594, 2595, 2597, 2599, 2601, 2603, 2604, 2606, 2608, 2609, 2611, 2612, 2614, 2615, 2616, 2617, 2619, 2621, 2623, 2624, 2626, 2627, 2628, 2629, 2631, 2632, 2634, 2636, 2638, 2640, 2641, 2642, 2644, 2646, 2647, 2648, 2649, 2650, 2652, 2654, 2656, 2658, 2659, 2661, 2663, 2665, 2667, 2668, 2670, 2672, 2674, 2675, 2677, 2679, 2681, 2683, 2685, 2687, 2689, 2691, 2693, 2695, 2697, 2699, 2701, 2703, 2704, 2706, 2708, 2710, 2711, 2712, 2714, 2716, 2717, 2719, 2721, 2722, 2724, 2726, 2728, 2730, 2732, 2734, 2735, 2736, 2738, 2739, 2740, 2741, 2743, 2745, 2746, 2748, 2750, 2751, 2753, 2754, 2756, 2758, 2760, 2762, 2764, 2766, 2768, 2770, 2771, 2772, 2773, 2775, 2777, 2778, 2780, 2781, 2782, 2784, 2786, 2788, 2790, 2791, 2792, 2794, 2796, 2797, 2799, 2801, 2802, 2803, 2804, 2806, 2807, 2809, 2810, 2811, 2813, 2815, 2816, 2818, 2819, 2821, 2822, 2823, 2825, 2826, 2828, 2830, 2832, 2833, 2835, 2836, 2838, 2840, 2842, 2844, 2845, 2846, 2847, 2849, 2850, 2851, 2852, 2853, 2855, 2856, 2857, 2858, 2859, 2861, 2862, 2863, 2864, 2866, 2867, 2868, 2869, 2870, 2872, 2873, 2875, 2876, 2877, 2878, 2880, 2882, 2883, 2885, 2886, 2888, 2890, 2891, 2892, 2893, 2894, 2896, 2898, 2900, 2902, 2903, 2904, 2906, 2907, 2908, 2909, 2910, 2911, 2915, 2917, 2918, 2919, 2920, 2921, 2922, 2923, 2924, or 2926. A plant produced from the plant cell has a difference in the level of biomass as compared to the corresponding level of biomass of a control plant that does not comprise the exogenous nucleic acid. In another aspect, the exogenous nucleic acid comprises a regulatory region operably linked to a nucleotide sequence having 80 percent or greater sequence identity to a nucleotide sequence selected from the group consisting of SEQ ID NO:1, 3, 7, 9, 11, 14, 16, 19, 21, 23, 28, 31, 33, 36, 40, 42, 44, 46, 48, 50, 52, 54, 58, 61, 66, 68, 72, 76, 78, 87, 89, 114, 116, 118, 125, 127, 130, 132, 134, 136, 138, 143, 145, 151, 153, 156, 159, 161, 164, 166, 168, 170, 172, 174, 177, 179, 181, 184, 186, 188, 190, 192, 202, 204, 206, 210, 212, 216, 221, 225, 227, 230, 241, 243, 253, 280, 283, 285, 290, 292, 296, 298, 301, 303, 305, 309, 312, 314, 321, 323, 325, 327, 329, 332, 334, 336, 339, 341, 344, 348, 352, 356, 359, 361, 366, 368, 376, 381, 388, 392, 394, 397, 399, 402, 405, 407, 413, 416, 418, 455, 458, 460, 463, 465, 471, 473, 476, 478, 481, 486, 496, 498, 500, 505, 508, 513, 519, 521, 523, 525, 527, 529, 541, 544, 549, 552, 556, 558, 561, 564, 567, 569, 571, 574, 578, 588, 594, 600, 603, 606, 608, 628, 630, 632, 639, 641, 643, 645, 647, 649, 652, 661, 668, 670, 673, 675, 678, 681, 683, 686, 688, 692, 695, 699, 701, 703, 708, 711, 713, 716, 724, 729, 736, 738, 740, 742, 748, 750, 754, 756, 758, 761, 763, 765, 767, 769, 771, 774, 777, 779, 781, 783, 785, 787, 790, 792, 797, 799, 803, 806, 808, 810, 812, 814, 816, 818, 821, 826, 829, 831, 833, 835, 837, 839, 841, 845, 847, 852, 854, 859, 862, 865, 867, 869, 872, 875, 877, 879, 881, 884, 886, 888, 891, 894, 898, 900, 904, 906, 911, 913, 918, 920, 922, 924, 927, 929, 931, 933, 938, 940, 942, 944, 946, 948, 951, 954, 956, 958, 961, 963, 966, 969, 971, 973, 975, 977, 979, 982, 984, 988, 990, 992, 994, 996, 999, 1001, 1004, 1006, 1010, 1012, 1015, 1017, 1019, 1021, 1028, 1030, 1032, 1035, 1037, 1040, 1047, 1053, 1055, 1057, 1059, 1063, 1065, 1068, 1073, 1075, 1080, 1082, 1084, 1086, 1089, 1091, 1094, 1098, 1100, 1103, 1106, 1109, 1116, 1118, 1123, 1125, 1127, 1129, 1131, 1134, 1136, 1138, 1140, 1143, 1145, 1147, 1149, 1151, 1153, 1155, 1159, 1161, 1163, 1165, 1167, 1170, 1172, 1174, 1178, 1182, 1184, 1186, 1189, 1191, 1195, 1197, 1199, 1202, 1204, 1206, 1208, 1211, 1213, 1215, 1217, 1220, 1223, 1225, 1227, 1229, 1231, 1233, 1237, 1239, 1242, 1244, 1246, 1248, 1250, 1254, 1256, 1258, 1260, 1262, 1264, 1267, 1269, 1271, 1273, 1275, 1277, 1280, 1282, 1284, 1286, 1288, 1290, 1292, 1295, 1298, 1301, 1303, 1305, 1307, 1311, 1315, 1317, 1319, 1321, 1323, 1327, 1331, 1335, 1337, 1346, 1348, 1351, 1354, 1356, 1362, 1365, 1368, 1374, 1378, 1383, 1385, 1387, 1390, 1392, 1394, 1396, 1398, 1400, 1404, 1406, 1408, 1411, 1413, 1415, 1417, 1419, 1423, 1425, 1427, 1430, 1432, 1434, 1436, 1438, 1442, 1444, 1447, 1449, 1451, 1453, 1455, 1458, 1460, 1462, 1464, 1466, 1468, 1470, 1472, 1474, 1476, 1478, 1480, 1484, 1487, 1491, 1494, 1496, 1499, 1501, 1504, 1510, 1513, 1517, 1519, 1521, 1527, 1530, 1532, 1536, 1539, 1541, 1543, 1545, 1548, 1551, 1553, 1556, 1559, 1561, 1566, 1568, 1570, 1573, 1576, 1579, 1582, 1585, 1587, 1590, 1592, 1597, 1601, 1606, 1608, 1610, 1614, 1617, 1620, 1623, 1625, 1627, 1631, 1633, 1635, 1638, 1641, 1643, 1645, 1651, 1653, 1655, 1659, 1663, 1665, 1667, 1673, 1675, 1678, 1685, 1687, 1690, 1692, 1694, 1696, 1698, 1703, 1709, 1716, 1718, 1720, 1722, 1726, 1728, 1730, 1733, 1736, 1738, 1740, 1742, 1744, 1748, 1750, 1752, 1754, 1756, 1760, 1763, 1768, 1771, 1775, 1778, 1780, 1782, 1785, 1787, 1789, 1791, 1793, 1796, 1800, 1802, 1814, 1818, 1820, 1824, 1830, 1832, 1836, 1838, 1840, 1843, 1846, 1848, 1851, 1860, 1862, 1864, 1868, 1870, 1873, 1875, 1878, 1880, 1884, 1886, 1888, 1890, 1892, 1896, 1899, 1901, 1905, 1907, 1909, 1911, 1914, 1916, 1921, 1923, 1925, 1927, 1930, 1932, 1934, 1937, 1939, 1941, 1943, 1945, 1947, 1950, 1952, 1954, 1956, 1958, 1960, 1962, 1964, 1966, 1968, 1970, 1977, 1981, 1984, 1988, 1991, 1993, 1995, 1998, 2001, 2004, 2006, 2012, 2014, 2020, 2025, 2027, 2029, 2033, 2035, 2039, 2045, 2050, 2052, 2054, 2057, 2059, 2061, 2063, 2065, 2068, 2071, 2080, 2082, 2084, 2086, 2089, 2094, 2096, 2099, 2101, 2103, 2107, 2109, 2111, 2114, 2116, 2123, 2125, 2127, 2131, 2134, 2139, 2145, 2147, 2155, 2157, 2164, 2166, 2168, 2180, 2182, 2185, 2189, 2191, 2193, 2204, 2206, 2208, 2210, 2212, 2214, 2216, 2218, 2220, 2222, 2224, 2227, 2230, 2232, 2234, 2242, 2245, 2247, 2249, 2252, 2254, 2256, 2258, 2260, 2263, 2266, 2268, 2271, 2274, 2277, 2280, 2283, 2287, 2290, 2292, 2294, 2301, 2303, 2305, 2308, 2311, 2319, 2322, 2324, 2326, 2328, 2331, 2333, 2336, 2338, 2340, 2342, 2344, 2349, 2351, 2353, 2355, 2359, 2363, 2365, 2368, 2370, 2372, 2374, 2377, 2379, 2382, 2385, 2387, 2389, 2393, 2395, 2398, 2400, 2404, 2406, 2410, 2412, 2414, 2416, 2420, 2426, 2431, 2433, 2436, 2438, 2444, 2447, 2450, 2453, 2455, 2465, 2467, 2473, 2479, 2481, 2492, 2501, 2504, 2508, 2515, 2520, 2524, 2526, 2528, 2532, 2534, 2536, 2538, 2543, 2545, 2549, 2553, 2555, 2560, 2563, 2566, 2568, 2570, 2577, 2579, 2582, 2586, 2591, 2596, 2598, 2600, 2602, 2605, 2607, 2610, 2613, 2618, 2620, 2622, 2625, 2630, 2633, 2635, 2637, 2639, 2643, 2645, 2651, 2653, 2655, 2657, 2660, 2662, 2664, 2666, 2669, 2671, 2673, 2676, 2678, 2680, 2682, 2684, 2686, 2688, 2690, 2692, 2694, 2696, 2698, 2700, 2702, 2705, 2707, 2709, 2713, 2715, 2718, 2720, 2723, 2725, 2727, 2729, 2731, 2733, 2737, 2742, 2744, 2747, 2749, 2752, 2755, 2757, 2759, 2761, 2763, 2765, 2767, 2769, 2774, 2776, 2779, 2783, 2785, 2787, 2789, 2793, 2795, 2798, 2800, 2805, 2808, 2812, 2814, 2817, 2820, 2824, 2827, 2829, 2831, 2834, 2837, 2839, 2841, 2843, 2848, 2854, 2860, 2865, 2871, 2874, 2879, 2881, 2884, 2887, 2889, 2895, 2897, 2899, 2901, 2905, 2912, 2914, 2916, or 2925, or a fragment thereof. A plant produced from the plant cell has a difference in the level of biomass as compared to the corresponding level of biomass of a control plant that does not comprise the exogenous nucleic acid. A transgenic plant comprising such a plant cell is also provided. Also provided is a plant biomass or seed product. The product comprises vegetative or embryonic tissue from a transgenic plant described herein.

[0062] Isolated nucleic acids are also provided. In one aspect, an isolated nucleic acid comprises a nucleotide sequence having 80% or greater sequence identity to the nucleotide sequence set forth in SEQ ID NO:1, 3, 7, 9, 11, 14, 16, 19, 21, 23, 28, 31, 33, 36, 40, 42, 44, 46, 48, 50, 52, 54, 58, 61, 66, 68, 72, 76, 78, 87, 89, 114, 116, 118, 125, 127, 130, 132, 134, 136, 138, 143, 145, 151, 153, 156, 159, 161, 164, 166, 168, 170, 172, 174, 177, 179, 181, 184, 186, 188, 190, 192, 202, 204, 206, 210, 212, 216, 221, 225, 227, 230, 241, 243, 253, 280, 283, 285, 290, 292, 296, 298, 301, 303, 305, 309, 312, 314, 321, 323, 325, 327, 329, 332, 334, 336, 339, 341, 344, 348, 352, 356, 359, 361, 366, 368, 376, 381, 388, 392, 394, 397, 399, 402, 405, 407, 413, 416, 418, 455, 458, 460, 463, 465, 471, 473, 476, 478, 481, 486, 496, 498, 500, 505, 508, 513, 519, 521, 523, 525, 527, 529, 541, 544, 549, 552, 556, 558, 561, 564, 567, 569, 571, 574, 578, 588, 594, 600, 603, 606, 608, 628, 630, 632, 639, 641, 643, 645, 647, 649, 652, 661, 668, 670, 673, 675, 678, 681, 683, 686, 688, 692, 695, 699, 701, 703, 708, 711, 713, 716, 724, 729, 736, 738, 740, 742, 748, 750, 754, 756, 758, 761, 763, 765, 767, 769, 771, 774, 777, 779, 781, 783, 785, 787, 790, 792, 797, 799, 803, 806, 808, 810, 812, 814, 816, 818, 821, 826, 829, 831, 833, 835, 837, 839, 841, 845, 847, 852, 854, 859, 862, 865, 867, 869, 872, 875, 877, 879, 881, 884, 886, 888, 891, 894, 898, 900, 904, 906, 911, 913, 918, 920, 922, 924, 927, 929, 931, 933, 938, 940, 942, 944, 946, 948, 951, 954, 956, 958, 961, 963, 966, 969, 971, 973, 975, 977, 979, 982, 984, 988, 990, 992, 994, 996, 999, 1001, 1004, 1006, 1010, 1012, 1015, 1017, 1019, 1021, 1028, 1030, 1032, 1035, 1037, 1040, 1047, 1053, 1055, 1057, 1059, 1063, 1065, 1068, 1073, 1075, 1080, 1082, 1084, 1086, 1089, 1091, 1094, 1098, 1100, 1103, 1106, 1109, 1116, 1118, 1123, 1125, 1127, 1129, 1131, 1134, 1136, 1138, 1140, 1143, 1145, 1147, 1149, 1151, 1153, 1155, 1159, 1161, 1163, 1165, 1167, 1170, 1172, 1174, 1178, 1182, 1184, 1186, 1189, 1191, 1195, 1197, 1199, 1202, 1204, 1206, 1208, 1211, 1213, 1215, 1217, 1220, 1223, 1225, 1227, 1229, 1231, 1233, 1237, 1239, 1242, 1244, 1246, 1248, 1250, 1254, 1256, 1258, 1260, 1262, 1264, 1267, 1269, 1271, 1273, 1275, 1277, 1280, 1282, 1284, 1286, 1288, 1290, 1292, 1295, 1298, 1301, 1303, 1305, 1307, 1311, 1315, 1317, 1319, 1321, 1323, 1327, 1331, 1335, 1337, 1346, 1348, 1351, 1354, 1356, 1362, 1365, 1368, 1374, 1378, 1383, 1385, 1387, 1390, 1392, 1394, 1396, 1398, 1400, 1404, 1406, 1408, 1411, 1413, 1415, 1417, 1419, 1423, 1425, 1427, 1430, 1432, 1434, 1436, 1438, 1442, 1444, 1447, 1449, 1451, 1453, 1455, 1458, 1460, 1462, 1464, 1466, 1468, 1470, 1472, 1474, 1476, 1478, 1480, 1484, 1487, 1491, 1494, 1496, 1499, 1501, 1504, 1510, 1513, 1517, 1519, 1521, 1527, 1530, 1532, 1536, 1539, 1541, 1543, 1545, 1548, 1551, 1553, 1556, 1559, 1561, 1566, 1568, 1570, 1573, 1576, 1579, 1582, 1585, 1587, 1590, 1592, 1597, 1601, 1606, 1608, 1610, 1614, 1617, 1620, 1623, 1625, 1627, 1631, 1633, 1635, 1638, 1641, 1643, 1645, 1651, 1653, 1655, 1659, 1663, 1665, 1667, 1673, 1675, 1678, 1685, 1687, 1690, 1692, 1694, 1696, 1698, 1703, 1709, 1716, 1718, 1720, 1722, 1726, 1728, 1730, 1733, 1736, 1738, 1740, 1742, 1744, 1748, 1750, 1752, 1754, 1756, 1760, 1763, 1768, 1771, 1775, 1778, 1780, 1782, 1785, 1787, 1789, 1791, 1793, 1796, 1800, 1802, 1814, 1818, 1820, 1824, 1830, 1832, 1836, 1838, 1840, 1843, 1846, 1848, 1851, 1860, 1862, 1864, 1868, 1870, 1873, 1875, 1878, 1880, 1884, 1886, 1888, 1890, 1892, 1896, 1899, 1901, 1905, 1907, 1909, 1911, 1914, 1916, 1921, 1923, 1925, 1927, 1930, 1932, 1934, 1937, 1939, 1941, 1943, 1945, 1947, 1950, 1952, 1954, 1956, 1958, 1960, 1962, 1964, 1966, 1968, 1970, 1977, 1981, 1984, 1988, 1991, 1993, 1995, 1998, 2001, 2004, 2006, 2012, 2014, 2020, 2025, 2027, 2029, 2033, 2035, 2039, 2045, 2050, 2052, 2054, 2057, 2059, 2061, 2063, 2065, 2068, 2071, 2080, 2082, 2084, 2086, 2089, 2094, 2096, 2099, 2101, 2103, 2107, 2109, 2111, 2114, 2116, 2123, 2125, 2127, 2131, 2134, 2139, 2145, 2147, 2155, 2157, 2164, 2166, 2168, 2180, 2182, 2185, 2189, 2191, 2193, 2204, 2206, 2208, 2210, 2212, 2214, 2216, 2218, 2220, 2222, 2224, 2227, 2230, 2232, 2234, 2242, 2245, 2247, 2249, 2252, 2254, 2256, 2258, 2260, 2263, 2266, 2268, 2271, 2274, 2277, 2280, 2283, 2287, 2290, 2292, 2294, 2301, 2303, 2305, 2308, 2311, 2319, 2322, 2324, 2326, 2328, 2331, 2333, 2336, 2338, 2340, 2342, 2344, 2349, 2351, 2353, 2355, 2359, 2363, 2365, 2368, 2370, 2372, 2374, 2377, 2379, 2382, 2385, 2387, 2389, 2393, 2395, 2398, 2400, 2404, 2406, 2410, 2412, 2414, 2416, 2420, 2426, 2431, 2433, 2436, 2438, 2444, 2447, 2450, 2453, 2455, 2465, 2467, 2473, 2479, 2481, 2492, 2501, 2504, 2508, 2515, 2520, 2524, 2526, 2528, 2532, 2534, 2536, 2538, 2543, 2545, 2549, 2553, 2555, 2560, 2563, 2566, 2568, 2570, 2577, 2579, 2582, 2586, 2591, 2596, 2598, 2600, 2602, 2605, 2607, 2610, 2613, 2618, 2620, 2622, 2625, 2630, 2633, 2635, 2637, 2639, 2643, 2645, 2651, 2653, 2655, 2657, 2660, 2662, 2664, 2666, 2669, 2671, 2673, 2676, 2678, 2680, 2682, 2684, 2686, 2688, 2690, 2692, 2694, 2696, 2698, 2700, 2702, 2705, 2707, 2709, 2713, 2715, 2718, 2720, 2723, 2725, 2727, 2729, 2731, 2733, 2737, 2742, 2744, 2747, 2749, 2752, 2755, 2757, 2759, 2761, 2763, 2765, 2767, 2769, 2774, 2776, 2779, 2783, 2785, 2787, 2789, 2793, 2795, 2798, 2800, 2805, 2808, 2812, 2814, 2817, 2820, 2824, 2827, 2829, 2831, 2834, 2837, 2839, 2841, 2843, 2848, 2854, 2860, 2865, 2871, 2874, 2879, 2881, 2884, 2887, 2889, 2895, 2897, 2899, 2901, 2905, 2912, 2914, 2916, or 2925. In another aspect, an isolated nucleic acid comprises a nucleotide sequence encoding a polypeptide having 80% or greater sequence identity to the amino acid sequence set forth in SEQ ID NO:2, 4, 5, 6, 8, 10, 12, 13, 15, 17, 18, 20, 22, 24, 25, 26, 27, 29, 30, 32, 34, 35, 37, 38, 39, 41, 43, 45, 47, 49, 51, 53, 55, 56, 57, 59, 60, 62, 63, 64, 65, 67, 69, 70, 71, 73, 74, 75, 77, 79, 80, 81, 82, 83, 84, 85, 86, 88, 90, 91, 92, 93, 94, 95, 96, 97, 98, 99, 100, 101, 102, 103, 104, 105, 106, 107, 108, 109, 110, 111, 112, 113, 115, 117, 119, 120, 121, 122, 123, 124, 126, 128, 129, 131, 133, 135, 137, 139, 140, 141, 142, 144, 146, 147, 148, 149, 150, 152, 154, 155, 157, 158, 160, 162, 163, 165, 167, 169, 171, 173, 175, 176, 178, 180, 182, 183, 185, 187, 189, 191, 193, 194, 195, 196, 197, 198, 199, 200, 201, 203, 205, 207, 208, 209, 211, 213, 214, 215, 217, 218, 219, 220, 222, 223, 224, 226, 228, 229, 231, 232, 233, 234, 235, 236, 237, 238, 239, 240, 242, 244, 245, 246, 247, 248, 249, 250, 251, 252, 254, 255, 256, 257, 258, 259, 260, 261, 262, 263, 264, 265, 266, 267, 268, 269, 270, 271, 272, 273, 274, 275, 276, 277, 278, 279, 281, 282, 284, 286, 287, 288, 289, 291, 293, 294, 295, 297, 299, 300, 302, 304, 306, 307, 308, 310, 311, 313, 315, 316, 317, 318, 319, 320, 322, 324, 326, 328, 330, 331, 333, 335, 337, 338, 340, 342, 343, 345, 346, 347, 349, 350, 351, 353, 354, 355, 357, 358, 360, 362, 363, 364, 365, 367, 369, 370, 371, 372, 373, 374, 375, 377, 378, 379, 380, 382, 383, 384, 385, 386, 387, 389, 390, 391, 393, 395, 396, 398, 400, 401, 403, 404, 406, 408, 409, 410, 411, 412, 414, 415, 417, 419, 420, 421, 422, 423, 424, 425, 426, 427, 428, 429, 430, 431, 432, 433, 434, 435, 436, 437, 438, 439, 440, 441, 442, 443, 444, 445, 446, 447, 448, 449, 450, 451, 452, 453, 454, 456, 457, 459, 461, 462, 464, 466, 467, 468, 469, 470, 472, 474, 475, 477, 479, 480, 482, 483, 484, 485, 487, 488, 489, 490, 491, 492, 493, 494, 495, 497, 499, 501, 502, 503, 504, 506, 507, 509, 510, 511, 512, 514, 515, 516, 517, 518, 520, 522, 524, 526, 528, 530, 531, 532, 533, 534, 535, 536, 537, 538, 539, 540, 542, 543, 545, 546, 547, 548, 550, 551, 553, 554, 555, 557, 559, 560, 562, 563, 565, 566, 568, 570, 572, 573, 575, 576, 577, 579, 580, 581, 582, 583, 584, 585, 586, 587, 589, 590, 591, 592, 593, 595, 596, 597, 598, 599, 601, 602, 604, 605, 607, 609, 610, 611, 612, 613, 614, 615, 616, 617, 618, 619, 620, 621, 622, 623, 624, 625, 626, 627, 629, 631, 633, 634, 635, 36, 637, 638, 640, 642, 644, 646, 648, 650, 651, 653, 654, 655, 656, 657, 658, 659, 660, 662, 663, 664, 665, 666, 667, 669, 671, 672, 674, 676, 677, 679, 680, 682, 684, 685, 687, 689, 690, 691, 693, 694, 696, 697, 698, 00, 702, 704, 705, 706, 707, 709, 710, 712, 714, 715, 717, 718, 719, 720, 721, 722, 723, 725, 726, 727, 728, 730, 731, 732, 733, 734, 735, 737, 739, 741, 743, 744, 745, 746, 747, 749, 751, 752, 753, 755, 757, 759, 760, 762, 764, 766, 768, 770, 772, 773, 775, 776, 778, 780, 782, 784, 786, 788, 789, 791, 793, 794, 795, 796, 798, 800, 801, 802, 804, 805, 807, 809, 811, 813, 815, 817, 819, 820, 822, 823, 824, 825, 827, 828, 830, 832, 834, 836, 838, 840, 842, 843, 844, 846, 848, 849, 850, 851, 853, 855, 856, 857, 858, 860, 861, 863, 864, 866, 868, 870, 871, 873, 874, 876, 878, 880, 882, 883, 885, 887, 889, 890, 892, 893, 895, 896, 897, 899, 901, 902, 903, 905, 907, 908, 909, 910, 912, 914, 915, 916, 917, 919, 921, 923, 925, 926, 928, 930, 932, 934, 935, 936, 937, 939, 941, 943, 945, 947, 949, 950, 952, 953, 955, 957, 959, 960, 962, 964, 965, 967, 968, 970, 972, 974, 976, 978, 980, 981, 983, 985, 86, 87, 989, 991, 993, 995, 997, 998, 1000, 1002, 1003, 1005, 1007, 1008, 1009, 1011, 1013, 1014, 1016, 1018, 1020, 1022, 1023, 1024, 1025, 1026, 1027, 1029, 1031, 1033, 1034, 1036, 1038, 1039, 1041, 1042, 1043, 1044, 1045, 1046, 1048, 1049, 1050, 1051, 1052, 1054, 1056, 1058, 1060, 1061, 1062, 1064, 1066, 1067, 1069, 1070, 1071, 1072, 1074, 1076, 1077, 1078, 1079, 1081, 1083, 1085, 1087, 1088, 1090, 1092, 1093, 1095, 1096, 1097, 1099, 1101, 1102, 1104, 1105, 1107, 1108, 1110, 1111, 1112, 1113, 1114, 1115, 1117, 1119, 1120, 1121, 1122, 1124, 1126, 1128, 1130, 1132, 1133, 1135, 1137, 1139, 1141, 1142, 1144, 1146, 1148, 1150, 1152, 1154, 1156, 1157, 1158, 1160, 1162, 1164, 1166, 1168, 1169, 1171, 1173, 1175, 1176, 1177, 1179, 1180, 1181, 1183, 1185, 1187, 1188, 1190, 1192, 1193, 1194, 1196, 1198, 1200, 1201, 1203, 1205, 1207, 1209, 1210, 1212, 1214, 1216, 1218, 1219, 1221, 1222, 1224, 1226, 1228, 1230, 1232, 1234, 1235, 1236, 1238, 1240, 1241, 1243, 1245, 1247, 1249, 1251, 1252, 1253, 1255, 1257, 1259, 1261, 1263, 1265, 1266, 1268, 1270, 1272, 1274, 1276, 1278, 1279, 1281, 1283, 1285, 1287, 1289, 1291, 1293, 1294, 1296, 1297, 1299, 1300, 1302, 1304, 1306, 1308, 1309, 1310, 1312, 1313, 1314, 1316, 1318, 1320, 1322, 1324, 1325, 1326, 1328, 1329, 1330, 1332, 1333, 1334, 1336, 1338, 1339, 1340, 1341, 1342, 1343, 1344, 1345, 1347, 1349, 1350, 1352, 1353, 1355, 1357, 1358, 1359, 1360, 1361, 1363, 1364, 1366, 1367, 1369, 1370, 1371, 1372, 1373, 1375, 1376, 1377, 1379, 1380, 1381, 1382, 1384, 1386, 1388, 1389, 1391, 1393, 1395, 1397, 1399, 1401, 1402, 1403, 1405, 1407, 1409, 1410, 1412, 1414, 1416, 1418, 1420, 1421, 1422, 1424, 1426, 1428, 1429, 1431, 1433, 1435, 1437, 1439, 1440, 1441, 1443, 1445, 1446, 1448, 1450, 1452, 1454, 1456, 1457, 1459, 1461, 1463, 1465, 1467, 1469, 1471, 1473, 1475, 1477, 1479, 1481, 1482, 1483, 1485, 1486, 1488, 1489, 1490, 1492, 1493, 1495, 1497, 1498, 1500, 1502, 1503, 1505, 1506, 1507, 1508, 1509, 1511, 1512, 1514, 1515, 1516, 1518, 1520, 1522, 1523, 1524, 1525, 1526, 1528, 1529, 1531, 1533, 1534, 1535, 1537, 1538, 1540, 1542, 1544, 1546, 1547, 1549, 1550, 1552, 1554, 1555, 1557, 1558, 1560, 1562, 1563, 1564, 1565, 1568, 1569, 1571, 1572, 1574, 1575, 1577, 1578, 1580, 1581, 1583, 1584, 1586, 1588, 1589, 1591, 1593, 1594, 1595, 1596, 1598, 1599, 1600, 1602, 1603, 1604, 1605, 1607, 1609, 1611, 1612, 1613, 1615, 1616, 1618, 1619, 1621, 1622, 1624, 1626, 1628, 1629, 1630, 1632, 1634, 1636, 1637, 1639, 1640, 1642, 1644, 1646, 1647, 1648, 1649, 1650, 1652, 1654, 1656, 1657, 1658, 1660, 1661, 1662, 1664, 1666, 1668, 1669, 1670, 1671, 1672, 1674, 1676, 1677, 1679, 1680, 1681, 1682, 1683, 1684, 1686, 1688, 1689, 1691, 1693, 1695, 1697, 1699, 1700, 1701, 1702, 1704, 1705, 1706, 1707, 1708, 1710, 1711, 1712, 1713, 1714, 1715, 1717, 1719, 1721, 1723, 1724, 1725, 1727, 1729, 1731, 1732, 1734, 1735, 1737, 1739, 1741, 1743, 1745, 1746, 1747, 1749, 1751, 1753, 1755, 1757, 1758, 1759, 1761, 1762, 1764, 1765, 1766, 1767, 1769, 1770, 1772, 1773, 1774, 1776, 1777, 1779, 1781, 1783, 1784, 1786, 1788, 1790, 1792, 1794, 1795, 1797, 798, 1799, 1801, 1803, 1804, 1805, 1806, 1807, 1808, 1809, 1810, 1811, 1812, 1813, 1815, 1816, 1817, 1819, 1821, 1822, 1823, 1825, 1826, 1827, 1828, 1829, 1831, 1833, 1834, 1835, 1837, 1839, 1841, 1842, 1844, 1845, 1847, 1849, 1850, 1852, 1853, 1854, 1855, 1856, 1857, 1858, 1859, 1861, 1863, 1865, 1866, 1867, 1869, 1871, 1872, 1874, 1876, 1877, 1879, 1881, 1882, 1883, 1885, 1887, 1889, 1891, 1893, 1894, 1895, 1897, 1898, 1900, 1902, 1903, 1904, 1906, 1908, 1910, 1912, 1913, 1915, 1917, 1918, 1919, 1920, 1922, 1924, 1926, 1928, 1929, 1931, 1933, 1935, 1936, 1938, 1940, 1942, 1944, 1946, 1948, 1949, 1951, 1953, 1955, 1957, 1959, 1961, 1963, 1965, 1967, 1969, 1971, 1972, 1973, 1974, 1975, 1976, 1978, 1979, 1980, 1982, 1983, 1985, 1986, 1987, 1989, 1990, 1992, 1994, 1996, 1997, 1999, 2000, 2002, 2003, 2005, 2007, 2008, 2009, 2010, 2011, 2013, 2015, 2016, 2017, 2018, 2019, 2021, 2022, 2023, 2024, 2026, 2028, 2030, 2031, 2032, 2034, 2036, 2037, 2038, 2040, 2041, 2042, 2043, 2044, 2046, 2047, 2048, 2049, 2051, 2053, 2055, 2056, 2058, 2060, 2062, 2064, 2066, 2067, 2069, 2070, 2072, 2073, 2074, 2075, 2076, 2077, 2078, 2079, 2081, 2083, 2085, 2087, 2088, 2090, 2091, 2092, 2093, 2095, 2097, 2098, 2100, 2102, 2104, 2105, 2106, 2108, 2110, 2112, 2113, 2115, 2117, 2118, 2119, 2120, 2121, 2122, 2124, 2126, 2128, 2129, 2130, 2132, 2133, 2135, 2136, 2137, 2138, 2140, 2141, 2142, 2143, 2144, 2146, 2148, 2149, 2150, 2151, 2152, 2153, 2154, 2156, 2158, 2159, 2160, 2161, 2162, 2163, 2165, 2167, 2169, 2170, 2171, 2172, 2173, 2174, 2175, 2176, 2177, 2178, 2179, 2181, 2183, 2184, 2186, 2187, 2188, 2190, 2192, 2194, 2195, 2196, 2197, 2198, 2199, 2200, 2201, 2202, 2203, 2205, 2207, 2209, 2211, 2213, 2215, 2217, 2219, 2221, 2223, 2225, 2226, 2228, 2229, 2231, 2233, 2235, 2236, 2237, 2238, 2239, 2240, 2241, 2243, 2244, 2246, 2248, 2250, 2251, 2253, 2255, 2257, 2259, 2261, 2262, 2264, 2265, 2267, 2269, 2270, 2272, 2273, 2275, 2276, 2278, 2279, 2281, 2282, 2284, 2285, 2286, 2288, 2289, 2291, 2293, 2295, 2296, 2297, 2298, 2299, 2300, 2302, 2304, 2306, 2307, 2309, 2310, 2312, 2313, 2314, 2315, 2316, 2317, 2318, 2320, 2321, 2323, 2325, 2327, 2329, 2330, 2332, 2334, 2335, 2337, 2339, 2341, 2343, 2345, 2346, 2347, 2348, 2350, 2352, 2354, 2356, 2357, 2358, 2360, 2361, 2362, 2364, 2366, 2367, 2369, 2371, 2373, 2375, 2376, 2378, 2380, 2381, 2383, 2384, 2386, 2388, 2390, 2391, 2392, 2394, 2396, 2397, 2399, 2401, 2402, 2403, 2405, 2407, 2408, 2409, 2411, 2413, 2415, 2417, 2418, 2419, 2421, 2422, 2423, 2424, 2425, 2427, 2428, 2429, 2430, 2432, 2434, 2435, 2437, 2439, 2440, 2441, 2442, 2443, 2445, 2446, 2448, 2449, 2451, 2452, 2454, 2456, 2457, 2458, 2459, 2460, 2461, 2462, 2463, 2464, 2466, 2468, 2469, 2470, 2471, 2472, 2474, 2475, 2476, 2477, 2478, 2480, 2482, 2483, 2484, 2485, 2486, 2487, 2488, 2489, 2490, 2491, 2493, 2494, 2495, 2496, 2497, 2498, 2499, 2500, 2502, 2503, 2505, 2506, 2507, 2509, 2510, 2511, 2512, 2513, 2514, 2516, 2517, 2518, 2519, 2521, 2522, 2523, 2525, 2527, 2529, 2530, 2531, 2533, 2535, 2537, 2539, 2540, 2541, 2542, 2544, 2546, 2547, 2548, 2550, 2551, 2552, 2554, 2556, 2557, 2558, 2559, 2561, 2562, 2564, 2565, 2567, 2569, 2571, 2572, 2573, 2574, 2575, 2576, 2578, 2580, 2581, 2583, 2584, 2585, 2587, 2588, 2589, 2590, 2592, 2593, 2594, 2595, 2597, 2599, 2601, 2603, 2604, 2606, 2608, 2609, 2611, 2612, 2614, 2615, 2616, 2617, 2619, 2621, 2623, 2624, 2626, 2627, 2628, 2629, 2631, 2632, 2634, 2636, 2638, 2640, 2641, 2642, 2644, 2646, 2647, 2648, 2649, 2650, 2652, 2654, 2656, 2658, 2659, 2661, 2663, 2665, 2667, 2668, 2670, 2672, 2674, 2675, 2677, 2679, 2681, 2683, 2685, 2687, 2689, 2691, 2693, 2695, 2697, 2699, 2701, 2703, 2704, 2706, 2708, 2710, 2711, 2712, 2714, 2716, 2717, 2719, 2721, 2722, 2724, 2726, 2728, 2730, 2732, 2734, 2735, 2736, 2738, 2739, 2740, 2741, 2743, 2745, 2746, 2748, 2750, 2751, 2753, 2754, 2756, 2758, 2760, 2762, 2764, 2766, 2768, 2770, 2771, 2772, 2773, 2775, 2777, 2778, 2780, 2781, 2782, 2784, 2786, 2788, 2790, 2791, 2792, 2794, 2796, 2797, 2799, 2801, 2802, 2803, 2804, 2806, 2807, 2809, 2810, 2811, 2813, 2815, 2816, 2818, 2819, 2821, 2822, 2823, 2825, 2826, 2828, 2830, 2832, 2833, 2835, 2836, 2838, 2840, 2842, 2844, 2845, 2846, 2847, 2849, 2850, 2851, 2852, 2853, 2855, 2856, 2857, 2858, 2859, 2861, 2862, 2863, 2864, 2866, 2867, 2868, 2869, 2870, 2872, 2873, 2875, 2876, 2877, 2878, 2880, 2882, 2883, 2885, 2886, 2888, 2890, 2891, 2892, 2893, 2894, 2896, 2898, 2900, 2902, 2903, 2904, 2906, 2907, 2908, 2909, 2910, 2911, 2915, 2917, 2918, 2919, 2920, 2921, 2922, 2923, 2924, or 2926.

[0063] In another aspect, methods of identifying a genetic polymorphism associated with variation in the level of biomass are provided. The methods include providing a population of plants, and determining whether one or more genetic polymorphisms in the population are genetically linked to the locus for a polypeptide selected from the group consisting of the polypeptides depicted in FIGS. 1-50 and functional homologs thereof. The correlation between variation in the level of biomass in a tissue in plants of the population and the presence of the one or more genetic polymorphisms in plants of the population is measured, thereby permitting identification of whether or not the one or more genetic polymorphisms are associated with such variation.

[0064] In another aspect, methods of making a plant line are provided. The methods include determining whether one or more genetic polymorphisms in a population of plants is associated with the locus for one or more of the polypeptides depicted in FIGS. 1-50 and functional homologs of such polypeptides. One or more plants in the population is identified in which the presence of at least one of the genetic polymorphism(s) is associated with variation in a biomass trait. The above-described steps can be performed in either order. One or more of the identified plants is then crossed with itself or a different plant to produce seed, and at least one progeny plant grown from such seed is crossed with itself or a different plant. The steps of selfing and outcrossing are repeated for an additional 0-5 generations to make a plant line in which the at least one polymorphism is present. The biomass trait can be yield of dry matter, and the plant population can be switchgrass plants.

[0065] This document also features a method of altering the level of biomass in a plant, where the method includes modifying an endogenous biomass-modulating nucleic acid. The nucleic acid comprises a nucleotide sequence with an open reading frame having 80 percent or greater sequence identity (e.g., 90% or greater, or 95% or greater) to the nucleotide sequence selected from the group consisting of SEQ ID NO: 1, 3, 7, 9, 11, 14, 16, 19, 21, 23, 28, 31, 33, 36, 40, 42, 44, 46, 48, 50, 52, 54, 58, 61, 66, 68, 72, 76, 78, 87, 89, 114, 116, 118, 125, 127, 130, 132, 134, 136, 138, 143, 145, 151, 153, 156, 159, 161, 164, 166, 168, 170, 172, 174, 177, 179, 181, 184, 186, 188, 190, 192, 202, 204, 206, 210, 212, 216, 221, 225, 227, 230, 241, 243, 253, 280, 283, 285, 290, 292, 296, 298, 301, 303, 305, 309, 312, 314, 321, 323, 325, 327, 329, 332, 334, 336, 339, 341, 344, 348, 352, 356, 359, 361, 366, 368, 376, 381, 388, 392, 394, 397, 399, 402, 405, 407, 413, 416, 418, 455, 458, 460, 463, 465, 471, 473, 476, 478, 481, 486, 496, 498, 500, 505, 508, 513, 519, 521, 523, 525, 527, 529, 541, 544, 549, 552, 556, 558, 561, 564, 567, 569, 571, 574, 578, 588, 594, 600, 603, 606, 608, 628, 630, 632, 639, 641, 643, 645, 647, 649, 652, 661, 668, 670, 673, 675, 678, 681, 683, 686, 688, 692, 695, 699, 701, 703, 708, 711, 713, 716, 724, 729, 736, 738, 740, 742, 748, 750, 754, 756, 758, 761, 763, 765, 767, 769, 771, 774, 777, 779, 781, 783, 785, 787, 790, 792, 797, 799, 803, 806, 808, 810, 812, 814, 816, 818, 821, 826, 829, 831, 833, 835, 837, 839, 841, 845, 847, 852, 854, 859, 862, 865, 867, 869, 872, 875, 877, 879, 881, 884, 886, 888, 891, 894, 898, 900, 904, 906, 911, 913, 918, 920, 922, 924, 927, 929, 931, 933, 938, 940, 942, 944, 946, 948, 951, 954, 956, 958, 961, 963, 966, 969, 971, 973, 975, 977, 979, 982, 984, 988, 990, 992, 994, 996, 999, 1001, 1004, 1006, 1010, 1012, 1015, 1017, 1019, 1021, 1028, 1030, 1032, 1035, 1037, 1040, 1047, 1053, 1055, 1057, 1059, 1063, 1065, 1068, 1073, 1075, 1080, 1082, 1084, 1086, 1089, 1091, 1094, 1098, 1100, 1103, 1106, 1109, 1116, 1118, 1123, 1125, 1127, 1129, 1131, 1134, 1136, 1138, 1140, 1143, 1145, 1147, 1149, 1151, 1153, 1155, 1159, 1161, 1163, 1165, 1167, 1170, 1172, 1174, 1178, 1182, 1184, 1186, 1189, 1191, 1195, 1197, 1199, 1202, 1204, 1206, 1208, 1211, 1213, 1215, 1217, 1220, 1223, 1225, 1227, 1229, 1231, 1233, 1237, 1239, 1242, 1244, 1246, 1248, 1250, 1254, 1256, 1258, 1260, 1262, 1264, 1267, 1269, 1271, 1273, 1275, 1277, 1280, 1282, 1284, 1286, 1288, 1290, 1292, 1295, 1298, 1301, 1303, 1305, 1307, 1311, 1315, 1317, 1319, 1321, 1323, 1327, 1331, 1335, 1337, 1346, 1348, 1351, 1354, 1356, 1362, 1365, 1368, 1374, 1378, 1383, 1385, 1387, 1390, 1392, 1394, 1396, 1398, 1400, 1404, 1406, 1408, 1411, 1413, 1415, 1417, 1419, 1423, 1425, 1427, 1430, 1432, 1434, 1436, 1438, 1442, 1444, 1447, 1449, 1451, 1453, 1455, 1458, 1460, 1462, 1464, 1466, 1468, 1470, 1472, 1474, 1476, 1478, 1480, 1484, 1487, 1491, 1494, 1496, 1499, 1501, 1504, 1510, 1513, 1517, 1519, 1521, 1527, 1530, 1532, 1536, 1539, 1541, 1543, 1545, 1548, 1551, 1553, 1556, 1559, 1561, 1566, 1568, 1570, 1573, 1576, 1579, 1582, 1585, 1587, 1590, 1592, 1597, 1601, 1606, 1608, 1610, 1614, 1617, 1620, 1623, 1625, 1627, 1631, 1633, 1635, 1638, 1641, 1643, 1645, 1651, 1653, 1655, 1659, 1663, 1665, 1667, 1673, 1675, 1678, 1685, 1687, 1690, 1692, 1694, 1696, 1698, 1703, 1709, 1716, 1718, 1720, 1722, 1726, 1728, 1730, 1733, 1736, 1738, 1740, 1742, 1744, 1748, 1750, 1752, 1754, 1756, 1760, 1763, 1768, 1771, 1775, 1778, 1780, 1782, 1785, 1787, 1789, 1791, 1793, 1796, 1800, 1802, 1814, 1818, 1820, 1824, 1830, 1832, 1836, 1838, 1840, 1843, 1846, 1848, 1851, 1860, 1862, 1864, 1868, 1870, 1873, 1875, 1878, 1880, 1884, 1886, 1888, 1890, 1892, 1896, 1899, 1901, 1905, 1907, 1909, 1911, 1914, 1916, 1921, 1923, 1925, 1927, 1930, 1932, 1934, 1937, 1939, 1941, 1943, 1945, 1947, 1950, 1952, 1954, 1956, 1958, 1960, 1962, 1964, 1966, 1968, 1970, 1977, 1981, 1984, 1988, 1991, 1993, 1995, 1998, 2001, 2004, 2006, 2012, 2014, 2020, 2025, 2027, 2029, 2033, 2035, 2039, 2045, 2050, 2052, 2054, 2057, 2059, 2061, 2063, 2065, 2068, 2071, 2080, 2082, 2084, 2086, 2089, 2094, 2096, 2099, 2101, 2103, 2107, 2109, 2111, 2114, 2116, 2123, 2125, 2127, 2131, 2134, 2139, 2145, 2147, 2155, 2157, 2164, 2166, 2168, 2180, 2182, 2185, 2189, 2191, 2193, 2204, 2206, 2208, 2210, 2212, 2214, 2216, 2218, 2220, 2222, 2224, 2227, 2230, 2232, 2234, 2242, 2245, 2247, 2249, 2252, 2254, 2256, 2258, 2260, 2263, 2266, 2268, 2271, 2274, 2277, 2280, 2283, 2287, 2290, 2292, 2294, 2301, 2303, 2305, 2308, 2311, 2319, 2322, 2324, 2326, 2328, 2331, 2333, 2336, 2338, 2340, 2342, 2344, 2349, 2351, 2353, 2355, 2359, 2363, 2365, 2368, 2370, 2372, 2374, 2377, 2379, 2382, 2385, 2387, 2389, 2393, 2395, 2398, 2400, 2404, 2406, 2410, 2412, 2414, 2416, 2420, 2426, 2431, 2433, 2436, 2438, 2444, 2447, 2450, 2453, 2455, 2465, 2467, 2473, 2479, 2481, 2492, 2501, 2504, 2508, 2515, 2520, 2524, 2526, 2528, 2532, 2534, 2536, 2538, 2543, 2545, 2549, 2553, 2555, 2560, 2563, 2566, 2568, 2570, 2577, 2579, 2582, 2586, 2591, 2596, 2598, 2600, 2602, 2605, 2607, 2610, 2613, 2618, 2620, 2622, 2625, 2630, 2633, 2635, 2637, 2639, 2643, 2645, 2651, 2653, 2655, 2657, 2660, 2662, 2664, 2666, 2669, 2671, 2673, 2676, 2678, 2680, 2682, 2684, 2686, 2688, 2690, 2692, 2694, 2696, 2698, 2700, 2702, 2705, 2707, 2709, 2713, 2715, 2718, 2720, 2723, 2725, 2727, 2729, 2731, 2733, 2737, 2742, 2744, 2747, 2749, 2752, 2755, 2757, 2759, 2761, 2763, 2765, 2767, 2769, 2774, 2776, 2779, 2783, 2785, 2787, 2789, 2793, 2795, 2798, 2800, 2805, 2808, 2812, 2814, 2817, 2820, 2824, 2827, 2829, 2831, 2834, 2837, 2839, 2841, 2843, 2848, 2854, 2860, 2865, 2871, 2874, 2879, 2881, 2884, 2887, 2889, 2895, 2897, 2899, 2901, 2905, 2912, 2914, 2916, and 2925, wherein said plant has a difference in the level of biomass as compared to the corresponding level of a control plant where said nucleic acid has not been modified. The modification can be effected by introducing a genetic modification in the locus comprising the nucleic acid. The method further can include selecting for plants having altered biomass. In some embodiments, the endogenous nucleic acid encodes a polypeptide having 80 percent or greater sequence identity to an amino acid sequence selected from the group consisting of SEQ ID NO: 2, 4, 5, 6, 8, 10, 12, 13, 15, 17, 18, 20, 22, 24, 25, 26, 27, 29, 30, 32, 34, 35, 37, 38, 39, 41, 43, 45, 47, 49, 51, 53, 55, 56, 57, 59, 60, 62, 63, 64, 65, 67, 69, 70, 71, 73, 74, 75, 77, 79, 80, 81, 82, 83, 84, 85, 86, 88, 90, 91, 92, 93, 94, 95, 96, 97, 98, 99, 100, 101, 102, 103, 104, 105, 106, 107, 108, 109, 110, 111, 112, 113, 115, 117, 119, 120, 121, 122, 123, 124, 126, 128, 129, 131, 133, 135, 137, 139, 140, 141, 142, 144, 146, 147, 148, 149, 150, 152, 154, 155, 157, 158, 160, 162, 163, 165, 167, 169, 171, 173, 175, 176, 178, 180, 182, 183, 185, 187, 189, 191, 193, 194, 195, 196, 197, 198, 199, 200, 201, 203, 205, 207, 208, 209, 211, 213, 214, 215, 217, 218, 219, 220, 222, 223, 224, 226, 228, 229, 231, 232, 233, 234, 235, 236, 237, 238, 239, 240, 242, 244, 245, 246, 247, 248, 249, 250, 251, 252, 254, 255, 256, 257, 258, 259, 260, 261, 262, 263, 264, 265, 266, 267, 268, 269, 270, 271, 272, 273, 274, 275, 276, 277, 278, 279, 281, 282, 284, 286, 287, 288, 289, 291, 293, 294, 295, 297, 299, 300, 302, 304, 306, 307, 308, 310, 311, 313, 315, 316, 317, 318, 319, 320, 322, 324, 326, 328, 330, 331, 333, 335, 337, 338, 340, 342, 343, 345, 346, 347, 349, 350, 351, 353, 354, 355, 357, 358, 360, 362, 363, 364, 365, 367, 369, 370, 371, 372, 373, 374, 375, 377, 378, 379, 380, 382, 383, 384, 385, 386, 387, 389, 390, 391, 393, 395, 396, 398, 400, 401, 403, 404, 406, 408, 409, 410, 411, 412, 414, 415, 417, 419, 420, 421, 422, 423, 424, 425, 426, 427, 428, 429, 430, 431, 432, 433, 434, 435, 436, 437, 438, 439, 440, 441, 442, 443, 444, 445, 446, 447, 448, 449, 450, 451, 452, 453, 454, 456, 457, 459, 461, 462, 464, 466, 467, 468, 469, 470, 472, 474, 475, 477, 479, 480, 482, 483, 484, 485, 487, 488, 489, 490, 491, 492, 493, 494, 495, 497, 499, 501, 502, 503, 504, 506, 507, 509, 510, 511, 512, 514, 515, 516, 517, 518, 520, 522, 524, 526, 528, 530, 531, 532, 533, 534, 535, 536, 537, 538, 539, 540, 542, 543, 545, 546, 547, 548, 550, 551, 553, 554, 555, 557, 559, 560, 562, 563, 565, 566, 568, 570, 572, 573, 575, 576, 577, 579, 580, 581, 582, 583, 584, 585, 586, 587, 589, 590, 591, 592, 593, 595, 596, 597, 598, 599, 601, 602, 604, 605, 607, 609, 610, 611, 612, 613, 614, 615, 616, 617, 618, 619, 620, 621, 622, 623, 624, 625, 626, 627, 629, 631, 633, 634, 635, 36, 637, 638, 640, 642, 644, 646, 648, 650, 651, 653, 654, 655, 656, 657, 658, 659, 660, 662, 663, 664, 665, 666, 667, 669, 671, 672, 674, 676, 677, 679, 680, 682, 684, 685, 687, 689, 690, 691, 693, 694, 696, 697, 698, 00, 702, 704, 705, 706, 707, 709, 710, 712, 714, 715, 717, 718, 719, 720, 721, 722, 723, 725, 726, 727, 728, 730, 731, 732, 733, 734, 735, 737, 739, 741, 743, 744, 745, 746, 747, 749, 751, 752, 753, 755, 757, 759, 760, 762, 764, 766, 768, 770, 772, 773, 775, 776, 778, 780, 782, 784, 786, 788, 789, 791, 793, 794, 795, 796, 798, 800, 801, 802, 804, 805, 807, 809, 811, 813, 815, 817, 819, 820, 822, 823, 824, 825, 827, 828, 830, 832, 834, 836, 838, 840, 842, 843, 844, 846, 848, 849, 850, 851, 853, 855, 856, 857, 858, 860, 861, 863, 864, 866, 868, 870, 871, 873, 874, 876, 878, 880, 882, 883, 885, 887, 889, 890, 892, 893, 895, 896, 897, 899, 901, 902, 903, 905, 907, 908, 909, 910, 912, 914, 915, 916, 917, 919, 921, 923, 925, 926, 928, 930, 932, 934, 935, 936, 937, 939, 941, 943, 945, 947, 949, 950, 952, 953, 955, 957, 959, 960, 962, 964, 965, 967, 968, 970, 972, 974, 976, 978, 980, 981, 983, 985, 86, 87, 989, 991, 993, 995, 997, 998, 1000, 1002, 1003, 1005, 1007, 1008, 1009, 1011, 1013, 1014, 1016, 1018, 1020, 1022, 1023, 1024, 1025, 1026, 1027, 1029, 1031, 1033, 1034, 1036, 1038, 1039, 1041, 1042, 1043, 1044, 1045, 1046, 1048, 1049, 1050, 1051, 1052, 1054, 1056, 1058, 1060, 1061, 1062, 1064, 1066, 1067, 1069, 1070, 1071, 1072, 1074, 1076, 1077, 1078, 1079, 1081, 1083, 1085, 1087, 1088, 1090, 1092, 1093, 1095, 1096, 1097, 1099, 1101, 1102, 1104, 1105, 1107, 1108, 1110, 1111, 1112, 1113, 1114, 1115, 1117, 1119, 1120, 1121, 1122, 1124, 1126, 1128, 1130, 1132, 1133, 1135, 1137, 1139, 1141, 1142, 1144, 1146, 1148, 1150, 1152, 1154, 1156, 1157, 1158, 1160, 1162, 1164, 1166, 1168, 1169, 1171, 1173, 1175, 1176, 1177, 1179, 1180, 1181, 1183, 1185, 1187, 1188, 1190, 1192, 1193, 1194, 1196, 1198, 1200, 1201, 1203, 1205, 1207, 1209, 1210, 1212, 1214, 1216, 1218, 1219, 1221, 1222, 1224, 1226, 1228, 1230, 1232, 1234, 1235, 1236, 1238, 1240, 1241, 1243, 1245, 1247, 1249, 1251, 1252, 1253, 1255, 1257, 1259, 1261, 1263, 1265, 1266, 1268, 1270, 1272, 1274, 1276, 1278, 1279, 1281, 1283, 1285, 1287, 1289, 1291, 1293, 1294, 1296, 1297, 1299, 1300, 1302, 1304, 1306, 1308, 1309, 1310, 1312, 1313, 1314, 1316, 1318, 1320, 1322, 1324, 1325, 1326, 1328, 1329, 1330, 1332, 1333, 1334, 1336, 1338, 1339, 1340, 1341, 1342, 1343, 1344, 1345, 1347, 1349, 1350, 1352, 1353, 1355, 1357, 1358, 1359, 1360, 1361, 1363, 1364, 1366, 1367, 1369, 1370, 1371, 1372, 1373, 1375, 1376, 1377, 1379, 1380, 1381, 1382, 1384, 1386, 1388, 1389, 1391, 1393, 1395, 1397, 1399, 1401, 1402, 1403, 1405, 1407, 1409, 1410, 1412, 1414, 1416, 1418, 1420, 1421, 1422, 1424, 1426, 1428, 1429, 1431, 1433, 1435, 1437, 1439, 1440, 1441, 1443, 1445, 1446, 1448, 1450, 1452, 1454, 1456, 1457, 1459, 1461, 1463, 1465, 1467, 1469, 1471, 1473, 1475, 1477, 1479, 1481, 1482, 1483, 1485, 1486, 1488, 1489, 1490, 1492, 1493, 1495, 1497, 1498, 1500, 1502, 1503, 1505, 1506, 1507, 1508, 1509, 1511, 1512, 1514, 1515, 1516, 1518, 1520, 1522, 1523, 1524, 1525, 1526, 1528, 1529, 1531, 1533, 1534, 1535, 1537, 1538, 1540, 1542, 1544, 1546, 1547, 1549, 1550, 1552, 1554, 1555, 1557, 1558, 1560, 1562, 1563, 1564, 1565, 1568, 1569, 1571, 1572, 1574, 1575, 1577, 1578, 1580, 1581, 1583, 1584, 1586, 1588, 1589, 1591, 1593, 1594, 1595, 1596, 1598, 1599, 1600, 1602, 1603, 1604, 1605, 1607, 1609, 1611, 1612, 1613, 1615, 1616, 1618, 1619, 1621, 1622, 1624, 1626, 1628, 1629, 1630, 1632, 1634, 1636, 1637, 1639, 1640, 1642, 1644, 1646, 1647, 1648, 1649, 1650, 1652, 1654, 1656, 1657, 1658, 1660, 1661, 1662, 1664, 1666, 1668, 1669, 1670, 1671, 1672, 1674, 1676, 1677, 1679, 1680, 1681, 1682, 1683, 1684, 1686, 1688, 1689, 1691, 1693, 1695, 1697, 1699, 1700, 1701, 1702, 1704, 1705, 1706, 1707, 1708, 1710, 1711, 1712, 1713, 1714, 1715, 1717, 1719, 1721, 1723, 1724, 1725, 1727, 1729, 1731, 1732, 1734, 1735, 1737, 1739, 1741, 1743, 1745, 1746, 1747, 1749, 1751, 1753, 1755, 1757, 1758, 1759, 1761, 1762, 1764, 1765, 1766, 1767, 1769, 1770, 1772, 1773, 1774, 1776, 1777, 1779, 1781, 1783, 1784, 1786, 1788, 1790, 1792, 1794, 1795, 1797, 798, 1799, 1801, 1803, 1804, 1805, 1806, 1807, 1808, 1809, 1810, 1811, 1812, 1813, 1815, 1816, 1817, 1819, 1821, 1822, 1823, 1825, 1826, 1827, 1828, 1829, 1831, 1833, 1834, 1835, 1837, 1839, 1841, 1842, 1844, 1845, 1847, 1849, 1850, 1852, 1853, 1854, 1855, 1856, 1857, 1858, 1859, 1861, 1863, 1865, 1866, 1867, 1869, 1871, 1872, 1874, 1876, 1877, 1879, 1881, 1882, 1883, 1885, 1887, 1889, 1891, 1893, 1894, 1895, 1897, 1898, 1900, 1902, 1903, 1904, 1906, 1908, 1910, 1912, 1913, 1915, 1917, 1918, 1919, 1920, 1922, 1924, 1926, 1928, 1929, 1931, 1933, 1935, 1936, 1938, 1940, 1942, 1944, 1946, 1948, 1949, 1951, 1953, 1955, 1957, 1959, 1961, 1963, 1965, 1967, 1969, 1971, 1972, 1973, 1974, 1975, 1976, 1978, 1979, 1980, 1982, 1983, 1985, 1986, 1987, 1989, 1990, 1992, 1994, 1996, 1997, 1999, 2000, 2002, 2003, 2005, 2007, 2008, 2009, 2010, 2011, 2013, 2015, 2016, 2017, 2018, 2019, 2021, 2022, 2023, 2024, 2026, 2028, 2030, 2031, 2032, 2034, 2036, 2037, 2038, 2040, 2041, 2042, 2043, 2044, 2046, 2047, 2048, 2049, 2051, 2053, 2055, 2056, 2058, 2060, 2062, 2064, 2066, 2067, 2069, 2070, 2072, 2073, 2074, 2075, 2076, 2077, 2078, 2079, 2081, 2083, 2085, 2087, 2088, 2090, 2091, 2092, 2093, 2095, 2097, 2098, 2100, 2102, 2104, 2105, 2106, 2108, 2110, 2112, 2113, 2115, 2117, 2118, 2119, 2120, 2121, 2122, 2124, 2126, 2128, 2129, 2130, 2132, 2133, 2135, 2136, 2137, 2138, 2140, 2141, 2142, 2143, 2144, 2146, 2148, 2149, 2150, 2151, 2152, 2153, 2154, 2156, 2158, 2159, 2160, 2161, 2162, 2163, 2165, 2167, 2169, 2170, 2171, 2172, 2173, 2174, 2175, 2176, 2177, 2178, 2179, 2181, 2183, 2184, 2186, 2187, 2188, 2190, 2192, 2194, 2195, 2196, 2197, 2198, 2199, 2200, 2201, 2202, 2203, 2205, 2207, 2209, 2211, 2213, 2215, 2217, 2219, 2221, 2223, 2225, 2226, 2228, 2229, 2231, 2233, 2235, 2236, 2237, 2238, 2239, 2240, 2241, 2243, 2244, 2246, 2248, 2250, 2251, 2253, 2255, 2257, 2259, 2261, 2262, 2264, 2265, 2267, 2269, 2270, 2272, 2273, 2275, 2276, 2278, 2279, 2281, 2282, 2284, 2285, 2286, 2288, 2289, 2291, 2293, 2295, 2296, 2297, 2298, 2299, 2300, 2302, 2304, 2306, 2307, 2309, 2310, 2312, 2313, 2314, 2315, 2316, 2317, 2318, 2320, 2321, 2323, 2325, 2327, 2329, 2330, 2332, 2334, 2335, 2337, 2339, 2341, 2343, 2345, 2346, 2347, 2348, 2350, 2352, 2354, 2356, 2357, 2358, 2360, 2361, 2362, 2364, 2366, 2367, 2369, 2371, 2373, 2375, 2376, 2378, 2380, 2381, 2383, 2384, 2386, 2388, 2390, 2391, 2392, 2394, 2396, 2397, 2399, 2401, 2402, 2403, 2405, 2407, 2408, 2409, 2411, 2413, 2415, 2417, 2418, 2419, 2421, 2422, 2423, 2424, 2425, 2427, 2428, 2429, 2430, 2432, 2434, 2435, 2437, 2439, 2440, 2441, 2442, 2443, 2445, 2446, 2448, 2449, 2451, 2452, 2454, 2456, 2457, 2458, 2459, 2460, 2461, 2462, 2463, 2464, 2466, 2468, 2469, 2470, 2471, 2472, 2474, 2475, 2476, 2477, 2478, 2480, 2482, 2483, 2484, 2485, 2486, 2487, 2488, 2489, 2490, 2491, 2493, 2494, 2495, 2496, 2497, 2498, 2499, 2500, 2502, 2503, 2505, 2506, 2507, 2509, 2510, 2511, 2512, 2513, 2514, 2516, 2517, 2518, 2519, 2521, 2522, 2523, 2525, 2527, 2529, 2530, 2531, 2533, 2535, 2537, 2539, 2540, 2541, 2542, 2544, 2546, 2547, 2548, 2550, 2551, 2552, 2554, 2556, 2557, 2558, 2559, 2561, 2562, 2564, 2565, 2567, 2569, 2571, 2572, 2573, 2574, 2575, 2576, 2578, 2580, 2581, 2583, 2584, 2585, 2587, 2588, 2589, 2590, 2592, 2593, 2594, 2595, 2597, 2599, 2601, 2603, 2604, 2606, 2608, 2609, 2611, 2612, 2614, 2615, 2616, 2617, 2619, 2621, 2623, 2624, 2626, 2627, 2628, 2629, 2631, 2632, 2634, 2636, 2638, 2640, 2641, 2642, 2644, 2646, 2647, 2648, 2649, 2650, 2652, 2654, 2656, 2658, 2659, 2661, 2663, 2665, 2667, 2668, 2670, 2672, 2674, 2675, 2677, 2679, 2681, 2683, 2685, 2687, 2689, 2691, 2693, 2695, 2697, 2699, 2701, 2703, 2704, 2706, 2708, 2710, 2711, 2712, 2714, 2716, 2717, 2719, 2721, 2722, 2724, 2726, 2728, 2730, 2732, 2734, 2735, 2736, 2738, 2739, 2740, 2741, 2743, 2745, 2746, 2748, 2750, 2751, 2753, 2754, 2756, 2758, 2760, 2762, 2764, 2766, 2768, 2770, 2771, 2772, 2773, 2775, 2777, 2778, 2780, 2781, 2782, 2784, 2786, 2788, 2790, 2791, 2792, 2794, 2796, 2797, 2799, 2801, 2802, 2803, 2804, 2806, 2807, 2809, 2810, 2811, 2813, 2815, 2816, 2818, 2819, 2821, 2822, 2823, 2825, 2826, 2828, 2830, 2832, 2833, 2835, 2836, 2838, 2840, 2842, 2844, 2845, 2846, 2847, 2849, 2850, 2851, 2852, 2853, 2855, 2856, 2857, 2858, 2859, 2861, 2862, 2863, 2864, 2866, 2867, 2868, 2869, 2870, 2872, 2873, 2875, 2876, 2877, 2878, 2880, 2882, 2883, 2885, 2886, 2888, 2890, 2891, 2892, 2893, 2894, 2896, 2898, 2900, 2902, 2903, 2904, 2906, 2907, 2908, 2909, 2910, 2911, 2915, 2917, 2918, 2919, 2920, 2921, 2922, 2923, 2924 and 2926.

[0066] This document also features a method of producing a plant. The method includes growing a plant cell containing a modified endogenous nucleic acid encoding a polypeptide, wherein the HMM bit score of the amino acid sequence of the polypeptide is greater than about 65, the HMM based on the amino acid sequences depicted in one of FIGS. 1-50, and wherein the plant has a difference in the level of biomass as compared to the corresponding level of a control plant where said nucleic acid has not been modified.

[0067] In another aspect, this document features a plant cell containing a modified endogenous nucleic acid encoding a polypeptide, wherein the HMM bit score of the amino acid sequence of the polypeptide is greater than about 65, the HMM based on the amino acid sequences depicted in one of FIGS. 1-50, and wherein a plant produced from the plant cell has a difference in the level of biomass as compared to the corresponding level of a control plant where the nucleic acid has not been modified.

[0068] In another aspect, this document features a plant cell containing a modified biomass-modulating endogenous nucleic acid, the nucleic acid comprising a nucleotide sequence with an open reading frame having 80 percent or greater sequence identity to the nucleotide sequence selected from the group consisting of SEQ ID NO: 1, 3, 7, 9, 11, 14, 16, 19, 21, 23, 28, 31, 33, 36, 40, 42, 44, 46, 48, 50, 52, 54, 58, 61, 66, 68, 72, 76, 78, 87, 89, 114, 116, 118, 125, 127, 130, 132, 134, 136, 138, 143, 145, 151, 153, 156, 159, 161, 164, 166, 168, 170, 172, 174, 177, 179, 181, 184, 186, 188, 190, 192, 202, 204, 206, 210, 212, 216, 221, 225, 227, 230, 241, 243, 253, 280, 283, 285, 290, 292, 296, 298, 301, 303, 305, 309, 312, 314, 321, 323, 325, 327, 329, 332, 334, 336, 339, 341, 344, 348, 352, 356, 359, 361, 366, 368, 376, 381, 388, 392, 394, 397, 399, 402, 405, 407, 413, 416, 418, 455, 458, 460, 463, 465, 471, 473, 476, 478, 481, 486, 496, 498, 500, 505, 508, 513, 519, 521, 523, 525, 527, 529, 541, 544, 549, 552, 556, 558, 561, 564, 567, 569, 571, 574, 578, 588, 594, 600, 603, 606, 608, 628, 630, 632, 639, 641, 643, 645, 647, 649, 652, 661, 668, 670, 673, 675, 678, 681, 683, 686, 688, 692, 695, 699, 701, 703, 708, 711, 713, 716, 724, 729, 736, 738, 740, 742, 748, 750, 754, 756, 758, 761, 763, 765, 767, 769, 771, 774, 777, 779, 781, 783, 785, 787, 790, 792, 797, 799, 803, 806, 808, 810, 812, 814, 816, 818, 821, 826, 829, 831, 833, 835, 837, 839, 841, 845, 847, 852, 854, 859, 862, 865, 867, 869, 872, 875, 877, 879, 881, 884, 886, 888, 891, 894, 898, 900, 904, 906, 911, 913, 918, 920, 922, 924, 927, 929, 931, 933, 938, 940, 942, 944, 946, 948, 951, 954, 956, 958, 961, 963, 966, 969, 971, 973, 975, 977, 979, 982, 984, 988, 990, 992, 994, 996, 999, 1001, 1004, 1006, 1010, 1012, 1015, 1017, 1019, 1021, 1028, 1030, 1032, 1035, 1037, 1040, 1047, 1053, 1055, 1057, 1059, 1063, 1065, 1068, 1073, 1075, 1080, 1082, 1084, 1086, 1089, 1091, 1094, 1098, 1100, 1103, 1106, 1109, 1116, 1118, 1123, 1125, 1127, 1129, 1131, 1134, 1136, 1138, 1140, 1143, 1145, 1147, 1149, 1151, 1153, 1155, 1159, 1161, 1163, 1165, 1167, 1170, 1172, 1174, 1178, 1182, 1184, 1186, 1189, 1191, 1195, 1197, 1199, 1202, 1204, 1206, 1208, 1211, 1213, 1215, 1217, 1220, 1223, 1225, 1227, 1229, 1231, 1233, 1237, 1239, 1242, 1244, 1246, 1248, 1250, 1254, 1256, 1258, 1260, 1262, 1264, 1267, 1269, 1271, 1273, 1275, 1277, 1280, 1282, 1284, 1286, 1288, 1290, 1292, 1295, 1298, 1301, 1303, 1305, 1307, 1311, 1315, 1317, 1319, 1321, 1323, 1327, 1331, 1335, 1337, 1346, 1348, 1351, 1354, 1356, 1362, 1365, 1368, 1374, 1378, 1383, 1385, 1387, 1390, 1392, 1394, 1396, 1398, 1400, 1404, 1406, 1408, 1411, 1413, 1415, 1417, 1419, 1423, 1425, 1427, 1430, 1432, 1434, 1436, 1438, 1442, 1444, 1447, 1449, 1451, 1453, 1455, 1458, 1460, 1462, 1464, 1466, 1468, 1470, 1472, 1474, 1476, 1478, 1480, 1484, 1487, 1491, 1494, 1496, 1499, 1501, 1504, 1510, 1513, 1517, 1519, 1521, 1527, 1530, 1532, 1536, 1539, 1541, 1543, 1545, 1548, 1551, 1553, 1556, 1559, 1561, 1566, 1568, 1570, 1573, 1576, 1579, 1582, 1585, 1587, 1590, 1592, 1597, 1601, 1606, 1608, 1610, 1614, 1617, 1620, 1623, 1625, 1627, 1631, 1633, 1635, 1638, 1641, 1643, 1645, 1651, 1653, 1655, 1659, 1663, 1665, 1667, 1673, 1675, 1678, 1685, 1687, 1690, 1692, 1694, 1696, 1698, 1703, 1709, 1716, 1718, 1720, 1722, 1726, 1728, 1730, 1733, 1736, 1738, 1740, 1742, 1744, 1748, 1750, 1752, 1754, 1756, 1760, 1763, 1768, 1771, 1775, 1778, 1780, 1782, 1785, 1787, 1789, 1791, 1793, 1796, 1800, 1802, 1814, 1818, 1820, 1824, 1830, 1832, 1836, 1838, 1840, 1843, 1846, 1848, 1851, 1860, 1862, 1864, 1868, 1870, 1873, 1875, 1878, 1880, 1884, 1886, 1888, 1890, 1892, 1896, 1899, 1901, 1905, 1907, 1909, 1911, 1914, 1916, 1921, 1923, 1925, 1927, 1930, 1932, 1934, 1937, 1939, 1941, 1943, 1945, 1947, 1950, 1952, 1954, 1956, 1958, 1960, 1962, 1964, 1966, 1968, 1970, 1977, 1981, 1984, 1988, 1991, 1993, 1995, 1998, 2001, 2004, 2006, 2012, 2014, 2020, 2025, 2027, 2029, 2033, 2035, 2039, 2045, 2050, 2052, 2054, 2057, 2059, 2061, 2063, 2065, 2068, 2071, 2080, 2082, 2084, 2086, 2089, 2094, 2096, 2099, 2101, 2103, 2107, 2109, 2111, 2114, 2116, 2123, 2125, 2127, 2131, 2134, 2139, 2145, 2147, 2155, 2157, 2164, 2166, 2168, 2180, 2182, 2185, 2189, 2191, 2193, 2204, 2206, 2208, 2210, 2212, 2214, 2216, 2218, 2220, 2222, 2224, 2227, 2230, 2232, 2234, 2242, 2245, 2247, 2249, 2252, 2254, 2256, 2258, 2260, 2263, 2266, 2268, 2271, 2274, 2277, 2280, 2283, 2287, 2290, 2292, 2294, 2301, 2303, 2305, 2308, 2311, 2319, 2322, 2324, 2326, 2328, 2331, 2333, 2336, 2338, 2340, 2342, 2344, 2349, 2351, 2353, 2355, 2359, 2363, 2365, 2368, 2370, 2372, 2374, 2377, 2379, 2382, 2385, 2387, 2389, 2393, 2395, 2398, 2400, 2404, 2406, 2410, 2412, 2414, 2416, 2420, 2426, 2431, 2433, 2436, 2438, 2444, 2447, 2450, 2453, 2455, 2465, 2467, 2473, 2479, 2481, 2492, 2501, 2504, 2508, 2515, 2520, 2524, 2526, 2528, 2532, 2534, 2536, 2538, 2543, 2545, 2549, 2553, 2555, 2560, 2563, 2566, 2568, 2570, 2577, 2579, 2582, 2586, 2591, 2596, 2598, 2600, 2602, 2605, 2607, 2610, 2613, 2618, 2620, 2622, 2625, 2630, 2633, 2635, 2637, 2639, 2643, 2645, 2651, 2653, 2655, 2657, 2660, 2662, 2664, 2666, 2669, 2671, 2673, 2676, 2678, 2680, 2682, 2684, 2686, 2688, 2690, 2692, 2694, 2696, 2698, 2700, 2702, 2705, 2707, 2709, 2713, 2715, 2718, 2720, 2723, 2725, 2727, 2729, 2731, 2733, 2737, 2742, 2744, 2747, 2749, 2752, 2755, 2757, 2759, 2761, 2763, 2765, 2767, 2769, 2774, 2776, 2779, 2783, 2785, 2787, 2789, 2793, 2795, 2798, 2800, 2805, 2808, 2812, 2814, 2817, 2820, 2824, 2827, 2829, 2831, 2834, 2837, 2839, 2841, 2843, 2848, 2854, 2860, 2865, 2871, 2874, 2879, 2881, 2884, 2887, 2889, 2895, 2897, 2899, 2901, 2905, 2912, 2914, 2916, and 2925, and wherein a plant produced from the plant cell has a difference in the level of biomass as compared to the corresponding level of a control plant where the nucleic acid has not been modified.

[0069] In the plant cells described herein, the endogenous nucleic acid can encode a polypeptide having 80 percent or greater sequence identity to an amino acid sequence selected from the group consisting of SEQ ID NO: 2, 4, 5, 6, 8, 10, 12, 13, 15, 17, 18, 20, 22, 24, 25, 26, 27, 29, 30, 32, 34, 35, 37, 38, 39, 41, 43, 45, 47, 49, 51, 53, 55, 56, 57, 59, 60, 62, 63, 64, 65, 67, 69, 70, 71, 73, 74, 75, 77, 79, 80, 81, 82, 83, 84, 85, 86, 88, 90, 91, 92, 93, 94, 95, 96, 97, 98, 99, 100, 101, 102, 103, 104, 105, 106, 107, 108, 109, 110, 111, 112, 113, 115, 117, 119, 120, 121, 122, 123, 124, 126, 128, 129, 131, 133, 135, 137, 139, 140, 141, 142, 144, 146, 147, 148, 149, 150, 152, 154, 155, 157, 158, 160, 162, 163, 165, 167, 169, 171, 173, 175, 176, 178, 180, 182, 183, 185, 187, 189, 191, 193, 194, 195, 196, 197, 198, 199, 200, 201, 203, 205, 207, 208, 209, 211, 213, 214, 215, 217, 218, 219, 220, 222, 223, 224, 226, 228, 229, 231, 232, 233, 234, 235, 236, 237, 238, 239, 240, 242, 244, 245, 246, 247, 248, 249, 250, 251, 252, 254, 255, 256, 257, 258, 259, 260, 261, 262, 263, 264, 265, 266, 267, 268, 269, 270, 271, 272, 273, 274, 275, 276, 277, 278, 279, 281, 282, 284, 286, 287, 288, 289, 291, 293, 294, 295, 297, 299, 300, 302, 304, 306, 307, 308, 310, 311, 313, 315, 316, 317, 318, 319, 320, 322, 324, 326, 328, 330, 331, 333, 335, 337, 338, 340, 342, 343, 345, 346, 347, 349, 350, 351, 353, 354, 355, 357, 358, 360, 362, 363, 364, 365, 367, 369, 370, 371, 372, 373, 374, 375, 377, 378, 379, 380, 382, 383, 384, 385, 386, 387, 389, 390, 391, 393, 395, 396, 398, 400, 401, 403, 404, 406, 408, 409, 410, 411, 412, 414, 415, 417, 419, 420, 421, 422, 423, 424, 425, 426, 427, 428, 429, 430, 431, 432, 433, 434, 435, 436, 437, 438, 439, 440, 441, 442, 443, 444, 445, 446, 447, 448, 449, 450, 451, 452, 453, 454, 456, 457, 459, 461, 462, 464, 466, 467, 468, 469, 470, 472, 474, 475, 477, 479, 480, 482, 483, 484, 485, 487, 488, 489, 490, 491, 492, 493, 494, 495, 497, 499, 501, 502, 503, 504, 506, 507, 509, 510, 511, 512, 514, 515, 516, 517, 518, 520, 522, 524, 526, 528, 530, 531, 532, 533, 534, 535, 536, 537, 538, 539, 540, 542, 543, 545, 546, 547, 548, 550, 551, 553, 554, 555, 557, 559, 560, 562, 563, 565, 566, 568, 570, 572, 573, 575, 576, 577, 579, 580, 581, 582, 583, 584, 585, 586, 587, 589, 590, 591, 592, 593, 595, 596, 597, 598, 599, 601, 602, 604, 605, 607, 609, 610, 611, 612, 613, 614, 615, 616, 617, 618, 619, 620, 621, 622, 623, 624, 625, 626, 627, 629, 631, 633, 634, 635, 36, 637, 638, 640, 642, 644, 646, 648, 650, 651, 653, 654, 655, 656, 657, 658, 659, 660, 662, 663, 664, 665, 666, 667, 669, 671, 672, 674, 676, 677, 679, 680, 682, 684, 685, 687, 689, 690, 691, 693, 694, 696, 697, 698, 00, 702, 704, 705, 706, 707, 709, 710, 712, 714, 715, 717, 718, 719, 720, 721, 722, 723, 725, 726, 727, 728, 730, 731, 732, 733, 734, 735, 737, 739, 741, 743, 744, 745, 746, 747, 749, 751, 752, 753, 755, 757, 759, 760, 762, 764, 766, 768, 770, 772, 773, 775, 776, 778, 780, 782, 784, 786, 788, 789, 791, 793, 794, 795, 796, 798, 800, 801, 802, 804, 805, 807, 809, 811, 813, 815, 817, 819, 820, 822, 823, 824, 825, 827, 828, 830, 832, 834, 836, 838, 840, 842, 843, 844, 846, 848, 849, 850, 851, 853, 855, 856, 857, 858, 860, 861, 863, 864, 866, 868, 870, 871, 873, 874, 876, 878, 880, 882, 883, 885, 887, 889, 890, 892, 893, 895, 896, 897, 899, 901, 902, 903, 905, 907, 908, 909, 910, 912, 914, 915, 916, 917, 919, 921, 923, 925, 926, 928, 930, 932, 934, 935, 936, 937, 939, 941, 943, 945, 947, 949, 950, 952, 953, 955, 957, 959, 960, 962, 964, 965, 967, 968, 970, 972, 974, 976, 978, 980, 981, 983, 985, 86, 87, 989, 991, 993, 995, 997, 998, 1000, 1002, 1003, 1005, 1007, 1008, 1009, 1011, 1013, 1014, 1016, 1018, 1020, 1022, 1023, 1024, 1025, 1026, 1027, 1029, 1031, 1033, 1034, 1036, 1038, 1039, 1041, 1042, 1043, 1044, 1045, 1046, 1048, 1049, 1050, 1051, 1052, 1054, 1056, 1058, 1060, 1061, 1062, 1064, 1066, 1067, 1069, 1070, 1071, 1072, 1074, 1076, 1077, 1078, 1079, 1081, 1083, 1085, 1087, 1088, 1090, 1092, 1093, 1095, 1096, 1097, 1099, 1101, 1102, 1104, 1105, 1107, 1108, 1110, 1111, 1112, 1113, 1114, 1115, 1117, 1119, 1120, 1121, 1122, 1124, 1126, 1128, 1130, 1132, 1133, 1135, 1137, 1139, 1141, 1142, 1144, 1146, 1148, 1150, 1152, 1154, 1156, 1157, 1158, 1160, 1162, 1164, 1166, 1168, 1169, 1171, 1173, 1175, 1176, 1177, 1179, 1180, 1181, 1183, 1185, 1187, 1188, 1190, 1192, 1193, 1194, 1196, 1198, 1200, 1201, 1203, 1205, 1207, 1209, 1210, 1212, 1214, 1216, 1218, 1219, 1221, 1222, 1224, 1226, 1228, 1230, 1232, 1234, 1235, 1236, 1238, 1240, 1241, 1243, 1245, 1247, 1249, 1251, 1252, 1253, 1255, 1257, 1259, 1261, 1263, 1265, 1266, 1268, 1270, 1272, 1274, 1276, 1278, 1279, 1281, 1283, 1285, 1287, 1289, 1291, 1293, 1294, 1296, 1297, 1299, 1300, 1302, 1304, 1306, 1308, 1309, 1310, 1312, 1313, 1314, 1316, 1318, 1320, 1322, 1324, 1325, 1326, 1328, 1329, 1330, 1332, 1333, 1334, 1336, 1338, 1339, 1340, 1341, 1342, 1343, 1344, 1345, 1347, 1349, 1350, 1352, 1353, 1355, 1357, 1358, 1359, 1360, 1361, 1363, 1364, 1366, 1367, 1369, 1370, 1371, 1372, 1373, 1375, 1376, 1377, 1379, 1380, 1381, 1382, 1384, 1386, 1388, 1389, 1391, 1393, 1395, 1397, 1399, 1401, 1402, 1403, 1405, 1407, 1409, 1410, 1412, 1414, 1416, 1418, 1420, 1421, 1422, 1424, 1426, 1428, 1429, 1431, 1433, 1435, 1437, 1439, 1440, 1441, 1443, 1445, 1446, 1448, 1450, 1452, 1454, 1456, 1457, 1459, 1461, 1463, 1465, 1467, 1469, 1471, 1473, 1475, 1477, 1479, 1481, 1482, 1483, 1485, 1486, 1488, 1489, 1490, 1492, 1493, 1495, 1497, 1498, 1500, 1502, 1503, 1505, 1506, 1507, 1508, 1509, 1511, 1512, 1514, 1515, 1516, 1518, 1520, 1522, 1523, 1524, 1525, 1526, 1528, 1529, 1531, 1533, 1534, 1535, 1537, 1538, 1540, 1542, 1544, 1546, 1547, 1549, 1550, 1552, 1554, 1555, 1557, 1558, 1560, 1562, 1563, 1564, 1565, 1568, 1569, 1571, 1572, 1574, 1575, 1577, 1578, 1580, 1581, 1583, 1584, 1586, 1588, 1589, 1591, 1593, 1594, 1595, 1596, 1598, 1599, 1600, 1602, 1603, 1604, 1605, 1607, 1609, 1611, 1612, 1613, 1615, 1616, 1618, 1619, 1621, 1622, 1624, 1626, 1628, 1629, 1630, 1632, 1634, 1636, 1637, 1639, 1640, 1642, 1644, 1646, 1647, 1648, 1649, 1650, 1652, 1654, 1656, 1657, 1658, 1660, 1661, 1662, 1664, 1666, 1668, 1669, 1670, 1671, 1672, 1674, 1676, 1677, 1679, 1680, 1681, 1682, 1683, 1684, 1686, 1688, 1689, 1691, 1693, 1695, 1697, 1699, 1700, 1701, 1702, 1704, 1705, 1706, 1707, 1708, 1710, 1711, 1712, 1713, 1714, 1715, 1717, 1719, 1721, 1723, 1724, 1725, 1727, 1729, 1731, 1732, 1734, 1735, 1737, 1739, 1741, 1743, 1745, 1746, 1747, 1749, 1751, 1753, 1755, 1757, 1758, 1759, 1761, 1762, 1764, 1765, 1766, 1767, 1769, 1770, 1772, 1773, 1774, 1776, 1777, 1779, 1781, 1783, 1784, 1786, 1788, 1790, 1792, 1794, 1795, 1797, 798, 1799, 1801, 1803, 1804, 1805, 1806, 1807, 1808, 1809, 1810, 1811, 1812, 1813, 1815, 1816, 1817, 1819, 1821, 1822, 1823, 1825, 1826, 1827, 1828, 1829, 1831, 1833, 1834, 1835, 1837, 1839, 1841, 1842, 1844, 1845, 1847, 1849, 1850, 1852, 1853, 1854, 1855, 1856, 1857, 1858, 1859, 1861, 1863, 1865, 1866, 1867, 1869, 1871, 1872, 1874, 1876, 1877, 1879, 1881, 1882, 1883, 1885, 1887, 1889, 1891, 1893, 1894, 1895, 1897, 1898, 1900, 1902, 1903, 1904, 1906, 1908, 1910, 1912, 1913, 1915, 1917, 1918, 1919, 1920, 1922, 1924, 1926, 1928, 1929, 1931, 1933, 1935, 1936, 1938, 1940, 1942, 1944, 1946, 1948, 1949, 1951, 1953, 1955, 1957, 1959, 1961, 1963, 1965, 1967, 1969, 1971, 1972, 1973, 1974, 1975, 1976, 1978, 1979, 1980, 1982, 1983, 1985, 1986, 1987, 1989, 1990, 1992, 1994, 1996, 1997, 1999, 2000, 2002, 2003, 2005, 2007, 2008, 2009, 2010, 2011, 2013, 2015, 2016, 2017, 2018, 2019, 2021, 2022, 2023, 2024, 2026, 2028, 2030, 2031, 2032, 2034, 2036, 2037, 2038, 2040, 2041, 2042, 2043, 2044, 2046, 2047, 2048, 2049, 2051, 2053, 2055, 2056, 2058, 2060, 2062, 2064, 2066, 2067, 2069, 2070, 2072, 2073, 2074, 2075, 2076, 2077, 2078, 2079, 2081, 2083, 2085, 2087, 2088, 2090, 2091, 2092, 2093, 2095, 2097, 2098, 2100, 2102, 2104, 2105, 2106, 2108, 2110, 2112, 2113, 2115, 2117, 2118, 2119, 2120, 2121, 2122, 2124, 2126, 2128, 2129, 2130, 2132, 2133, 2135, 2136, 2137, 2138, 2140, 2141, 2142, 2143, 2144, 2146, 2148, 2149, 2150, 2151, 2152, 2153, 2154, 2156, 2158, 2159, 2160, 2161, 2162, 2163, 2165, 2167, 2169, 2170, 2171, 2172, 2173, 2174, 2175, 2176, 2177, 2178, 2179, 2181, 2183, 2184, 2186, 2187, 2188, 2190, 2192, 2194, 2195, 2196, 2197, 2198, 2199, 2200, 2201, 2202, 2203, 2205, 2207, 2209, 2211, 2213, 2215, 2217, 2219, 2221, 2223, 2225, 2226, 2228, 2229, 2231, 2233, 2235, 2236, 2237, 2238, 2239, 2240, 2241, 2243, 2244, 2246, 2248, 2250, 2251, 2253, 2255, 2257, 2259, 2261, 2262, 2264, 2265, 2267, 2269, 2270, 2272, 2273, 2275, 2276, 2278, 2279, 2281, 2282, 2284, 2285, 2286, 2288, 2289, 2291, 2293, 2295, 2296, 2297, 2298, 2299, 2300, 2302, 2304, 2306, 2307, 2309, 2310, 2312, 2313, 2314, 2315, 2316, 2317, 2318, 2320, 2321, 2323, 2325, 2327, 2329, 2330, 2332, 2334, 2335, 2337, 2339, 2341, 2343, 2345, 2346, 2347, 2348, 2350, 2352, 2354, 2356, 2357, 2358, 2360, 2361, 2362, 2364, 2366, 2367, 2369, 2371, 2373, 2375, 2376, 2378, 2380, 2381, 2383, 2384, 2386, 2388, 2390, 2391, 2392, 2394, 2396, 2397, 2399, 2401, 2402, 2403, 2405, 2407, 2408, 2409, 2411, 2413, 2415, 2417, 2418, 2419, 2421, 2422, 2423, 2424, 2425, 2427, 2428, 2429, 2430, 2432, 2434, 2435, 2437, 2439, 2440, 2441, 2442, 2443, 2445, 2446, 2448, 2449, 2451, 2452, 2454, 2456, 2457, 2458, 2459, 2460, 2461, 2462, 2463, 2464, 2466, 2468, 2469, 2470, 2471, 2472, 2474, 2475, 2476, 2477, 2478, 2480, 2482, 2483, 2484, 2485, 2486, 2487, 2488, 2489, 2490, 2491, 2493, 2494, 2495, 2496, 2497, 2498, 2499, 2500, 2502, 2503, 2505, 2506, 2507, 2509, 2510, 2511, 2512, 2513, 2514, 2516, 2517, 2518, 2519, 2521, 2522, 2523, 2525, 2527, 2529, 2530, 2531, 2533, 2535, 2537, 2539, 2540, 2541, 2542, 2544, 2546, 2547, 2548, 2550, 2551, 2552, 2554, 2556, 2557, 2558, 2559, 2561, 2562, 2564, 2565, 2567, 2569, 2571, 2572, 2573, 2574, 2575, 2576, 2578, 2580, 2581, 2583, 2584, 2585, 2587, 2588, 2589, 2590, 2592, 2593, 2594, 2595, 2597, 2599, 2601, 2603, 2604, 2606, 2608, 2609, 2611, 2612, 2614, 2615, 2616, 2617, 2619, 2621, 2623, 2624, 2626, 2627, 2628, 2629, 2631, 2632, 2634, 2636, 2638, 2640, 2641, 2642, 2644, 2646, 2647, 2648, 2649, 2650, 2652, 2654, 2656, 2658, 2659, 2661, 2663, 2665, 2667, 2668, 2670, 2672, 2674, 2675, 2677, 2679, 2681, 2683, 2685, 2687, 2689, 2691, 2693, 2695, 2697, 2699, 2701, 2703, 2704, 2706, 2708, 2710, 2711, 2712, 2714, 2716, 2717, 2719, 2721, 2722, 2724, 2726, 2728, 2730, 2732, 2734, 2735, 2736, 2738, 2739, 2740, 2741, 2743, 2745, 2746, 2748, 2750, 2751, 2753, 2754, 2756, 2758, 2760, 2762, 2764, 2766, 2768, 2770, 2771, 2772, 2773, 2775, 2777, 2778, 2780, 2781, 2782, 2784, 2786, 2788, 2790, 2791, 2792, 2794, 2796, 2797, 2799, 2801, 2802, 2803, 2804, 2806, 2807, 2809, 2810, 2811, 2813, 2815, 2816, 2818, 2819, 2821, 2822, 2823, 2825, 2826, 2828, 2830, 2832, 2833, 2835, 2836, 2838, 2840, 2842, 2844, 2845, 2846, 2847, 2849, 2850, 2851, 2852, 2853, 2855, 2856, 2857, 2858, 2859, 2861, 2862, 2863, 2864, 2866, 2867, 2868, 2869, 2870, 2872, 2873, 2875, 2876, 2877, 2878, 2880, 2882, 2883, 2885, 2886, 2888, 2890, 2891, 2892, 2893, 2894, 2896, 2898, 2900, 2902, 2903, 2904, 2906, 2907, 2908, 2909, 2910, 2911, 2915, 2917, 2918, 2919, 2920, 2921, 2922, 2923, 2924 and 2926. A plant produced from such a plant cell has a difference in the level of biomass as compared to the corresponding level of a control plant where the nucleic acid has not been modified.

[0070] Unless otherwise defined, all technical and scientific terms used herein have the same meaning as commonly understood by one of ordinary skill in the art to which this invention pertains. Although methods and materials similar or equivalent to those described herein can be used to practice the invention, suitable methods and materials are described below. All publications, patent applications, patents, and other references mentioned herein are incorporated by reference in their entirety. In case of conflict, the present specification, including definitions, will control. In addition, the materials, methods, and examples are illustrative only and not intended to be limiting.

[0071] The details of one or more embodiments of the invention are set forth in the accompanying drawings and the description below. Other features, objects, and advantages of the invention will be apparent from the description and drawings, and from the claims. The details of one or more embodiments of the invention are set forth in the accompanying drawings and the description below. Other features, objects, and advantages of the invention will be apparent from the description and drawings, and from the claims. Applicants reserve the right to alternatively claim any disclosed invention using the transitional phrase “comprising,” “consisting essentially of,” or “consisting of,” according to standard practice in patent law.

### DESCRIPTION OF THE DRAWINGS

[0072] FIG. 1 is an alignment of the amino acid sequence of ME26166 corresponding to CeresAnnot:831967 (SEQ ID NO:2880) with homologous and/or orthologous amino acid sequences. In all the alignment figures shown herein, a dash in an aligned sequence represents a gap, i.e., a lack of an amino acid at that position. Identical amino acids or conserved amino acid substitutions among aligned sequences are identified by boxes. FIG. 1 and the other alignment figures provided herein were generated using the program MUSCLE version 3.52.

[0073] FIG. 2 is an alignment of the amino acid sequence corresponding to CeresAnnot:837136 (SEQ ID NO:310) with homologous and/or orthologous amino acid sequences.

[0074] FIG. 3 is an alignment of the amino acid sequence of ME03563 corresponding to CeresClone:5055 (SEQ ID NO:403) with homologous and/or orthologous amino acid sequences.

[0075] FIG. 4 is an alignment of the amino acid sequence of ME07523 or ME04241 corresponding to CeresClone:14432 (SEQ ID NO:669) with homologous and/or orthologous amino acid sequences.

[0076] FIG. 5 is an alignment of the amino acid sequence of ME25767, ME26161, or ME06492 corresponding to CeresClone:21240 (SEQ ID NO:1797) with homologous and/or orthologous amino acid sequences.

[0077] FIG. 6 is an alignment of the amino acid sequence of ME24912 corresponding to CeresClone:570057 (SEQ ID NO:717) with homologous and/or orthologous amino acid sequences.

[0078] FIG. 7 is an alignment of the amino acid sequence of ME05057 corresponding to CeresClone:691319 (SEQ ID NO:693) with homologous and/or orthologous amino acid sequences.

[0079] FIG. 8 is an alignment of the amino acid sequence of ME29158 corresponding to CeresClone:1724055 (SEQ ID NO:1518) with homologous and/or orthologous amino acid sequences.

[0080] FIG. 9 is an alignment of the amino acid sequence of ME26627 corresponding to CeresClone:1724569 (SEQ ID NO:1624) with homologous and/or orthologous amino acid sequences.

[0081] FIG. 10 is an alignment of the amino acid sequence of ME26114 corresponding to CeresClone:1724782 (SEQ ID NO:1887) with homologous and/or orthologous amino acid sequences.

[0082] FIG. 11 is an alignment of the amino acid sequence corresponding to CeresClone:1724846 (SEQ ID NO:834) with homologous and/or orthologous amino acid sequences.

[0083] FIG. 12 is an alignment of the amino acid sequence of ME31528 corresponding to CeresClone:1725400 (SEQ ID NO:1318) with homologous and/or orthologous amino acid sequences.

[0084] FIG. 13 is an alignment of the amino acid sequence of ME29794 corresponding to CeresClone:1726076 (SEQ ID NO:459) with homologous and/or orthologous amino acid sequences.

[0085] FIG. 14 is an alignment of the amino acid sequence corresponding to CeresClone:1727475 (SEQ ID NO:335) with homologous and/or orthologous amino acid sequences.

[0086] FIG. 15 is an alignment of the amino acid sequence of ME27144 corresponding to CeresClone:1727628 (SEQ ID NO:846) with homologous and/or orthologous amino acid sequences.

[0087] FIG. 16 is an alignment of the amino acid sequence of ME31185 corresponding to CeresClone:1760764 (SEQ ID NO:1426) with homologous and/or orthologous amino acid sequences.

[0088] FIG. 17 is an alignment of the amino acid sequence of ME26843 corresponding to CeresClone:1763298 (SEQ ID NO:2525) with homologous and/or orthologous amino acid sequences.

[0089] FIG. 18 is an alignment of the amino acid sequence of ME31173 corresponding to CeresClone:1764605 (SEQ ID NO:1272) with homologous and/or orthologous amino acid sequences.

[0090] FIG. 19 is an alignment of the amino acid sequence corresponding to CeresClone:1767521 (SEQ ID NO:878) with homologous and/or orthologous amino acid sequences.

[0091] FIG. 20 is an alignment of the amino acid sequence corresponding to CeresClone:1769660 (SEQ ID NO:1660) with homologous and/or orthologous amino acid sequences.

[0092] FIG. 21 is an alignment of the amino acid sequence of ME31545 corresponding to CeresClone:1773290 (SEQ ID NO:2654) with homologous and/or orthologous amino acid sequences.

[0093] FIG. 22 is an alignment of the amino acid sequence corresponding to CeresClone:1775942 (SEQ ID NO:1137) with homologous and/or orthologous amino acid sequences.

[0094] FIG. 23 is an alignment of the amino acid sequence of ME30365 corresponding to CeresClone:1777248 (SEQ ID NO:2466) with homologous and/or orthologous amino acid sequences.

[0095] FIG. 24 is an alignment of the amino acid sequence of ME29764 corresponding to CeresClone:1781320 (SEQ ID NO:1107) with homologous and/or orthologous amino acid sequences.

[0096] FIG. 25 is an alignment of the amino acid sequence corresponding to CeresClone:1788006 (SEQ ID NO:1946) with homologous and/or orthologous amino acid sequences.

[0097] FIG. 26 is an alignment of the amino acid sequence of ME31183 corresponding to CeresClone:1788124 (SEQ ID NO:1054) with homologous and/or orthologous amino acid sequences.

[0098] FIG. 27 is an alignment of the amino acid sequence of ME30345 corresponding to CeresClone:1788820 (SEQ ID NO:115) with homologous and/or orthologous amino acid sequences.

[0099] FIG. 28 is an alignment of the amino acid sequence of ME29970 corresponding to CeresClone:1789564 (SEQ ID NO:2708) with homologous and/or orthologous amino acid sequences.

[0100] FIG. 29 is an alignment of the amino acid sequence of ME28415 corresponding to CeresClone:1789593 (SEQ ID NO:1481) with homologous and/or orthologous amino acid sequences.

[0101] FIG. 30 is an alignment of the amino acid sequence of ME29777 corresponding to CeresClone:1790340 (SEQ ID NO:2748) with homologous and/or orthologous amino acid sequences.

[0102] FIG. 31 is an alignment of the amino acid sequence of ME28947 corresponding to CeresClone:1790811 (SEQ ID NO:947) with homologous and/or orthologous amino acid sequences.

[0103] FIG. 32 is an alignment of the amino acid sequence of ME28309 corresponding to CeresClone:1792586 (SEQ ID NO:1727) with homologous and/or orthologous amino acid sequences.

[0104] FIG. 33 is an alignment of the amino acid sequence of ME27658 corresponding to CeresClone:1794784 (SEQ ID NO:2146) with homologous and/or orthologous amino acid sequences.

[0105] FIG. 34 is an alignment of the amino acid sequence of ME27043 corresponding to CeresClone:1797459 (SEQ ID NO:2619) with homologous and/or orthologous amino acid sequences.

[0106] FIG. 35 is an alignment of the amino acid sequence corresponding to CeresClone:1801750 (SEQ ID NO:211) with homologous and/or orthologous amino acid sequences.

[0107] FIG. 36 is an alignment of the amino acid sequence of ME26515 corresponding to CeresClone:1804242 (SEQ ID NO:629) with homologous and/or orthologous amino acid sequences.

[0108] FIG. 37 is an alignment of the amino acid sequence corresponding to CeresClone:1806608 (SEQ ID NO:2544) with homologous and/or orthologous amino acid sequences.

[0109] FIG. 38 is an alignment of the amino acid sequence corresponding to CeresClone:1809393 (SEQ ID NO:2599) with homologous and/or orthologous amino acid sequences.

[0110] FIG. 39 is an alignment of the amino acid sequence of ME25694 corresponding to CeresClone:1815770 (SEQ ID NO:2437) with homologous and/or orthologous amino acid sequences.

[0111] FIG. 40 is an alignment of the amino acid sequence corresponding to CeresClone:1817100 (SEQ ID NO:2090) with homologous and/or orthologous amino acid sequences.

[0112] FIG. 41 is an alignment of the amino acid sequence corresponding to CeresClone:1821162 (SEQ ID NO:2323) with homologous and/or orthologous amino acid sequences.

[0113] FIG. 42 is an alignment of the amino acid sequence of ME27358 corresponding to CeresClone:1824159 (SEQ ID NO:2) with homologous and/or orthologous amino acid sequences.

[0114] FIG. 43 is an alignment of the amino acid sequence corresponding to CeresClone:1830065 (SEQ ID NO:2028) with homologous and/or orthologous amino acid sequences.

[0115] FIG. 44 is an alignment of the amino acid sequence of ME30392 corresponding to CeresClone:1900097 (SEQ ID NO:1569) with homologous and/or orthologous amino acid sequences.

[0116] FIG. 45 is an alignment of the amino acid sequence corresponding to CeresClone:1902646 (SEQ ID NO:501) with homologous and/or orthologous amino acid sequences.

[0117] FIG. 46 is an alignment of the amino acid sequence of ME30330 corresponding to CeresClone:1955550 (SEQ ID NO:2190) with homologous and/or orthologous amino acid sequences.

[0118] FIG. 47 is an alignment of the amino acid sequence of ME29626 corresponding to CeresClone:1955766 (SEQ ID NO:749) with homologous and/or orthologous amino acid sequences.

[0119] FIG. 48 is an alignment of the amino acid sequence of ME30683 corresponding to CeresClone:2010191 (SEQ ID NO:79) with homologous and/or orthologous amino acid sequences.

[0120] FIG. 49 is an alignment of the amino acid sequence of ME30110 corresponding to CeresClone:2014404 (SEQ ID NO:284) with homologous and/or orthologous amino acid sequences.

[0121] FIG. 50 is an alignment of the amino acid sequence corresponding to CeresClone:1872280 (SEQ ID NO:2915) with homologous and/or orthologous amino acid sequences.

### DETAILED DESCRIPTION

[0122] The invention features methods and materials related to modulating biomass levels in plants. In some embodiments, the plants may also have modulated levels of, for example, lignin, modified root architecture, modified herbicide resistance, modified carotenoid biosynthesis, or modulated cell wall content. The methods can include transforming a plant cell with a nucleic acid encoding a biomass-modulating polypeptide, wherein expression of the polypeptide results in a modulated level of biomass. Plant cells produced using such methods can be grown to produce plants having an increased or decreased biomass. Such plants, and the seeds of such plants, may be used to produce, for example, biomass having an increased value as a biofuel feedstock.

### I. Definitions

[0123] “Amino acid” refers to one of the twenty biologically occurring amino acids and to synthetic amino acids, including D/L optical isomers.

[0124] “Biomass” refers to plant-derived organic matter. Biomass includes plant matter derived from herbaceous and woody energy crops, agricultural food and feed crops, agricultural crop wastes and residues, wood wastes and residues, aquatic plants, and other plant-derived materials including some municipal wastes. Biomass is a heterogeneous and chemically complex renewable resource.

[0125] “Biomass component” refers to a component found in a plant such as glucan, xylan, fermentable sugars, arabinan, sucrose, lignin, protein, ash, and extractives.

[0126] “Carbohydrate material” refers to carbon polymers found in biomass, such as glucans, arabinans, xylans, and pectins.

[0127] “Cellulose” refers to a glucan polysaccharide, i.e., a glucose polymer with β-1,4-glycosidic linkages. The β-linkages in cellulose form linear chains that are highly stable and resistant to chemical attack because of the high degree of hydrogen bonding that can occur between chains of cellulose. Hydrolysis of cellulose results in the production of cellobiose, C₁₂H₂₂O₁₁, and the monosaccharide glucose, C₆H₁₂O₆. Cellulose is the principal carbohydrate constituent of wood and other biomass.

[0128] “Cell type-preferential promoter” or “tissue-preferential promoter” refers to a promoter that drives expression preferentially in a target cell type or tissue, respectively, but may also lead to some transcription in other cell types or tissues as well.

[0129] “Control plant” refers to a plant that does not contain the exogenous nucleic acid present in a transgenic plant of interest, but otherwise has the same or similar genetic background as such a transgenic plant. A suitable control plant can be a non-transgenic wild type plant, a non-transgenic segregant from a transformation experiment, or a transgenic plant that contains an exogenous nucleic acid other than the exogenous nucleic acid of interest.

[0130] “Domains” are groups of substantially contiguous amino acids in a polypeptide that can be used to characterize protein families and/or parts of proteins. Such domains have a “fingerprint” or “signature” that can comprise conserved primary sequence, secondary structure, and/or three-dimensional conformation. Generally, domains are correlated with specific in vitro and/or in vivo activities. A domain can have a length of from 10 amino acids to 400 amino acids, e.g., 10 to 50 amino acids, or 25 to 100 amino acids, or 35 to 65 amino acids, or 35 to 55 amino acids, or 45 to 60 amino acids, or 200 to 300 amino acids, or 300 to 400 amino acids.

[0131] “Down-regulation” refers to regulation that decreases production of expression products (mRNA, polypeptide, or both) relative to basal or native states.

[0132] “Exogenous” with respect to a nucleic acid indicates that the nucleic acid is part of a recombinant nucleic acid construct, or is not in its natural environment. For example, an exogenous nucleic acid can be a sequence from one species introduced into another species, i.e., a heterologous nucleic acid. Typically, such an exogenous nucleic acid is introduced into the other species via a recombinant nucleic acid construct. An exogenous nucleic acid can also be a sequence that is native to an organism and that has been reintroduced into cells of that organism. An exogenous nucleic acid that includes a native sequence can often be distinguished from the naturally occurring sequence by the presence of non-natural sequences linked to the exogenous nucleic acid, e.g., non-native regulatory sequences flanking a native sequence in a recombinant nucleic acid construct. In addition, stably transformed exogenous nucleic acids typically are integrated at positions other than the position where the native sequence is found. It will be appreciated that an exogenous nucleic acid may have been introduced into a progenitor and not into the cell under consideration. For example, a transgenic plant containing an exogenous nucleic acid can be the progeny of a cross between a stably transformed plant and a non-transgenic plant. Such progeny are considered to contain the exogenous nucleic acid.

[0133] “Expression” refers to the process of converting genetic information of a polynucleotide into RNA through transcription, which is catalyzed by an enzyme, RNA polymerase, and into protein, through translation of mRNA on ribosomes.

[0134] “Glucan,” “Xylan” and “Arabinan” refer to the anhydro forms of glucose, xylose and arabinose that are found in cellulose and hemicellulose carbohydrate polymers. Thus, for example, “glucan” refers to a polysaccharide of D-glucose monomers linked by glycosidic bonds. The following are glucans: cellulose (β-1,4-glucan), dextran (α-1,6-glucan) and starch (α-1,4- and α-1,6-glucan).

[0135] “Hemicellulose” is a general term used to refer to cell wall polysaccharides that are not celluloses or pectins. Hemicelluloses contain repeating monomeric units of a five-carbon sugar (usually D-xylose or L-arabinose) and/or a six-carbon sugar (D-galactose, D-glucose, and D-mannose). See, U.S. Pat. No. 7,112,429. Hemicelluloses typically are shorter in length than cellulose and are highly branched. Xylan is often the structural backbone of hemicelluloses from hardwoods and grasses, and hydrolysis of these biomass types releases products high in the five-carbon sugar, xylose. Hemicelluloses from softwoods are most commonly gluco-galacto-mannans, which have a mannan backbone and yield mannose as the main product of hydrolysis. Hemicelluloses often contain side groups such as acetyl groups, uronic acids and ferulates.

[0136] “Heterologous polypeptide” as used herein refers to a polypeptide that is not a naturally occurring polypeptide in a plant cell, e.g., a transgenic Panicum virgatum plant transformed with and expressing the coding sequence for a nitrogen transporter polypeptide from a Zea mays plant.

[0137] “Isolated nucleic acid” as used herein includes a naturally-occurring nucleic acid, provided one or both of the sequences immediately flanking that nucleic acid in its naturally-occurring genome is removed or absent. Thus, an isolated nucleic acid includes, without limitation, a nucleic acid that exists as a purified molecule or a nucleic acid molecule that is incorporated into a vector or a virus. A nucleic acid existing among hundreds to millions of other nucleic acids within, for example, cDNA libraries, genomic libraries, or gel slices containing a genomic DNA restriction digest, is not to be considered an isolated nucleic acid.

[0138] “Lignin” refers to a polyphenolic polymeric substance of plant cells, with a complex, cross-linked, highly aromatic structure. Lignin is synthesized in plants principally from coniferyl alcohol (C₁₀H₁₂O₃) by extensive condensation polymerization. Lignin is the major noncarbohydrate structural constituent of plant cells in woody species.

[0139] “Modulation” of the level of biomass refers to the change in the level of the biomass that is observed as a result of expression of, or transcription from, an exogenous nucleic acid in a plant cell and/or plant. The change in level is measured relative to the corresponding level in control plants.

[0140] “NIR Model” refers to a series of validated mathematical equations that predict the chemical composition of a sample, based on NIR spectral data from the sample. The term also refers to a series of validated mathematical equations that predict saccharification conversion efficiency of a sample, based on NIR spectral data from the sample. In the case of saccharification conversion efficiency, a different NIR model is developed for each combination of pretreatment conditions and enzyme(s). NIR spectral data typically is obtained from the sample at a plurality of different wavelengths, and the mathematical equations are applied to the spectral data to calculate the predicted value. The calibration equations can be derived by regression among spectroscopic data for feedstock samples of the same type, e.g., by multiple-linear regression, by partial least squares, or by neural network analysis.

[0141] “Nucleic acid” and “polynucleotide” are used interchangeably herein, and refer to both RNA and DNA, including cDNA, genomic DNA, synthetic DNA, and DNA or RNA containing nucleic acid analogs. A nucleic acid can be double-stranded or single-stranded (i.e., a sense strand or an antisense strand). Non-limiting examples of polynucleotides include genes, gene fragments, exons, introns, messenger RNA (mRNA), transfer RNA, ribosomal RNA, siRNA, micro-RNA, ribozymes, cDNA, recombinant polynucleotides, branched polynucleotides, nucleic acid probes and nucleic acid primers. A polynucleotide may contain unconventional or modified nucleotides.

[0142] “Operably linked” refers to the positioning of a regulatory region and a sequence to be transcribed in a nucleic acid so that the regulatory region is effective for regulating transcription or translation of the sequence. For example, to operably link a coding sequence and a regulatory region, the translation initiation site of the translational reading frame of the coding sequence is typically positioned between one and about fifty nucleotides downstream of the regulatory region. A regulatory region can, however, be positioned as much as about 5,000 nucleotides upstream of the translation initiation site, or about 2,000 nucleotides upstream of the transcription start site.

[0143] “Pectin” refers to a polysaccharide having a backbone of α-(1-4)-linked D-galacturonic acid residues, with regions of 1,2-linked L-rhamnose. Side chains containing arabinose, xylose and galactose are present depending on the source material. Polygalacturonans, rhamnogalacturonans and some arabinans, galactans and arabinogalactans are pectins. Pectins are typically found in the middle lamella and primary wall of plant cells.

[0144] “Polypeptide” as used herein refers to a compound of two or more subunit amino acids, amino acid analogs, or other peptidomimetics, regardless of post-translational modification, e.g., phosphorylation or glycosylation. The subunits may be linked by peptide bonds or other bonds such as, for example, ester or ether bonds. Full-length polypeptides, truncated polypeptides, point mutants, insertion mutants, splice variants, chimeric proteins, and fragments thereof are encompassed by this definition.

[0145] “Progeny” includes descendants of a particular plant or plant line. Progeny of an instant plant include seeds formed on F₁, F₂, F₃, F₄, F₅, F₆ and subsequent generation plants, or seeds formed on BC₁, BC₂, BC₃, and subsequent generation plants, or seeds formed on F₁BC₁, F₁BC₂, F₁BC₃, and subsequent generation plants. The designation F₁ refers to the progeny of a cross between two parents that are genetically distinct. The designations F₂, F₃, F₄, F₅ and F₆ refer to subsequent generations of self- or sib-pollinated progeny of an F₁ plant.

[0146] “Regulatory region” refers to a nucleic acid having nucleotide sequences that influence transcription or translation initiation and rate, and stability and/or mobility of a transcription or translation product. Regulatory regions include, without limitation, promoter sequences, enhancer sequences, response elements, protein recognition sites, inducible elements, protein binding sequences, 5′ and 3′ untranslated regions (UTRs), transcriptional start sites, termination sequences, polyadenylation sequences, introns, and combinations thereof. A regulatory region typically comprises at least a core (basal) promoter. A regulatory region also may include at least one control element, such as an enhancer sequence, an upstream element or an upstream activation region (UAR). For example, a suitable enhancer is a cis-regulatory element (−212 to −154) from the upstream region of the octopine synthase (ocs) gene. Fromm et al., The Plant Cell, 1:977-984 (1989).

[0147] “Up-regulation” refers to regulation that increases the level of an expression product (mRNA, polypeptide, or both) relative to basal or native states.

[0148] “Vector” refers to a replicon, such as a plasmid, phage, or cosmid, into which another DNA segment may be inserted so as to bring about the replication of the inserted segment. Generally, a vector is capable of replication when associated with the proper control elements. The term “vector” includes cloning and expression vectors, as well as viral vectors and integrating vectors. An “expression vector” is a vector that includes a regulatory region.

### II. Polypeptides

[0149] Polypeptides described herein include biomass-modulating polypeptides. Biomass-modulating polypeptides can be effective to modulate biomass levels when expressed in a plant or plant cell. Such polypeptides typically contain at least one domain indicative of biomass-modulating polypeptides, as described in more detail herein. biomass-modulating polypeptides typically have an HMM bit score that is greater than 93 as described in more detail herein. In some embodiments, biomass-modulating polypeptides have greater than 80% identity to SEQ ID NOs: 2, 4, 5, 6, 8, 10, 12, 13, 15, 17, 18, 20, 22, 24, 25, 26, 27, 29, 30, 32, 34, 35, 37, 38, 39, 41, 43, 45, 47, 49, 51, 53, 55, 56, 57, 59, 60, 62, 63, 64, 65, 67, 69, 70, 71, 73, 74, 75, 77, 79, 80, 81, 82, 83, 84, 85, 86, 88, 90, 91, 92, 93, 94, 95, 96, 97, 98, 99, 100, 101, 102, 103, 104, 105, 106, 107, 108, 109, 110, 111, 112, 113, 115, 117, 119, 120, 121, 122, 123, 124, 126, 128, 129, 131, 133, 135, 137, 139, 140, 141, 142, 144, 146, 147, 148, 149, 150, 152, 154, 155, 157, 158, 160, 162, 163, 165, 167, 169, 171, 173, 175, 176, 178, 180, 182, 183, 185, 187, 189, 191, 193, 194, 195, 196, 197, 198, 199, 200, 201, 203, 205, 207, 208, 209, 211, 213, 214, 215, 217, 218, 219, 220, 222, 223, 224, 226, 228, 229, 231, 232, 233, 234, 235, 236, 237, 238, 239, 240, 242, 244, 245, 246, 247, 248, 249, 250, 251, 252, 254, 255, 256, 257, 258, 259, 260, 261, 262, 263, 264, 265, 266, 267, 268, 269, 270, 271, 272, 273, 274, 275, 276, 277, 278, 279, 281, 282, 284, 286, 287, 288, 289, 291, 293, 294, 295, 297, 299, 300, 302, 304, 306, 307, 308, 310, 311, 313, 315, 316, 317, 318, 319, 320, 322, 324, 326, 328, 330, 331, 333, 335, 337, 338, 340, 342, 343, 345, 346, 347, 349, 350, 351, 353, 354, 355, 357, 358, 360, 362, 363, 364, 365, 367, 369, 370, 371, 372, 373, 374, 375, 377, 378, 379, 380, 382, 383, 384, 385, 386, 387, 389, 390, 391, 393, 395, 396, 398, 400, 401, 403, 404, 406, 408, 409, 410, 411, 412, 414, 415, 417, 419, 420, 421, 422, 423, 424, 425, 426, 427, 428, 429, 430, 431, 432, 433, 434, 435, 436, 437, 438, 439, 440, 441, 442, 443, 444, 445, 446, 447, 448, 449, 450, 451, 452, 453, 454, 456, 457, 459, 461, 462, 464, 466, 467, 468, 469, 470, 472, 474, 475, 477, 479, 480, 482, 483, 484, 485, 487, 488, 489, 490, 491, 492, 493, 494, 495, 497, 499, 501, 502, 503, 504, 506, 507, 509, 510, 511, 512, 514, 515, 516, 517, 518, 520, 522, 524, 526, 528, 530, 531, 532, 533, 534, 535, 536, 537, 538, 539, 540, 542, 543, 545, 546, 547, 548, 550, 551, 553, 554, 555, 557, 559, 560, 562, 563, 565, 566, 568, 570, 572, 573, 575, 576, 577, 579, 580, 581, 582, 583, 584, 585, 586, 587, 589, 590, 591, 592, 593, 595, 596, 597, 598, 599, 601, 602, 604, 605, 607, 609, 610, 611, 612, 613, 614, 615, 616, 617, 618, 619, 620, 621, 622, 623, 624, 625, 626, 627, 629, 631, 633, 634, 635, 36, 637, 638, 640, 642, 644, 646, 648, 650, 651, 653, 654, 655, 656, 657, 658, 659, 660, 662, 663, 664, 665, 666, 667, 669, 671, 672, 674, 676, 677, 679, 680, 682, 684, 685, 687, 689, 690, 691, 693, 694, 696, 697, 698, 00, 702, 704, 705, 706, 707, 709, 710, 712, 714, 715, 717, 718, 719, 720, 721, 722, 723, 725, 726, 727, 728, 730, 731, 732, 733, 734, 735, 737, 739, 741, 743, 744, 745, 746, 747, 749, 751, 752, 753, 755, 757, 759, 760, 762, 764, 766, 768, 770, 772, 773, 775, 776, 778, 780, 782, 784, 786, 788, 789, 791, 793, 794, 795, 796, 798, 800, 801, 802, 804, 805, 807, 809, 811, 813, 815, 817, 819, 820, 822, 823, 824, 825, 827, 828, 830, 832, 834, 836, 838, 840, 842, 843, 844, 846, 848, 849, 850, 851, 853, 855, 856, 857, 858, 860, 861, 863, 864, 866, 868, 870, 871, 873, 874, 876, 878, 880, 882, 883, 885, 887, 889, 890, 892, 893, 895, 896, 897, 899, 901, 902, 903, 905, 907, 908, 909, 910, 912, 914, 915, 916, 917, 919, 921, 923, 925, 926, 928, 930, 932, 934, 935, 936, 937, 939, 941, 943, 945, 947, 949, 950, 952, 953, 955, 957, 959, 960, 962, 964, 965, 967, 968, 970, 972, 974, 976, 978, 980, 981, 983, 985, 86, 87, 989, 991, 993, 995, 997, 998, 1000, 1002, 1003, 1005, 1007, 1008, 1009, 1011, 1013, 1014, 1016, 1018, 1020, 1022, 1023, 1024, 1025, 1026, 1027, 1029, 1031, 1033, 1034, 1036, 1038, 1039, 1041, 1042, 1043, 1044, 1045, 1046, 1048, 1049, 1050, 1051, 1052, 1054, 1056, 1058, 1060, 1061, 1062, 1064, 1066, 1067, 1069, 1070, 1071, 1072, 1074, 1076, 1077, 1078, 1079, 1081, 1083, 1085, 1087, 1088, 1090, 1092, 1093, 1095, 1096, 1097, 1099, 1101, 1102, 1104, 1105, 1107, 1108, 1110, 1111, 1112, 1113, 1114, 1115, 1117, 1119, 1120, 1121, 1122, 1124, 1126, 1128, 1130, 1132, 1133, 1135, 1137, 1139, 1141, 1142, 1144, 1146, 1148, 1150, 1152, 1154, 1156, 1157, 1158, 1160, 1162, 1164, 1166, 1168, 1169, 1171, 1173, 1175, 1176, 1177, 1179, 1180, 1181, 1183, 1185, 1187, 1188, 1190, 1192, 1193, 1194, 1196, 1198, 1200, 1201, 1203, 1205, 1207, 1209, 1210, 1212, 1214, 1216, 1218, 1219, 1221, 1222, 1224, 1226, 1228, 1230, 1232, 1234, 1235, 1236, 1238, 1240, 1241, 1243, 1245, 1247, 1249, 1251, 1252, 1253, 1255, 1257, 1259, 1261, 1263, 1265, 1266, 1268, 1270, 1272, 1274, 1276, 1278, 1279, 1281, 1283, 1285, 1287, 1289, 1291, 1293, 1294, 1296, 1297, 1299, 1300, 1302, 1304, 1306, 1308, 1309, 1310, 1312, 1313, 1314, 1316, 1318, 1320, 1322, 1324, 1325, 1326, 1328, 1329, 1330, 1332, 1333, 1334, 1336, 1338, 1339, 1340, 1341, 1342, 1343, 1344, 1345, 1347, 1349, 1350, 1352, 1353, 1355, 1357, 1358, 1359, 1360, 1361, 1363, 1364, 1366, 1367, 1369, 1370, 1371, 1372, 1373, 1375, 1376, 1377, 1379, 1380, 1381, 1382, 1384, 1386, 1388, 1389, 1391, 1393, 1395, 1397, 1399, 1401, 1402, 1403, 1405, 1407, 1409, 1410, 1412, 1414, 1416, 1418, 1420, 1421, 1422, 1424, 1426, 1428, 1429, 1431, 1433, 1435, 1437, 1439, 1440, 1441, 1443, 1445, 1446, 1448, 1450, 1452, 1454, 1456, 1457, 1459, 1461, 1463, 1465, 1467, 1469, 1471, 1473, 1475, 1477, 1479, 1481, 1482, 1483, 1485, 1486, 1488, 1489, 1490, 1492, 1493, 1495, 1497, 1498, 1500, 1502, 1503, 1505, 1506, 1507, 1508, 1509, 1511, 1512, 1514, 1515, 1516, 1518, 1520, 1522, 1523, 1524, 1525, 1526, 1528, 1529, 1531, 1533, 1534, 1535, 1537, 1538, 1540, 1542, 1544, 1546, 1547, 1549, 1550, 1552, 1554, 1555, 1557, 1558, 1560, 1562, 1563, 1564, 1565, 1568, 1569, 1571, 1572, 1574, 1575, 1577, 1578, 1580, 1581, 1583, 1584, 1586, 1588, 1589, 1591, 1593, 1594, 1595, 1596, 1598, 1599, 1600, 1602, 1603, 1604, 1605, 1607, 1609, 1611, 1612, 1613, 1615, 1616, 1618, 1619, 1621, 1622, 1624, 1626, 1628, 1629, 1630, 1632, 1634, 1636, 1637, 1639, 1640, 1642, 1644, 1646, 1647, 1648, 1649, 1650, 1652, 1654, 1656, 1657, 1658, 1660, 1661, 1662, 1664, 1666, 1668, 1669, 1670, 1671, 1672, 1674, 1676, 1677, 1679, 1680, 1681, 1682, 1683, 1684, 1686, 1688, 1689, 1691, 1693, 1695, 1697, 1699, 1700, 1701, 1702, 1704, 1705, 1706, 1707, 1708, 1710, 1711, 1712, 1713, 1714, 1715, 1717, 1719, 1721, 1723, 1724, 1725, 1727, 1729, 1731, 1732, 1734, 1735, 1737, 1739, 1741, 1743, 1745, 1746, 1747, 1749, 1751, 1753, 1755, 1757, 1758, 1759, 1761, 1762, 1764, 1765, 1766, 1767, 1769, 1770, 1772, 1773, 1774, 1776, 1777, 1779, 1781, 1783, 1784, 1786, 1788, 1790, 1792, 1794, 1795, 1797, 798, 1799, 1801, 1803, 1804, 1805, 1806, 1807, 1808, 1809, 1810, 1811, 1812, 1813, 1815, 1816, 1817, 1819, 1821, 1822, 1823, 1825, 1826, 1827, 1828, 1829, 1831, 1833, 1834, 1835, 1837, 1839, 1841, 1842, 1844, 1845, 1847, 1849, 1850, 1852, 1853, 1854, 1855, 1856, 1857, 1858, 1859, 1861, 1863, 1865, 1866, 1867, 1869, 1871, 1872, 1874, 1876, 1877, 1879, 1881, 1882, 1883, 1885, 1887, 1889, 1891, 1893, 1894, 1895, 1897, 1898, 1900, 1902, 1903, 1904, 1906, 1908, 1910, 1912, 1913, 1915, 1917, 1918, 1919, 1920, 1922, 1924, 1926, 1928, 1929, 1931, 1933, 1935, 1936, 1938, 1940, 1942, 1944, 1946, 1948, 1949, 1951, 1953, 1955, 1957, 1959, 1961, 1963, 1965, 1967, 1969, 1971, 1972, 1973, 1974, 1975, 1976, 1978, 1979, 1980, 1982, 1983, 1985, 1986, 1987, 1989, 1990, 1992, 1994, 1996, 1997, 1999, 2000, 2002, 2003, 2005, 2007, 2008, 2009, 2010, 2011, 2013, 2015, 2016, 2017, 2018, 2019, 2021, 2022, 2023, 2024, 2026, 2028, 2030, 2031, 2032, 2034, 2036, 2037, 2038, 2040, 2041, 2042, 2043, 2044, 2046, 2047, 2048, 2049, 2051, 2053, 2055, 2056, 2058, 2060, 2062, 2064, 2066, 2067, 2069, 2070, 2072, 2073, 2074, 2075, 2076, 2077, 2078, 2079, 2081, 2083, 2085, 2087, 2088, 2090, 2091, 2092, 2093, 2095, 2097, 2098, 2100, 2102, 2104, 2105, 2106, 2108, 2110, 2112, 2113, 2115, 2117, 2118, 2119, 2120, 2121, 2122, 2124, 2126, 2128, 2129, 2130, 2132, 2133, 2135, 2136, 2137, 2138, 2140, 2141, 2142, 2143, 2144, 2146, 2148, 2149, 2150, 2151, 2152, 2153, 2154, 2156, 2158, 2159, 2160, 2161, 2162, 2163, 2165, 2167, 2169, 2170, 2171, 2172, 2173, 2174, 2175, 2176, 2177, 2178, 2179, 2181, 2183, 2184, 2186, 2187, 2188, 2190, 2192, 2194, 2195, 2196, 2197, 2198, 2199, 2200, 2201, 2202, 2203, 2205, 2207, 2209, 2211, 2213, 2215, 2217, 2219, 2221, 2223, 2225, 2226, 2228, 2229, 2231, 2233, 2235, 2236, 2237, 2238, 2239, 2240, 2241, 2243, 2244, 2246, 2248, 2250, 2251, 2253, 2255, 2257, 2259, 2261, 2262, 2264, 2265, 2267, 2269, 2270, 2272, 2273, 2275, 2276, 2278, 2279, 2281, 2282, 2284, 2285, 2286, 2288, 2289, 2291, 2293, 2295, 2296, 2297, 2298, 2299, 2300, 2302, 2304, 2306, 2307, 2309, 2310, 2312, 2313, 2314, 2315, 2316, 2317, 2318, 2320, 2321, 2323, 2325, 2327, 2329, 2330, 2332, 2334, 2335, 2337, 2339, 2341, 2343, 2345, 2346, 2347, 2348, 2350, 2352, 2354, 2356, 2357, 2358, 2360, 2361, 2362, 2364, 2366, 2367, 2369, 2371, 2373, 2375, 2376, 2378, 2380, 2381, 2383, 2384, 2386, 2388, 2390, 2391, 2392, 2394, 2396, 2397, 2399, 2401, 2402, 2403, 2405, 2407, 2408, 2409, 2411, 2413, 2415, 2417, 2418, 2419, 2421, 2422, 2423, 2424, 2425, 2427, 2428, 2429, 2430, 2432, 2434, 2435, 2437, 2439, 2440, 2441, 2442, 2443, 2445, 2446, 2448, 2449, 2451, 2452, 2454, 2456, 2457, 2458, 2459, 2460, 2461, 2462, 2463, 2464, 2466, 2468, 2469, 2470, 2471, 2472, 2474, 2475, 2476, 2477, 2478, 2480, 2482, 2483, 2484, 2485, 2486, 2487, 2488, 2489, 2490, 2491, 2493, 2494, 2495, 2496, 2497, 2498, 2499, 2500, 2502, 2503, 2505, 2506, 2507, 2509, 2510, 2511, 2512, 2513, 2514, 2516, 2517, 2518, 2519, 2521, 2522, 2523, 2525, 2527, 2529, 2530, 2531, 2533, 2535, 2537, 2539, 2540, 2541, 2542, 2544, 2546, 2547, 2548, 2550, 2551, 2552, 2554, 2556, 2557, 2558, 2559, 2561, 2562, 2564, 2565, 2567, 2569, 2571, 2572, 2573, 2574, 2575, 2576, 2578, 2580, 2581, 2583, 2584, 2585, 2587, 2588, 2589, 2590, 2592, 2593, 2594, 2595, 2597, 2599, 2601, 2603, 2604, 2606, 2608, 2609, 2611, 2612, 2614, 2615, 2616, 2617, 2619, 2621, 2623, 2624, 2626, 2627, 2628, 2629, 2631, 2632, 2634, 2636, 2638, 2640, 2641, 2642, 2644, 2646, 2647, 2648, 2649, 2650, 2652, 2654, 2656, 2658, 2659, 2661, 2663, 2665, 2667, 2668, 2670, 2672, 2674, 2675, 2677, 2679, 2681, 2683, 2685, 2687, 2689, 2691, 2693, 2695, 2697, 2699, 2701, 2703, 2704, 2706, 2708, 2710, 2711, 2712, 2714, 2716, 2717, 2719, 2721, 2722, 2724, 2726, 2728, 2730, 2732, 2734, 2735, 2736, 2738, 2739, 2740, 2741, 2743, 2745, 2746, 2748, 2750, 2751, 2753, 2754, 2756, 2758, 2760, 2762, 2764, 2766, 2768, 2770, 2771, 2772, 2773, 2775, 2777, 2778, 2780, 2781, 2782, 2784, 2786, 2788, 2790, 2791, 2792, 2794, 2796, 2797, 2799, 2801, 2802, 2803, 2804, 2806, 2807, 2809, 2810, 2811, 2813, 2815, 2816, 2818, 2819, 2821, 2822, 2823, 2825, 2826, 2828, 2830, 2832, 2833, 2835, 2836, 2838, 2840, 2842, 2844, 2845, 2846, 2847, 2849, 2850, 2851, 2852, 2853, 2855, 2856, 2857, 2858, 2859, 2861, 2862, 2863, 2864, 2866, 2867, 2868, 2869, 2870, 2872, 2873, 2875, 2876, 2877, 2878, 2880, 2882, 2883, 2885, 2886, 2888, 2890, 2891, 2892, 2893, 2894, 2896, 2898, 2900, 2902, 2903, 2904, 2906, 2907, 2908, 2909, 2910, 2911, 2915, 2917, 2918, 2919, 2920, 2921, 2922, 2923, 2924, or 2926, as described in more detail herein.

[0150] A. Domains Indicative of Biomass-Modulating Polypeptides

[0151] A biomass-modulating polypeptide can contain a Myb-like DNA-binding domain, which is predicted to be characteristic of a biomass-modulating polypeptide. SEQ ID NO:2880 sets forth the amino acid sequence of an Arabidopsis thaliana clone identified herein as CeresAnnot:831967 (SEQ ID NO:2879), which is predicted to encode a polypeptide containing a Myb-like DNA-binding domain. For example, a biomass-modulating polypeptide can comprise a Myb-like DNA-binding domain having 60 percent or greater sequence identity to residues 14 to 61 and 67 to 112 of SEQ ID NO:2880. In some embodiments, a biomass-modulating polypeptide can comprise a Myb-like DNA-binding domain having 60 percent or greater sequence identity to the Myb-like DNA-binding domain of one or more of the polypeptides set forth in SEQ ID NOs: 2880, 2882, 2883, 2885, 2886, 2888, 2890, 2891, 2892, 2893, 2894, 2896, 2898, 2900, 2902, 2903, 2904, 2906, 2907, 2908, 2909, 2910, 2911, or 2913. The Myb-like DNA-binding domains of such sequences are set forth in the Sequence Listing.

[0152] The amino acid sequence of a Myb-like DNA-binding domain is also set forth in SEQ ID NO:1137, the amino acid sequence encoded by the Panicum virgatum clone identified herein as CeresClone:1775942 (SEQ ID NO:1136). This sequence is predicted to encode a polypeptide containing a Myb-like DNA-binding domain. For example, a biomass-modulating polypeptide can comprise a Myb-like DNA-binding domain having 60 percent or greater sequence identity to residues 10 to 59 of SEQ ID NO:1137. In some embodiments, a biomass-modulating polypeptide can comprise a Myb-like DNA-binding domain having 60 percent or greater sequence identity to the Myb-like DNA-binding domain of one or more of the polypeptides set forth in SEQ ID NOs: 1137, 1139, 1141, 1142, 1144, 1146, 1148, 1150, 1152, 1154, 1156, 1157, 1158, 1160, 1162, 1164, 1166, 1168, 1169, 1171, 1173, 1175, 1176, 1177, 1179, 1180, 1181, 1183, 1185, 1187, 1188, 1190, 1192, 1193, 1194, 1196, 1198, 1200, 1201, 1203, 1205, 1207, 1209, 1210, 1212, 1214, 1216, 1218, 1219, 1221, 1222, 1224, 1226, 1228, 1230, 1232, 1234, 1235, 1236, 1238, 1240, 1241, 1243, 1245, 1247, 1249, 1251, 1252, 1253, 1255, 1257, 1259, 1261, 1263, 1265, 1266, 1268, or 1270. The Myb-like DNA-binding domains of such sequences are set forth in the Sequence Listing.

[0153] The amino acid sequence of a Myb-like DNA-binding domain is also set forth in SEQ ID NO:2619, the amino acid sequence encoded by the Panicum virgatum clone identified herein as CeresClone:1797459 (SEQ ID NO:2618). This amino acid sequence is predicted to encode a polypeptide containing a Myb-like DNA-binding domain. For example, a biomass-modulating polypeptide can comprise a Myb-like DNA-binding domain having 60 percent or greater sequence identity to residues 223 to 274 of SEQ ID NO:2619. In some embodiments, a biomass-modulating polypeptide can comprise a Myb-like DNA-binding domain having 60 percent or greater sequence identity to the Myb-like DNA-binding domain of one or more of the polypeptides set forth in SEQ ID NOs: 2619, 2621, 2623, 2624, 2626, 2627, 2628, 2629, 2631, 2632, 2634, 2636, 2638, 2640, 2641, 2642, 2644, 2646, 2647, 2648, 2649, 2650, or 2652. The Myb-like DNA-binding domains of such sequences are set forth in the Sequence Listing. The Myb-like DNA-binding domain family contains the DNA binding domains from Myb proteins, as well as the SANT domain family.

[0154] A biomass-modulating polypeptide can contain a K-box Domain, which is predicted to be characteristic of a biomass-modulating polypeptide. SEQ ID NO:403 sets forth the amino acid sequence of an Arabidopsis thaliana clone, identified herein as CeresClone:5055 (SEQ ID NO:402) that is predicted to encode a polypeptide containing a K-box domain. For example, a biomass-modulating polypeptide can comprise a K-box domain having 60 percent or greater sequence identity to residues 75 to 176 of SEQ ID NO:403. In some embodiments, a biomass-modulating polypeptide can comprise a K-box domain having 60 percent or greater sequence identity to the K-box domain of one or more of the polypeptides set forth in SEQ ID NOs: 403, 404, 406, 408, 409, 410, 411, 412, 414, 415, 417, 419, 420, 421, 422, 423, 424, 425, 426, 427, 428, 429, 430, 431, 432, 433, 434, 435, 436, 437, 438, 439, 440, 441, 442, 443, 444, 445, 446, 447, 448, 449, 450, 451, 452, 453, 454, 456, or 457. The K-box domains of such sequences are set forth in the Sequence Listing. The K-box is a possible coiled-coil structure commonly found associated with SRF-type transcription factors. Lupas et al. Science 252:1162-1164 (1991)

[0155] A biomass-modulating polypeptide can contain a SRF-type transcription factor (DNA binding and dimerisation domain) (SRF-TF) domain, which is predicted to be characteristic of a biomass-modulating polypeptide. SEQ ID NO:403 sets forth the amino acid sequence of an Arabidopsis thaliana clone, identified herein as CeresClone:5055 (SEQ ID NO:402) that is predicted to encode a polypeptide containing a SRF-TF domain. For example, a biomass-modulating polypeptide can comprise a SRF-TF domain having 60 percent or greater sequence identity to residues 9 to 59 of SEQ ID NO:403. In some embodiments, a biomass-modulating polypeptide can comprise a SRF-TF domain having 60 percent or greater sequence identity to the SRF-TF domain of one or more of the polypeptides set forth in SEQ ID NOs: 403, 404, 406, 408, 409, 410, 411, 412, 414, 415, 417, 419, 420, 421, 422, 423, 424, 425, 426, 427, 428, 429, 430, 431, 432, 433, 434, 435, 436, 437, 438, 439, 440, 441, 442, 443, 444, 445, 446, 447, 448, 449, 450, 451, 452, 453, 454, 456, or 457. The SRF-TF domains of such sequences are set forth in the Sequence Listing. SRF-TF has a core domain of around 90 amino acids that is sufficient for the activities of DNA-binding, dimerisation, and interaction with accessory factors. Within the core is a DNA-binding region, designated the MADS box, that is highly similar to eukaryotic regulatory proteins, such as the Agamous and Deficiens families of plant homeotic proteins. Proteins belonging to the MADS family function as dimmers, each subunit of which contributes an amphipathic alpha helix to form the anti-parallel coiled-coil DNA-binding element. The MADS-box domain is commonly associated with a K-box region.

[0156] A biomass-modulating polypeptide can contain a bZIP transcription factor domain (bZIP_{—}1). SEQ ID NO:669 sets forth the amino acid sequence of an Arabidopsis thaliana clone, identified herein as CeresClone:14432 (SEQ ID NO:668), which is predicted to encode a polypeptide containing a bZIP domain. For example, a biomass-modulating polypeptide can comprise a bZIP_{—}1 transcription factor domain having 60 percent or greater sequence identity to residues 68 to 122 of SEQ ID NO:669. In some embodiments, a biomass-modulating polypeptide can comprise a bZIP_{—}1 transcription factor domain having 60 percent or greater sequence identity to the bZIP_{—}1 transcription factor domain of one or more of the polypeptides set forth in SEQ ID NOs: 669, 671, 672, 674, 676, 677, 679, 680, 682, 684, 685, 687, 689, 690, or 691. The bZIP_{—}1 transcription factor domains of such sequences are set forth in the Sequence Listing. The basic-leucine zipper (bZIP) transcription factors of eukaryotic cells are proteins that contain a basic region mediating sequence-specific DNA-binding followed by a leucine zipper region required for dimerization.

[0157] A biomass-modulating polypeptide can contain a basic region leucine zipper domain (bZIP_{—}2). The domain is also present in SEQ ID NO:669, which sets forth the amino acid sequence of an Arabidopsis thaliana clone, identified herein as CeresClone:14432 (SEQ ID NO:668), that is predicted to encode a polypeptide containing a bZIP_{—}2 basic region leucine zipper. For example, a biomass-modulating polypeptide can comprise a bZIP_{—}2 basic region leucine zipper domain having 60 percent or greater sequence identity to residues 68 to 122 of SEQ ID NO:669. In some embodiments, a biomass-modulating polypeptide can comprise a bZIP_{—}2 basic region leucine zipper domain having 60 percent or greater sequence identity to the bZIP_{—}2 basic region leucine zipper domain of one or more of the polypeptides set forth in SEQ ID NOs: 669, 671, 672, 674, 676, 677, 679, 680, 682, 684, 685, 687, 689, 690, or 691. The bZIP_{—}2 basic region leucine zipper domains of such sequences are set forth in the Sequence Listing. The bZIP_{—}1 and bZIP_{—}2 families are members of the bZIP superfamily of eukaryotic transcription factors that contain a basic region adjacent to a leucine zipper.

[0158] A biomass-modulating polypeptide can contain KNOX1 domain. SEQ ID NO:1797 sets forth the amino acid sequence of an Arabidopsis thaliana clone, identified herein as CeresClone:21240 (SEQ ID NO:1796), that is predicted to encode a polypeptide containing KNOX1 domain. For example, a biomass-modulating polypeptide can comprise a KNOX1 domain having 60 percent or greater sequence identity to residues 157 to 201 of SEQ ID NO:1797. In some embodiments, a biomass-modulating polypeptide can comprise a KNOX1 domain having 60 percent or greater sequence identity to the KNOX1 domain of one or more of the polypeptides set forth in SEQ ID NOs: 1797, 1798, 1799, 1801, 1803, 1804, 1805, 1806, 1807, 1808, 1809, 1810, 1811, 1812, 1813, 1815, 1816, 1817, 1819, 1821, 1822, 1823, 1825, 1826, 1827, 1828, 1829, 1831, 1833, 1834, 1835, 1837, 1839, 1841, 1842, 1844, 1845, 1847, 1849, 1850, 1852, 1853, 1854, 1855, 1856, 1857, 1858, 1859, 1861, 1863, 1865, 1866, 1867, 1869, 1871, 1872, 1874, 1876, 1877, 1879, 1881, 1882, 1883, or 1885. The KNOX1 domains of such sequences are set forth in the Sequence Listing. KNOX1 plays a role in suppressing target gene expression. Nagasaki et al., Plant Cell, 13: 2085-2098 (2001).

[0159] A biomass-modulating polypeptide can contain KNOX2 domain. SEQ ID NO:1797 sets forth the amino acid sequence of an Arabidopsis thaliana clone, identified herein as CeresClone:21240 (SEQ ID NO:1796), that is predicted to encode a polypeptide containing KNOX2 domain. For example, a biomass-modulating polypeptide can comprise a KNOX2 domain having 60 percent or greater sequence identity to residues 213 to 268 of SEQ ID NO:1797. In some embodiments, a biomass-modulating polypeptide can comprise a KNOX2 domain having 60 percent or greater sequence identity to the KNOX2 domain of one or more of the polypeptides set forth in SEQ ID NOs: 1797, 1798, 1799, 1801, 1803, 1804, 1805, 1806, 1807, 1808, 1809, 1810, 1811, 1812, 1813, 1815, 1816, 1817, 1819, 1821, 1822, 1823, 1825, 1826, 1827, 1828, 1829, 1831, 1833, 1834, 1835, 1837, 1839, 1841, 1842, 1844, 1845, 1847, 1849, 1850, 1852, 1853, 1854, 1855, 1856, 1857, 1858, 1859, 1861, 1863, 1865, 1866, 1867, 1869, 1871, 1872, 1874, 1876, 1877, 1879, 1881, 1882, 1883, or 1885. The KNOX2 domains of such sequences are set forth in the Sequence Listing. Together, the KNOX 2 and KNOX1 domains form the MEINOX region, in which the KNOX2 domain appears to be required for homodimerization.

[0160] A biomass-modulating polypeptide can contain a Fasciclin Myb-like DNA-binding domain, which is predicted to be characteristic of a biomass-modulating polypeptide. SEQ ID NO:1518 sets forth the amino acid sequence of a Panicum virgatum clone identified herein as CeresClone:1724055 (SEQ ID NO:1517), which is predicted to encode a polypeptide containing a Fasciclin domain. For example, a biomass-modulating polypeptide can comprise a Fasciclin domain having 60 percent or greater sequence identity to residues 202 to 334 of SEQ ID NO:1518. In some embodiments, a biomass-modulating polypeptide can comprise a Fasciclin domain having 60 percent or greater sequence identity to the Fasciclin domain of one or more of the polypeptides set forth in SEQ ID NOs: 1518, 1520, 1522, 1523, 1524, 1525, 1526, 1528, 1529, 1531, 1533, 1534, 1535, 1537, 1538, 1540, 1542, 1544, 1546, 1547, 1549, 1550, 1552, 1554, 1555, 1557, 1558, 1560, 1562, 1563, 1564, 1565, or 1568. The Fasciclin domains of such sequences are set forth in the Sequence Listing. Fasciclin-like arabinogalactan proteins (FLAs) are a subclass of arabinogalactan proteins (AGPs) that have predicted AGP-like glycosylated regions and putative cell adhesion domains known as fasciclin domains. The putative role of FLAs as cell adhesion molecules suggests that they are vital components of the interactions that occur in the plant extracellular matrix.

[0161] A biomass-modulating polypeptide can contain an O-methyltransferase domain (Methyltransf_{—}2), which is predicted to be characteristic of a biomass-modulating polypeptide. SEQ ID NO: 717 sets forth the amino acid sequence of an Triticum aestivum clone, identified herein as CeresClone:570057 (SEQ ID NO:716), that is predicted to encode a polypeptide containing an O-methyltransferase domain. For example, a biomass-modulating polypeptide can comprise an O-methyltransferase domain having 60 percent or greater sequence identity to residues 31 to 82 of SEQ ID NO:717. In some embodiments, a biomass-modulating polypeptide can comprise an O-methyltransferase domain having 60 percent or greater sequence identity to the O-methyltransferase domain of one or more of the polypeptides set forth in SEQ ID NOs: 717, 718, 719, 720, 721, 722, 723, 725, 726, 727, 728, 730, 731, 732, 733, 734, 735, 737, 739, 741, 743, 744, 745, 746, or 747. The O-methyltransferase domains of such sequences are set forth in the Sequence Listing. This domain includes a range of O-methyltransferases that utilize S-adenosyl methionine as a substrate. Methyltransferases catalyze methyl transfer from S-adenosyl-L-methionine (AdoMet) to either nitrogen, oxygen, or carbon atoms and modify DNA, RNA, proteins, and small molecules (e.g., catechol). O-methyltransferases have a common catalytic domain structure, which might be universal among S-adenosyl-L-methionine (AdoMet)-dependent methyltransferases. The O-methyltransferase family is a member of Methyltransferase superfamily.

[0162] A biomass-modulating polypeptide can contain a Dimerisation domain, which is predicted to be characteristic of a biomass-modulating polypeptide. SEQ ID NO:717 sets forth the amino acid sequence of an Triticum aestivum clone, identified herein as CeresClone:570057 (SEQ ID NO:716), that is predicted to encode a polypeptide containing an Dimerisation domain. For example, a biomass-modulating polypeptide can comprise an Dimerisation domain having 60 percent or greater sequence identity to residues 91 to 255 of SEQ ID NO:717. In some embodiments, a biomass-modulating polypeptide can comprise an Dimerisation domain having 60 percent or greater sequence identity to the Dimerisation domain of one or more of the polypeptides set forth in SEQ ID NOs: 717, 718, 719, 720, 721, 722, 723, 725, 726, 727, 728, 730, 731, 732, 733, 734, 735, 737, 739, 741, 743, 744, 745, 746, or 747. The Dimerisation domains of such sequences are set forth in the Sequence Listing. This domain is found at the N-terminus of a variety of plant O-methyltransferases. The Dimerisation domain family is a member of the Helix-turn-helix (HTH) superfamily, which comprises a diverse range of DNA-binding domains.

[0163] A biomass-modulating polypeptide can contain an AP2 domain, which is predicted to be characteristic of a biomass-modulating polypeptide. SEQ ID NO:693 sets forth the amino acid sequence of a Glycine max clone, identified herein as CeresClone:691319 (SEQ ID NO:692) that is predicted to encode a polypeptide containing an AP2 domain. For example, a biomass-modulating polypeptide can comprise an AP2 domain having 60 percent or greater sequence identity to residues 32 to 83 of SEQ ID NO:693. In some embodiments, a biomass-modulating polypeptide can comprise an AP2 domain having 60 percent or greater sequence identity to the AP2 domain of one or more of the polypeptides set forth in SEQ ID NOs: 693, 694, 696, 697, 698, 700, 702, 704, 705, 706, 707, 709, 710, 712, 714, or 715. The AP2 domains of such sequences are set forth in the Sequence Listing. AP2 domain amino acid residues can bind to DNA and are typically found in transcription factor proteins.

[0164] A biomass-modulating polypeptide can contain an NAD dependent epimerase/dehydratase family domain (Epimerase), which is predicted to be characteristic of a biomass-modulating polypeptide. SEQ ID NO:1624 sets forth the amino acid sequence of a Panicum virgatum clone, identified herein as CeresClone:1724569 (SEQ ID NO:1623) which is predicted to encode a polypeptide containing an Epimerase domain. For example, a biomass-modulating polypeptide can comprise an Epimerase domain having 60 percent or greater sequence identity to residues 21 to 253 of SEQ ID NO:1624. In some embodiments, a biomass-modulating polypeptide can comprise an Epimerase domain having 60 percent or greater sequence identity to the Epimerase domain of one or more of the polypeptides set forth in SEQ ID NOs: 1624, 1626, 1628, 1629, 1630, 1632, 1634, 1636, 1637, 1639, 1640, 1642, 1644, 1646, 1647, 1648, 1649, 1650, 1652, 1654, 1656, 1657, or 1658. The Epimerase domains of such sequences are set forth in the Sequence Listing.

[0165] The amino acid sequence of an Epimerase domain is also set forth in SEQ ID NO:1054, the amino acid sequence encoded by the Panicum virgatum clone identified herein as CeresClone:1788124 (SEQ ID NO:1053). This sequence is predicted to encode a polypeptide containing an Epimerase domain. For example, a biomass-modulating polypeptide can comprise an Epimerase domain having 60 percent or greater sequence identity to residues 20 to 290 of SEQ ID NO:1054. In some embodiments, a biomass-modulating polypeptide can comprise an Epimerase domain having 60 percent or greater sequence identity to the Epimerase domain of one or more of the polypeptides set forth in SEQ ID NOs: 1054, 1056, 1058, 1060, 1061, 1062, 1064, 1066, 1067, 1069, 1070, 1071, 1072, 1074, 1076, 1077, 1078, 1079, 1081, 1083, 1085, 1087, 1088, 1090, 1092, 1093, 1095, 1096, 1097, 1099, 1101, 1102, 1104, or 1105. The Epimerase domains of such sequences are set forth in the Sequence Listing.

[0166] The amino acid sequence of an Epimerase domain is also set forth in SEQ ID NO:2708, the amino acid sequence encoded by the Panicum virgatum clone identified herein as CeresClone:1788124 (SEQ ID NO:2707). This sequence is predicted to encode a polypeptide containing an Epimerase domain. For example, a biomass-modulating polypeptide can comprise an Epimerase domain having 60 percent or greater sequence identity to residues 10 to 253 of SEQ ID NO:2708. In some embodiments, a biomass-modulating polypeptide can comprise an Epimerase domain having 60 percent or greater sequence identity to the Epimerase domain of one or more of the polypeptides set forth in SEQ ID NOs: 2708, 2710, 2711, 2712, 2714, 2716, 2717, 2719, 2721, 2722, 2724, 2726, 2728, 2730, 2732, 2734, 2735, 2736, 2738, 2739, 2740, 2741, 2743, 2745, or 2746. The Epimerase domains of such sequences are set forth in the Sequence Listing.

[0167] The amino acid sequence of an Epimerase domain is also set forth in SEQ ID NO:2090, the amino acid sequence encoded by the Panicum virgatum clone identified herein as CeresClone:1788124 (SEQ ID NO:2089). This sequence is predicted to encode a polypeptide containing an Epimerase domain. For example, a biomass-modulating polypeptide can comprise an Epimerase domain having 60 percent or greater sequence identity to residues 79 to 342 of SEQ ID NO:2090. In some embodiments, a biomass-modulating polypeptide can comprise an Epimerase domain having 60 percent or greater sequence identity to the Epimerase domain of one or more of the polypeptides set forth in SEQ ID NOs: 2090, 2091, 2092, 2093, 2095, 2097, 2098, 2100, 2102, 2104, 2105, 2106, 2108, 2110, 2112, 2113, 2115, 2117, 2118, 2119, 2120, 2121, 2122, 2124, 2126, 2128, 2129, 2130, 2132, 2133, 2135, 2136, 2137, 2138, 2140, 2141, 2142, 2143, or 2144. The Epimerase domains of such sequences are set forth in the Sequence Listing.

[0168] The amino acid sequence of an Epimerase domain is also set forth in SEQ ID NO:2323, the amino acid sequence encoded by the Panicum virgatum clone identified herein as CeresClone:1821162 (SEQ ID NO:2322). This sequence is predicted to encode a polypeptide containing an Epimerase domain. For example, a biomass-modulating polypeptide can comprise an Epimerase domain having 60 percent or greater sequence identity to residues 14 to 258 of SEQ ID NO:2323. In some embodiments, a biomass-modulating polypeptide can comprise an Epimerase domain having 60 percent or greater sequence identity to the Epimerase domain of one or more of the polypeptides set forth in SEQ ID NOs: 2323, 2325, 2327, 2329, 2330, 2332, 2334, 2335, 2337, 2339, 2341, 2343, 2345, 2346, 2347, 2348, 2350, 2352, 2354, 2356, 2357, 2358, 2360, 2361, 2362, 2364, 2366, 2367, 2369, 2371, 2373, 2375, 2376, 2378, 2380, 2381, 2383, 2384, 2386, 2388, 2390, 2391, 2392, 2394, 2396, 2397, 2399, 2401, 2402, 2403, 2405, 2407, 2408, 2409, 2411, 2413, 2415, 2417, 2418, 2419, 2421, 2422, 2423, 2424, 2425, 2427, 2428, 2429, 2430, 2432, 2434, or 2435. The Epimerase domains of such sequences are set forth in the Sequence Listing.

[0169] The amino acid sequence of an Epimerase domain is also set forth in SEQ ID NO:2028, the amino acid sequence encoded by the Panicum virgatum clone identified herein as CeresClone:1830065 (SEQ ID NO:2027). This sequence is predicted to encode a polypeptide containing an Epimerase domain. For example, a biomass-modulating polypeptide can comprise an Epimerase domain having 60 percent or greater sequence identity to residues 13 to 258 of SEQ ID NO:2028. In some embodiments, a biomass-modulating polypeptide can comprise an Epimerase domain having 60 percent or greater sequence identity to the Epimerase domain of one or more of the polypeptides set forth in SEQ ID NOs: 2028, 2030, 2031, 2032, 2034, 2036, 2037, 2038, 2040, 2041, 2042, 2043, 2044, 2046, 2047, 2048, 2049, 2051, 2053, 2055, 2056, 2058, 2060, 2062, 2064, 2066, 2067, 2069, 2070, 2072, 2073, 2074, 2075, 2076, 2077, 2078, 2079, 2081, 2083, 2085, 2087, or 2088. NAD dependent epimerase/dehydratase family is a member of the FAD/NAD(P)-binding Rossmann fold superfamily, which is characterized by redox enzymes having two domains. One domain, termed the catalytic domain, confers substrate specificity and the precise reaction of the enzyme. The other domain, which is common to this class of redox enzymes, is a Rossmann-fold domain. The Rossmann domain binds nicotinamide adenine dinucleotide (NAD+) and it is this cofactor that reversibly accepts a hydride ion, which is lost or gained by the substrate in the redox reaction. Rossmann domains have an alpha/beta fold, which has a central beta sheet, with approximately five alpha helices found surrounding the beta sheet. The inter sheet crossover of the stands in the sheet form the NAD+ binding site. Bashton and Chothia, J Mol Biol, 315:927-939 (2002).

[0170] The amino acid sequence of an X8 domain is also set forth in SEQ ID NO:1887, the amino acid sequence encoded by the Panicum virgatum clone identified herein as 1724782 (SEQ ID NO:1886). This sequence is predicted to encode a polypeptide containing an X8 domain. For example, a biomass-modulating polypeptide can comprise an X8 domain having 60 percent or greater sequence identity to residues 21 to 106 of SEQ ID NO:1887. In some embodiments, a biomass-modulating polypeptide can comprise an X8 domain having 60 percent or greater sequence identity to X8 domain of one or more of the polypeptides set forth in SEQ ID NOs: 1887, 1889, 1891, 1893, 1894, 1895, 1897, 1898, 1900, 1902, 1903, 1904, 1906, 1908, 1910, 1912, 1913, 1915, 1917, 1918, 1919, 1920, 1922, 1924, 1926, 1928, 1929, 1931, 1933, 1935, 1936, 1938, 1940, 1942, or 1944. The X8 domains of such sequences are set forth in the Sequence Listing.

[0171] The amino acid sequence of an X8 domain is also set forth in SEQ ID NO:2746, the amino acid sequence encoded by the Panicum virgatum clone identified herein as CeresClone:1790340 (SEQ ID NO:2747). This amino acid is predicted to encode a polypeptide containing an X8 domain. For example, a biomass-modulating polypeptide can comprise an X8 domain having 60 percent or greater sequence identity to residues 368 to 452 of SEQ ID NO:2748. In some embodiments, a biomass-modulating polypeptide can comprise an X8 domain having 60 percent or greater sequence identity to X8 domain of one or more of the polypeptides set forth in SEQ ID NOs: 2748, 2750, 2751, 2753, 2754, 2756, 2758, 2760, 2762, 2764, 2766, 2768, 2770, 2771, 2772, 2773, 2775, 2777, 2778, 2780, 2781, 2782, 2784, 2786, 2788, 2790, 2791, 2792, 2794, 2796, 2797, 2799, 2801, 2802, 2803, 2804, 2806, 2807, 2809, 2810, 2811, 2813, 2815, 2816, 2818, 2819, 2821, 2822, 2823, 2825, 2826, 2828, 2830, 2832, 2833, 2835, 2836, 2838, 2840, 2842, 2844, 2845, 2846, 2847, 2849, 2850, 2851, 2852, 2853, 2855, 2856, 2857, 2858, 2859, 2861, 2862, 2863, 2864, 2866, 2867, 2868, 2869, 2870, 2872, 2873, 2875, 2876, 2877, or 2878. The X8 domains of such sequences are set forth in the Sequence Listing. The X8 domain contains 6 conserved cysteine residues that may form three disulphide bridges. The domain is found in an Olive pollen allergen and at the C-terminus of family 17 glycosyl hydrolases. Barral et al., J Immunol, 172: 3644-3651 (2004); Henrissat and Davies, Plant Physiol, 124:1515-1519 (2000). This domain may be involved in carbohydrate binding. Henrissat et al., Plant Mol Biol, 47: 55-72 (2001).

[0172] A biomass-modulating polypeptide can contain a Peroxidase domain, which is predicted to be characteristic of a biomass-modulating polypeptide. SEQ ID NO:1318 sets forth the amino acid sequence of a Panicum virgatum clone, identified herein as CeresClone:1725400 (SEQ ID NO:1317), that is predicted to encode a polypeptide containing a Peroxidase domain. For example, a biomass-modulating polypeptide can comprise a Peroxidase domain having 60 percent or greater sequence identity to residues 56 to 315 of SEQ ID NO:1318. In some embodiments, a biomass-modulating polypeptide can comprise a Peroxidase domain having 60 percent or greater sequence identity to the Peroxidase domain of one or more of the polypeptides set forth in SEQ ID NOs: 1318, 1320, 1322, 1324, 1325, 1326, 1328, 1329, 1330, 1332, 1333, 1334, 1336, 1338, 1339, 1340, 1341, 1342, 1343, 1344, 1345, 1347, 1349, 1350, 1352, 1353, 1355, 1357, 1358, 1359, 1360, 1361, 1363, 1364, 1366, 1367, 1369, 1370, 1371, 1372, 1373, 1375, 1376, 1377, 1379, 1380, 1381, 1382, 1384, 1386, 1388, 1389, 1391, 1393, 1395, 1397, 1399, 1401, 1402, 1403, 1405, 1407, 1409, 1410, 1412, 1414, 1416, 1418, 1420, 1421, 1422, or 1424. The Peroxidase domains of such sequences are set forth in the Sequence Listing. Peroxidases are heme-containing enzymes that use hydrogen peroxide as the electron acceptor to catalyse a number of oxidative reactions. Plant peroxidases have tissue-specific functions including removal of hydrogen peroxide from chloroplasts and cytosol, oxidation of toxic compounds, biosynthesis of the cell wall, defense responses towards wounding, indole-3-acetic acid (IAA) catabolism, and ethylene biosynthesis, for example. The heme group is embedded between the alpha domains of the Peroxidase domain shows a.

[0173] A biomass-modulating polypeptide can contain a DUF563 domain, which is predicted to be characteristic of a biomass-modulating polypeptide. SEQ ID NO:459 sets forth the amino acid sequence of a Panicum virgatum clone, identified herein as CeresClone:1726076 (SEQ ID NO:458), which is predicted to encode a polypeptide containing a DUF563 domain. For example, a biomass-modulating polypeptide can comprise a DUF563 domain having 60 percent or greater sequence identity to residues 35 to 257 of SEQ ID NO:459. In some embodiments, a biomass-modulating polypeptide can comprise a DUF563 domain having 60 percent or greater sequence identity to the DUF563 domain of one or more of the polypeptides set forth in SEQ ID NOs: 459, 461, 462, 464, 466, 467, 468, 469, 470, 472, 474, 475, 477, 479, 480, 482, 483, 484, 485, 487, 488, 489, 490, 491, 492, 493, 494, 495, 497, or 499. The DUF563 domains of such sequences are set forth in the Sequence Listing.

[0174] The amino acid sequence of a DUF563 domain is also set forth in SEQ ID NO:2746, the amino acid sequence encoded by the Panicum virgatum clone identified herein as CeresClone:1790340 (SEQ ID NO:2747). This amino acid is predicted to encode a polypeptide containing a DUF563 domain. For example, a biomass-modulating polypeptide can comprise a DUF563 domain having 60 percent or greater sequence identity to residues 109 to 357 of SEQ ID NO:846. In some embodiments, a biomass-modulating polypeptide can comprise a DUF563 domain having 60 percent or greater sequence identity to the DUF563 domain of one or more of the polypeptides set forth in SEQ ID NOs: 846, 848, 849, 850, 851, 853, 855, 856, 857, 858, 860, 861, 863, 864, 866, 868, 870, 871, 873, 874, or 876. The DUF563 domains of such sequences are set forth in the Sequence Listing.

[0175] The amino acid sequence of an DUF563 domain is also set forth in SEQ ID NO:1107, the amino acid sequence encoded by the Panicum virgatum clone identified herein as CeresClone:1781320 (SEQ ID NO:1106). This amino acid is predicted to encode a polypeptide containing an DUF563 domain. For example, a biomass-modulating polypeptide can comprise a DUF563 domain having 60 percent or greater sequence identity to residues 252 to 501 of SEQ ID NO:1107. In some embodiments, a biomass-modulating polypeptide can comprise a DUF563 domain having 60 percent or greater sequence identity to the DUF563 domain of one or more of the polypeptides set forth in SEQ ID NOs: 1107, 1108, 1110, 1111, 1112, 1113, 1114, 1115, 1117, 1119, 1120, 1121, 1122, 1124, 1126, 1128, 1130, 1132, 1133, or 1135. The DUF563 domains of such sequences are set forth in the Sequence Listing.

[0176] A biomass-modulating polypeptide can contain an UDP-glucoronosyl and UDP-glucosyl transferases domain (UDPGT), which is predicted to be characteristic of a biomass-modulating polypeptide. SEQ ID NO:335 sets forth the amino acid sequence of a Panicum virgatum clone, identified herein as CeresClone:1727475 (SEQ ID NO:334), which is predicted to encode a polypeptide containing an UDPGT domain. For example, a biomass-modulating polypeptide can comprise an UDPGT domain having 60 percent or greater sequence identity to residues 4 to 457 of SEQ ID NO: 335. In some embodiments, a biomass-modulating polypeptide can comprise an UDPGT domain having 60 percent or greater sequence identity to the UDPGT domain of one or more of the polypeptides set forth in SEQ ID NOs: 335, 337, 338, 340, 342, 343, 345, 346, 347, 349, 350, 351, 353, 354, 355, 357, 358, 360, 362, 363, 364, 365, 367, 369, 370, 371, 372, 373, 374, 375, 377, 378, 379, 380, 382, 383, 384, 385, 386, 387, 389, 390, 391, 393, 395, 396, 398, 400, or 401. The UDPGT domains of such sequences are set forth in the Sequence Listing.

[0177] The amino acid sequence of an UDPGT domain is also set forth in SEQ ID NO:1946, the amino acid sequence encoded by the Panicum virgatum clone identified herein as CeresClone:1788006 (SEQ ID NO:1945). This amino acid is predicted to encode a polypeptide containing an UDPGT domain. For example, a biomass-modulating polypeptide can comprise an UDPGT domain having 60 percent or greater sequence identity to residues 24 to 465 of SEQ ID NO:1946. In some embodiments, a biomass-modulating polypeptide can comprise an UDPGT domain having 60 percent or greater sequence identity to the UDPGT domain of one or more of the polypeptides set forth in SEQ ID NOs: 1946, 1948, 1949, 1951, 1953, 1955, 1957, 1959, 1961, 1963, 1965, 1967, 1969, 1971, 1972, 1973, 1974, 1975, 1976, 1978, 1979, 1980, 1982, 1983, 1985, 1986, 1987, 1989, 1990, 1992, 1994, 1996, 1997, 1999, 2000, 2002, 2003, 2005, 2007, 2008, 2009, 2010, 2011, 2013, 2015, 2016, 2017, 2018, 2019, 2021, 2022, 2023, 2024, or 2026. The UDPGT domains of such sequences are set forth in the Sequence Listing. UDP glycosyltransferases (UGT) are a superfamily of enzymes that catalyze the addition of the glycosyl group from a UTP-sugar to a small hydrophobic molecule. The UDPGT family includes flavonol O(3)-glucosyltransferase. These enzymes share a conserved domain of about 50 amino acid residues located in their C-terminal section. The UDPGT family is a member of the Glycosyl transferase clan, GT-B, which contains diverse glycosyltransferases that possess a Rossmann like fold. Liu and Mushegian, Protein Sci, 12: 1418-1431 (2003).

[0178] A biomass-modulating polypeptide can contain a Dirigent-like protein domain, which is predicted to be characteristic of a biomass-modulating polypeptide. SEQ ID NO:2525 sets forth the amino acid sequence of a Panicum virgatum clone, identified herein as CeresClone:1763298 (SEQ ID NO:2524), that is predicted to encode a polypeptide containing a Dirigent-like protein domain. For example, a biomass-modulating polypeptide can comprise a Dirigent-like protein domain having 60 percent or greater sequence identity to residues 1 to 146 of SEQ ID NO:2525. In some embodiments, a biomass-modulating polypeptide can comprise a Dirigent-like protein domain having 60 percent or greater sequence identity to the Dirigent-like protein domain of one or more of the polypeptides set forth in SEQ ID NOs: 2525, 2527, 2529, 2530, 2531, 2533, 2535, 2537, 2539, 2540, 2541, or 2542. The Dirigent-like protein domains of such sequences are set forth in the Sequence Listing. The Dirigent-like protein domain is conserved in the disease-resistance response family of proteins of Arabidopsis thaliana. The dirigent proteins are considered to mediate the free radical coupling of monolignol plant phenols in plants to yield lignans and lignins. Davin et al., Science, 275: 362-366 (1997); Burlat et al. Phytochemistry 57:883-8987 (2001).

[0179] A biomass-modulating polypeptide can contain a DUF1070 domain, which is predicted to be characteristic of a biomass-modulating polypeptide. SEQ ID NO:1272 sets forth the amino acid sequence of a Panicum virgatum clone, identified herein as CeresClone:1764605 (SEQ ID NO:1271), which is predicted to encode a polypeptide containing a DUF1070 domain. For example, a biomass-modulating polypeptide can comprise a DUF1070 domain having 60 percent or greater sequence identity to residues 35 to 257 of SEQ ID NO: 595. In some embodiments, a biomass-modulating polypeptide can comprise a DUF1070 domain having 60 percent or greater sequence identity to the DUF 1070 domain of one or more of the polypeptides set forth in SEQ ID NOs: 595, 597, 598, 600, 602, 603, 604, 605, 606, 608, 609, 610, 611, 613, 615, 616, 618, 619, 620, 622, 623, 625, 627, 629, 630, 632, 633, 634, 636, 637, 638, 639, 641, 642, or 643. The DUF1070 domains of such sequences are set forth in the Sequence Listing.

[0180] A biomass-modulating polypeptide can contain a Pectinesterase domain, which is predicted to be characteristic of a biomass-modulating polypeptide. SEQ ID NO:1660 sets forth the amino acid sequence of a Panicum virgatum clone, identified herein as CeresClone:1769660 (SEQ ID NO:1660), that is predicted to encode a polypeptide containing a Pectinesterase domain. For example, a biomass-modulating polypeptide can comprise a Pectinesterase domain having 60 percent or greater sequence identity to residues 35 to 257 of SEQ ID NO: 1660. In some embodiments, a biomass-modulating polypeptide can comprise a Pectinesterase domain having 60 percent or greater sequence identity to the Pectinesterase domain of one or more of the polypeptides set forth in SEQ ID NOs: 1660, 1661, 1662, 1664, 1666, 1668, 1669, 1670, 1671, 1672, 1674, 1676, 1677, 1679, 1680, 1681, 1682, 1683, 1684, 1686, 1688, 1689, 1691, 1693, 1695, 1697, 1699, 1700, 1701, 1702, 1704, 1705, 1706, 1707, 1708, 1710, 1711, 1712, 1713, 1714, 1715, 1717, 1719, 1721, 1723, 1724, or 1725. The Pectinesterase domains of such sequences are set forth in the Sequence Listing. Pectinesterase (pectin methylesterase) catalyses the de-esterification of pectin into pectate and methanol. The Pectinesterase family is a member of the Pec_lyase clan. Members of the Pec_lyase superfamily contain a right-handed beta helix as found in pectate lyase.

[0181] A biomass-modulating polypeptide can contain a Glycosyl hydrolase family 35 domain (Glyco_hydro_{—}35), which is predicted to be characteristic of a biomass-modulating polypeptide. SEQ ID NO: 2466 sets forth the amino acid sequence of a Panicum virgatum clone, identified herein as CeresClone:1777248 (SEQ ID NO:2465), that is predicted to encode a polypeptide containing a Glycosyl hydrolase family 35 domain. For example, a biomass-modulating polypeptide can comprise a Glycosyl hydrolase family 35 domain having 60 percent or greater sequence identity to residues 70 to 376 of SEQ ID NO: 2466. In some embodiments, a biomass-modulating polypeptide can comprise a Glycosyl hydrolase family 35 domain having 60 percent or greater sequence identity to the Glycosyl hydrolase family 35 domain of one or more of the polypeptides set forth in SEQ ID NOs: 2466, 2468, 2469, 2470, 2471, 2472, 2474, 2475, 2476, 2477, 2478, 2480, 2482, 2483, 2484, 2485, 2486, 2487, 2488, 2489, 2490, 2491, 2493, 2494, 2495, 2496, 2497, 2498, 2499, 2500, 2502, 2503, 2505, 2506, 2507, 2509, 2510, 2511, 2512, 2513, 2514, 2516, 2517, 2518, 2519, 2521, 2522, or 2523. The Glycosyl hydrolase family 35 domains of such sequences are set forth in the Sequence Listing. Glycosyl hydrolase family 35 comprises enzymes with beta-galactosidase activity. Beta-Galactosidase activity also increases in various fruits during ripening. The glycosyl hydrolase family 35 is a member of the Glyco_hydro_tim superfamily, which contains the contains a range of glycosyl hydrolase enzymes that possess a TIM barrel fold.

[0182] A biomass-modulating polypeptide can contain a Galactose binding lectin domain (Gal_Lectin), which is predicted to be characteristic of a biomass-modulating polypeptide. SEQ ID NO: 2466 sets forth the amino acid sequence of a Panicum virgatum clone, identified herein as CeresClone:1777248 (SEQ ID NO:2465), that is predicted to encode a polypeptide containing a Galactose binding lectin domain. For example, a biomass-modulating polypeptide can comprise a Galactose binding lectin domain having 60 percent or greater sequence identity to residues 830 to 906 of SEQ ID NO: 2466. In some embodiments, a biomass-modulating polypeptide can comprise a Galactose binding lectin domain having 60 percent or greater sequence identity to the Galactose binding lectin domain of one or more of the polypeptides set forth in SEQ ID NOs: 2466, 2468, 2469, 2470, 2471, 2472, 2474, 2475, 2476, 2477, 2478, 2480, 2482, 2483, 2484, 2485, 2486, 2487, 2488, 2489, 2490, 2491, 2493, 2494, 2495, 2496, 2497, 2498, 2499, 2500, 2502, 2503, 2505, 2506, 2507, 2509, 2510, 2511, 2512, 2513, 2514, 2516, 2517, 2518, 2519, 2521, 2522, or 2523. The Galactose binding lectin domains of such sequences are set forth in the Sequence Listing. The lectin binding domain of plant beta-galactosidases have been implicated in catabolism of cell wall sugars during fruit ripening.

[0183] A biomass-modulating polypeptide can contain an Exostosin family domain, which is predicted to be characteristic of a biomass-modulating polypeptide. SEQ ID NO:115 sets forth the amino acid sequence of a Panicum virgatum clone, identified herein as CeresClone:1788820 (SEQ ID NO:114), that is predicted to encode a polypeptide containing an Exostosin family domain. For example, a biomass-modulating polypeptide can comprise an Exostosin family domain having 60 percent or greater sequence identity to residues 54 to 358 of SEQ ID NO:115. In some embodiments, a biomass-modulating polypeptide can comprise an Exostosin family domain having 60 percent or greater sequence identity to the Exostosin family domain of one or more of the polypeptides set forth in SEQ ID NOs: 115, 117, 119, 120, 121, 122, 123, 124, 126, 128, 129, 131, 133, 135, 137, 139, 140, 141, 142, 144, 146, 147, 148, 149, 150, 152, 154, 155, 157, 158, 160, 162, 163, 165, 167, 169, 171, 173, 175, 176, 178, 180, 182, 183, 185, 187, 189, 191, 193, 194, 195, 196, 197, 198, 199, 200, 201, 203, 205, 207, 208, or 209. The Exostosin domains of such sequences are set forth in the Sequence Listing. The Exostosin family is based on the b-glucuronyltransferase domain of animal exostosins. In addition to the b-glucuronyltransferase domain, exostosins contain a 4-N-acetylglucosaminyltransferase domain. Many plant genes have been shown to encode proteins with significant sequence similarity to the animal exostosin b-glucuronyltransferase.

[0184] A biomass-modulating polypeptide can contain a RmlD substrate binding domain (RmlD_sub_bind), which is predicted to be characteristic of a biomass-modulating polypeptide. SEQ ID NO:2708 sets forth the amino acid sequence of a Panicum virgatum, identified herein as CeresClone:1789564 (SEQ ID NO:2707), that is predicted to encode a polypeptide containing a RmlD substrate binding domain. For example, a biomass-modulating polypeptide can comprise a RmlD substrate binding domain having 60 percent or greater sequence identity to residues 381 to 659 of SEQ ID NO:2708. In some embodiments, a biomass-modulating polypeptide can comprise a RmlD substrate binding domain having 60 percent or greater sequence identity to the RmlD substrate binding domain of one or more of the polypeptides set forth in SEQ ID NOs: 2708, 2710, 2711, 2712, 2714, 2716, 2717, 2719, 2721, 2722, 2724, 2726, 2728, 2730, 2732, 2734, 2735, 2736, 2738, 2739, 2740, 2741, 2743, 2745, or 2746. The RmlD substrate binding domains of such sequences are set forth in the Sequence Listing. The RmlD substrate binding domain is responsible for binding a sugar nucleotide. Blankenfeldt et al., Structure (Camb), 10: 773-786 (2002); Giraud et al., Nat Struct Biol, 7:398-402 (2000).

[0185] A biomass-modulating polypeptide can contain a Glycosyltransferase family 43 domain (Glyco_transf_{—}43), which is predicted to be characteristic of a biomass-modulating polypeptide. SEQ ID NO:1481 sets forth the amino acid sequence of a Panicum virgatum clone, identified herein as CeresClone:1789593 (SEQ ID NO:1480), that is predicted to encode a polypeptide containing a Glycosyltransferase family 43 domain. For example, a biomass-modulating polypeptide can comprise a Glycosyltransferase family 43 domain having 60 percent or greater sequence identity to residues 138 to 364 of SEQ ID NO:1481. In some embodiments, a biomass-modulating polypeptide can comprise a Glycosyltransferase family 43 domain having 60 percent or greater sequence identity to the Glycosyltransferase family 43 domain of one or more of the polypeptides set forth in SEQ ID NOs: 1481, 1482, 1483, 1485, 1486, 1488, 1489, 1490, 1492, 1493, 1495, 1497, 1498, 1500, 1502, 1503, 1505, 1506, 1507, 1508, 1509, 1511, 1512, 1514, 1515, or 1516. The Glycosyltransferase family 43 domains of such sequences are set forth in the Sequence Listing. The Glycosyltransferases are involved in biosynthesis of disaccharides, oligosaccharides, and polysaccharides. Glycosyl-transferases catalyse the transfer of sugar moieties from activated donor molecules to specific acceptor molecules, forming glycosidic bonds. Glycosyltransferase family 43 comprises enzymes with beta-glucuronyltransferase activity. Glycosyltransferase family 43 is a member of the GT-A clan, which contains diverse glycosyltransferases possessing a Rossmann-like fold. The Rossmann fold is a protein structural motif found in proteins that bind nucleotides, e.g., NAD.

[0186] A biomass-modulating polypeptide can contain a Glycosyl hydrolase family 17 domain (Glyco_hydro_{—}17), which is predicted to be characteristic of a biomass-modulating polypeptide. SEQ ID NO:2748 sets forth the amino acid sequence of a Panicum virgatum clone, identified herein as CeresClone:1790340 (SEQ ID NO:2747), that is predicted to encode a polypeptide containing a Glycosyl hydrolase family 17 domain. For example, a biomass-modulating polypeptide can comprise a Glycosyl hydrolase family 17 domain having 60 percent or greater sequence identity to residues 30 to 348 of SEQ ID NO: 2748. In some embodiments, a biomass-modulating polypeptide can comprise a Glycosyl hydrolase family 17 domain having 60 percent or greater sequence identity to the Glycosyl hydrolase family 17 domain of one or more of the polypeptides set forth in SEQ ID NOs: 2748, 2750, 2751, 2753, 2754, 2756, 2758, 2760, 2762, 2764, 2766, 2768, 2770, 2771, 2772, 2773, 2775, 2777, 2778, 2780, 2781, 2782, 2784, 2786, 2788, 2790, 2791, 2792, 2794, 2796, 2797, 2799, 2801, 2802, 2803, 2804, 2806, 2807, 2809, 2810, 2811, 2813, 2815, 2816, 2818, 2819, 2821, 2822, 2823, 2825, 2826, 2828, 2830, 2832, 2833, 2835, 2836, 2838, 2840, 2842, 2844, 2845, 2846, 2847, 2849, 2850, 2851, 2852, 2853, 2855, 2856, 2857, 2858, 2859, 2861, 2862, 2863, 2864, 2866, 2867, 2868, 2869, 2870, 2872, 2873, 2875, 2876, 2877, or 2878. The Glycosyl hydrolase family 17 domains of such sequences are set forth in the Sequence Listing. Glycoside hydrolase family 17 comprises enzymes such as endo-1,3-beta-glucosidase, lichenase, and exo-1,3-glucanase. The glycosyl hydrolase family is a member of the Glyco_hydro_tim superfamily, which contains a range of glycosyl hydrolase enzymes possessing a TIM barrel fold.

[0187] A biomass-modulating polypeptide can contain a Transferase family domain, which is predicted to be characteristic of a biomass-modulating polypeptide. SEQ ID NO:947 sets forth the amino acid sequence of a Panicum virgatum clone, identified herein as CeresClone:1790811 (SEQ ID NO:946), which is predicted to encode a polypeptide containing a Transferase family domain. For example, a biomass-modulating polypeptide can comprise a Transferase family domain having 60 percent or greater sequence identity to residues 5 to 439 of SEQ ID NO:947. In some embodiments, a biomass-modulating polypeptide can comprise a Transferase family domain having 60 percent or greater sequence identity to the Transferase family domain of one or more of the polypeptides set forth in SEQ ID NOs: 947, 949, 950, 952, 953, 955, 957, 959, 960, 962, 964, 965, 967, 968, 970, 972, 974, 976, 978, 980, 981, 983, 985, 986, 987, 989, 991, 993, 995, 997, 998, 1000, 1002, 1003, 1005, 1007, 1008, 1009, 1011, 1013, 1014, 1016, 1018, 1020, 1022, 1023, 1024, 1025, 1026, 1027, 1029, 1031, 1033, 1034, 1036, 1038, 1039, 1041, 1042, 1043, 1044, 1045, 1046, 1048, 1049, 1050, 1051, or 1052. The Transferase family domains of such sequences are set forth in the Sequence Listing.

[0188] The amino acid sequence of an Transferase family domain is also set forth in SEQ ID NO:1569, the amino acid sequence encoded by the Panicum virgatum clone identified herein as CeresClone:1900097 (SEQ ID NO:1568). This amino acid is predicted to encode a polypeptide containing an Transferase family domain. For example, a biomass-modulating polypeptide can comprise a Transferase family domain having 60 percent or greater sequence identity to residues 4 to 436 of SEQ ID NO:1569. In some embodiments, a biomass-modulating polypeptide can comprise a Transferase family domain having 60 percent or greater sequence identity to the Transferase family domain of one or more of the polypeptides set forth in SEQ ID NOs: 1569, 1571, 1572, 1574, 1575, 1577, 1578, 1580, 1581, 1583, 1584, 1586, 1588, 1589, 1591, 1593, 1594, 1595, 1596, 1598, 1599, 1600, 1602, 1603, 1604, 1605, 1607, 1609, 1611, 1612, 1613, 1615, 1616, 1618, 1619, 1621, or 1622. The Transferase family domains of such sequences are set forth in the Sequence Listing. This family includes enzymes such as anthranilate N-hydroxycinnamoyl/benzoyltransferase and deacetylvindoline 4-O-acetyltransferase EC:2.3.1.107. The transferase family is a member of the CoA-dependent acyltransferase superfamily. All characterised families in this clan are involved in CoA-dependent acyltransferase and have a characteristic HXXXD motif.

[0189] A biomass-modulating polypeptide can contain an alpha/beta hydrolase fold domain (Abhydrolase_{—}3), which is predicted to be characteristic of a biomass-modulating polypeptide. SEQ ID NO:1727 sets forth the amino acid sequence of an Arabidopsis clone, identified herein as CeresClone:1792586 (SEQ ID NO:1726), which is predicted to encode a polypeptide containing an alpha/beta hydrolase fold domain. For example, a biomass-modulating polypeptide can comprise an alpha/beta hydrolase fold domain having 60 percent or greater sequence identity to residues 85 to 310 of SEQ ID NO:1727. In some embodiments, a biomass-modulating polypeptide can comprise an alpha/beta hydrolase fold domain having 60 percent or greater sequence identity to the alpha/beta hydrolase fold domain of one or more of the polypeptides set forth in SEQ ID NOs: 1727, 1729, 1731, 1732, 1734, 1735, 1737, 1739, 1741, 1743, 1745, 1746, 1747, 1749, 1751, 1753, 1755, 1757, 1758, 1759, 1761, 1762, 1764, 1765, 1766, 1767, 1769, 1770, 1772, 1773, 1774, 1776, 1777, 1779, 1781, 1783, 1784, 1786, 1788, 1790, 1792, 1794, or 1795. The alpha/beta hydrolase fold domains of such sequences are set forth in the Sequence Listing. The alpha/beta hydrolase fold is common to a number of hydrolytic enzymes of widely differing phylogenetic origin and catalytic function. The core of each enzyme is an alpha/beta-sheet (rather than a barrel), containing 8 strands connected by helices. The enzymes are believed to have diverged from a common ancestor, preserving the arrangement of the catalytic residues. All have a catalytic triad, the elements of which are borne on loops, which are the best conserved structural features of the fold.

[0190] A biomass-modulating polypeptide can contain a Chitinase Class I domain (Glycohydro_{—}19), which is predicted to be characteristic of a biomass-modulating polypeptide. SEQ ID NO:211 sets forth the amino acid sequence of a Panicum virgatum clone, identified herein as CeresClone:1801750 (SEQ ID NO:210), that is predicted to encode a polypeptide containing a Chitinase Class I domain. For example, a biomass-modulating polypeptide can comprise a Chitinase Class I domain having 60 percent or greater sequence identity to residues 29 to 246 of SEQ ID NO:211. In some embodiments, a biomass-modulating polypeptide can comprise a Chitinase Class I domain having 60 percent or greater sequence identity to the Chitinase Class I domain of one or more of the polypeptides set forth in SEQ ID NOs: 211, 213, 214, 215, 217, 218, 219, 220, 222, 223, 224, 226, 228, 229, 231, 232, 233, 234, 235, 236, 237, 238, 239, 240, 242, 244, 245, 246, 247, 248, 249, 250, 251, 252, 254, 255, 256, 257, 258, 259, 260, 261, 262, 263, 264, 265, 266, 267, 268, 269, 270, 271, 272, 273, 274, 275, 276, 277, 278, 279, 281, or 282. The Chitinase Class I domains of such sequences are set forth in the Sequence Listing. Chitinases are enzymes that catalyze the hydrolysis of the beta-1,4-N-acetyl-D-glucosamine linkages in chitin polymers. Chitinases belong to glycoside hydrolase families 18 or 19. Henrissat, Biochem J. 280:309-16 (1991). Chitinases of family 19 (also known as classes IA or I and IB or II) are enzymes from plants that function in the defense against fungal and insect pathogens. Class IA/I and IB/II enzymes differ in the presence (IA/I) or absence (IB/II) of a N-terminal chitin-binding domain. The catalytic domain of these enzymes consist of about 220 to 230 amino acid residues.

[0191] A biomass-modulating polypeptide can contain a Pollen allergen domain (Pollen_allerg_{—}1), which is predicted to be characteristic of a biomass-modulating polypeptide. SEQ ID NO:629 sets forth the amino acid sequence of a Panicum virgatum clone, identified herein as CeresClone:1804242 (SEQ ID NO:628), that is predicted to encode a polypeptide containing a Pollen allergen domain. For example, a biomass-modulating polypeptide can comprise a Pollen allergen domain having 60 percent or greater sequence identity to residues 164 to 241 of SEQ ID NO:629. In some embodiments, a biomass-modulating polypeptide can comprise a Pollen allergen domain having 60 percent or greater sequence identity to the Pollen allergen domain of one or more of the polypeptides set forth in SEQ ID NOs: 629, 631, 633, 634, 635, 636, 637, 638, 640, 642, 644, 646, 648, 650, 651, 653, 654, 655, 656, 657, 658, 659, 660, 662, 663, 664, 665, 666, or 667. The Pollen allergen domains of such sequences are set forth in the Sequence Listing. This family contains Lolium perenne allergens Lol PI, PII, and PIII. Ansari et al. Biochemistry, 28: 8665-8670 (1989). Expansins share a high degree of sequence similarity with the Lol PI family of allergens. Expansins mediate cell wall extension in plants. Expansins promote sustained slippage between wall polymers without hydrolytic activity.

[0192] A biomass-modulating polypeptide can contain a rare lipoprotein A (RlpA)-like double-psi beta barrel domain (DPBB_{—}1), which is predicted to be characteristic of a biomass-modulating polypeptide. SEQ ID NO:629 sets forth the amino acid sequence of a Panicum virgatum clone, identified herein as CeresClone:1804242 (SEQ ID NO:628), that is predicted to encode a polypeptide containing a rare lipoprotein A (RlpA)-like double-psi beta barrel domain. For example, a biomass-modulating polypeptide can comprise a rare lipoprotein A (RlpA)-like double-psi beta barrel domain having 60 percent or greater sequence identity to residues 67 to 153 of SEQ ID NO:629. In some embodiments, a biomass-modulating polypeptide can comprise a rare lipoprotein A (RlpA)-like double-psi beta barrel domain having 60 percent or greater sequence identity to the rare lipoprotein A (RlpA)-like double-psi beta barrel domain of one or more of the polypeptides set forth in SEQ ID NOs: 629, 631, 633, 634, 635, 636, 637, 638, 640, 642, 644, 646, 648, 650, 651, 653, 654, 655, 656, 657, 658, 659, 660, 662, 663, 664, 665, 666, or 667. The rare lipoprotein A (RlpA)-like double-psi beta barrel domains of such sequences are set forth in the Sequence Listing. Rare lipoprotein A (RlpA) contains a conserved region that has the double-psi beta-barrel (DPBB) fold. This domain is found in the N terminus of pollen allergen. Bass et al., J Bacteriol, 178: 1154-1161 (1996).

[0193] A biomass-modulating polypeptide can contain a Raffinose synthase or seed inhibition (Sip 1) protein domain (Raffinose_syn), which is predicted to be characteristic of a biomass-modulating polypeptide. SEQ ID NO:2544 sets forth the amino acid sequence of a Panicum virgatum clone, identified herein as CeresClone:1806608 (SEQ ID NO:2543), that is predicted to encode a polypeptide containing a Raffinose synthase or seed inhibition (Sip 1) protein domain. For example, a biomass-modulating polypeptide can comprise a Raffinose synthase or seed inhibition (Sip 1) protein domain having 60 percent or greater sequence identity to residues 7 to 752 of SEQ ID NO:2544. In some embodiments, a biomass-modulating polypeptide can comprise a Raffinose synthase or seed inhibition (Sip 1) protein domain having 60 percent or greater sequence identity to the Raffinose synthase or seed inhibition (Sip 1) protein domain of one or more of the polypeptides set forth in SEQ ID NOs: 2544, 2546, 2547, 2548, 2550, 2551, 2552, 2554, 2556, 2557, 2558, 2559, 2561, 2562, 2564, 2565, 2567, 2569, 2571, 2572, 2573, 2574, 2575, 2576, 2578, 2580, 2581, 2583, 2584, 2585, 2587, 2588, 2589, 2590, 2592, 2593, 2594, 2595, or 2597. The Raffinose synthase or seed inhibition (Sip 1) protein domains of such sequences are set forth in the Sequence Listing. This family consists of several raffinose synthase proteins, also known as seed inhibition (Sip1) proteins. Raffinose synthase (EC 2.4.1.82) channels sucrose into the raffinose oligosaccharide pathway. Peterbauer et al., Planta, 215: 839-846 (2002).

[0194] A biomass-modulating polypeptide can contain a 4-alpha-glucanotransferase domain (Glyco_hydro_{—}77), which is predicted to be characteristic of a biomass-modulating polypeptide. SEQ ID NO:2437 sets forth the amino acid sequence of a Panicum virgatum clone, identified herein as CeresClone:1815770 (SEQ ID NO:2436), that is predicted to encode a polypeptide containing a 4-alpha-glucanotransferase domain. For example, a biomass-modulating polypeptide can comprise a 4-alpha-glucanotransferase domain having 60 percent or greater sequence identity to residues 90 to 579 of SEQ ID NO: 2437. In some embodiments, a biomass-modulating polypeptide can comprise 4-alpha-glucanotransferase domain having 60 percent or greater sequence identity to the 4-alpha-glucanotransferase domain of one or more of the polypeptides set forth in SEQ ID NOs: 2437, 2439, 2440, 2441, 2442, 2443, 2445, 2446, 2448, 2449, 2451, 2452, 2454, 2456, 2457, 2458, 2459, 2460, 2461, 2462, 2463, or 2464. The 4-alpha-glucanotransferase domains of such sequences are set forth in the Sequence Listing. 4-alpha-glucanotransferase belongs to the glycoside hydrolase family 77 and transfers a segment of a (1,4)-alpha-D-glucan to a new 4-position in an acceptor, which may be glucose or (1,4)-alpha-D-glucan. 4-alpha-glucantoransferase polypeptides may have a role in starch metabolism. Takaha et al. Bichem J, 268(2);1391-1396 (1993)

[0195] A biomass-modulating polypeptide can contain a No Apical Meristem (NAM) protein domain, which is predicted to be characteristic of a biomass-modulating polypeptide. SEQ ID NO:2 sets forth the amino acid sequence of a Panicum virgatum clone, identified herein as CeresClone:1824159 (SEQ ID NO:1), which is predicted to encode a polypeptide containing a NAM protein domain. For example, a biomass-modulating polypeptide can comprise a NAM protein domain having 60 percent or greater sequence identity to residues 12 to 154 of SEQ ID NO:2. In some embodiments, a biomass-modulating polypeptide can comprise a NAM protein domain having 60 percent or greater sequence identity to the NAM protein domain of one or more of the polypeptides set forth in SEQ ID NOs: 2, 4, 5, 6, 8, 10, 12, 13, 15, 17, 18, 20, 22, 24, 25, 26, 27, 29, 30, 32, 34, 35, 37, 38, 39, 41, 43, 45, 47, 49, 51, 53, 55, 56, 57, 59, 60, 62, 63, 64, 65, 67, 69, 70, 71, 73, 74, 75, or 77. The NAM domains of such sequences are set forth in the Sequence Listing.

[0196] The amino acid sequence of a NAM protein domain is also set forth in SEQ ID NO:284, the amino acid sequence encoded by the Panicum virgatum clone identified herein as CeresClone:2014404 (SEQ ID NO:283). This amino acid is predicted to encode a polypeptide containing an NAM protein domain. For example, a biomass-modulating polypeptide can comprise a NAM protein domain having 60 percent or greater sequence identity to residues 7 to 125 of SEQ ID NO:284. In some embodiments, a biomass-modulating polypeptide can comprise a NAM protein domain having 60 percent or greater sequence identity to the NAM protein domain of one or more of the polypeptides set forth in SEQ ID NOs: 284, 286, 287, 288, 289, 291, 293, 294, 295, 297, 299, 300, 302, 304, 306, 307, or 308. The NAM domains of such sequences are set forth in the Sequence Listing. Polypeptides containing a NAM protein domain are associated with plant development. For example, mutations in the NAM protein of petunia result in the failure to develop a shoot apical meristem in petunia embryos. Sablowski and Meyerowitz, Cell, 92:93-103 (1998). Proteins containing a NAM protein domain may have a role in the transition between growth by cell division and cell expansion in stamens and petals. Souer, et al., Cell, 85:159-170 (1996).

[0197] A biomass-modulating polypeptide can contain a Glycosyl hydrolase family 18 domain (Glyco_hydro_{—}18), which is predicted to be characteristic of a biomass-modulating polypeptide. SEQ ID NO:501 sets forth the amino acid sequence of a Panicum virgatum clone, identified herein as CeresClone:1902646 (SEQ ID NO:500), that is predicted to encode a polypeptide containing a Glycosyl hydrolase family 18 domain. For example, a biomass-modulating polypeptide can comprise a Glycosyl hydrolase family 18 domain having 60 percent or greater sequence identity to residues 26 to 290 of SEQ ID NO:501. In some embodiments, a biomass-modulating polypeptide can comprise a Glycosyl hydrolase family 18 domain having 60 percent or greater sequence identity to the Glycosyl hydrolase family 18 domain of one or more of the polypeptides set forth in SEQ ID NOs: 501, 502, 503, 504, 506, 507, 509, 510, 511, 512, 514, 515, 516, 517, 518, 520, 522, 524, 526, 528, 530, 531, 532, 533, 534, 535, 536, 537, 538, 539, 540, 542, 543, 545, 546, 547, 548, 550, 551, 553, 554, 555, 557, 559, 560, 562, 563, 565, 566, 568, 570, 572, 573, 575, 576, 577, 579, 580, 581, 582, 583, 584, 585, 586, 587, 589, 590, 591, 592, 593, 595, 596, 597, 598, 599, 601, 602, 604, 605, 607, 609, 610, 611, 612, 613, 614, 615, 616, 617, 618, 619, 620, 621, 622, 623, 624, 625, 626, or 627. The Glycosyl hydrolase family 18 domains of such sequences are set forth in the Sequence Listing. Some members of this family belong to the chitinase class II group, which hydrolyse chitin oligosaccharides. The glycosyl hydrolase family 18 is a member of the Glyco_hydro_tim superfamily, which contains the contains a range of glycosyl hydrolase enzymes that possess a TIM barrel fold.

[0198] A biomass-modulating polypeptide can contain a Glycosyl hydrolase family 16 domain (Glyco_hydro_{—}16), which is predicted to be characteristic of a biomass-modulating polypeptide. SEQ ID NO:2190 sets forth the amino acid sequence of a Panicum virgatum clone, identified herein as CeresClone:1955550 (SEQ ID NO:2189), that is predicted to encode a polypeptide containing a Glycosyl hydrolase family 16 domain. For example, a biomass-modulating polypeptide can comprise a Glycosyl hydrolase family 16 domain having 60 percent or greater sequence identity to residues 23 to 204 of SEQ ID NO:2190. In some embodiments, a biomass-modulating polypeptide can comprise a Glycosyl hydrolase family 16 domain having 60 percent or greater sequence identity to the Glycosyl hydrolase family 16 domain of one or more of the polypeptides set forth in SEQ ID NOs: 2189, 2191, 2193, 2204, 2206, 2208, 2210, 2212, 2214, 2216, 2218, 2220, 2222, 2224, 2227, 2230, 2232, 2234, 2242, 2245, 2247, 2249, 2252, 2254, 2256, 2258, 2260, 2263, 2266, 2268, 2271, 2274, 2277, 2280, 2283, 2287, 2290, 2292, 2294, 2301, 2303, 2305, 2308, 2311, or 2319. The Glycosyl hydrolases family 16 domains of such sequences are set forth in the Sequence Listing. Glycoside hydrolase family 16 comprises enzymes such as lichenase, xyloglucan xyloglucosyltransferase, agarase, kappa-carrageenase, endo-beta-1,3-glucanase, endo-beta-1,3-1,4-glucanase, and endo-beta-galactosidase. The Glycosyl hydrolase family 16 is a member of the Concanavalin superfamily, which includes a diverse range of carbohydrate binding domains and glycosyl hydrolase enzymes that share a common structure.

[0199] A biomass-modulating polypeptide can contain a Xyloglycan endo-transglycosylase (XET_C) domain, which is predicted to be characteristic of a biomass-modulating polypeptide. SEQ ID NO:2190 sets forth the amino acid sequence of a Panicum virgatum clone, identified herein as CeresClone:1955550 (SEQ ID NO:2189), that is predicted to encode a polypeptide containing a Xyloglycan endo-transglycosylase domain. For example, a biomass-modulating polypeptide can comprise a Xyloglycan endo-transglycosylase domain having 60 percent or greater sequence identity to residues 228 to 280 of SEQ ID NO:2190. In some embodiments, a biomass-modulating polypeptide can comprise a Xyloglycan endo-transglycosylase domain having 60 percent or greater sequence identity to the Xyloglycan endo-transglycosylase domain of one or more of the polypeptides set forth in SEQ ID NOs: 2190, 2192, 2194, 2195, 2196, 2197, 2198, 2199, 2200, 2201, 2202, 2203, 2205, 2207, 2209, 2211, 2213, 2215, 2217, 2219, 2221, 2223, 2225, 2226, 2228, 2229, 2231, 2233, 2235, 2236, 2237, 2238, 2239, 2240, 2241, 2243, 2244, 2246, 2248, 2250, 2251, 2253, 2255, 2257, 2259, 2261, 2262, 2264, 2265, 2267, 2269, 2270, 2272, 2273, 2275, 2276, 2278, 2279, 2281, 2282, 2284, 2285, 2286, 2288, 2289, 2291, 2293, 2295, 2296, 2297, 2298, 2299, 2300, 2302, 2304, 2306, 2307, 2309, 2310, 2312, 2313, 2314, 2315, 2316, 2317, 2318, 2320, or 2321. The Xyloglycan endo-transglycosylase domains of such sequences are set forth in the Sequence Listing. The Xyloglycan endo-transglycosylase domain represents the C-terminus (approximately 60 residues) of plant xyloglucan endo-transglycosylase (XET). Xyloglucan is the predominant hemicellulose in the cell walls of most dicotyledons. With cellulose, it forms a network that strengthens the cell wall. XET catalyses the splitting of xyloglucan chains and the linking of the newly generated reducing end to the non-reducing end of another xyloglucan chain, thereby loosening the cell wall. Schroder et al. Planta, 204:242-251 (1998).

[0200] A biomass-modulating polypeptide can contain a Potato inhibitor I family domain, which is predicted to be characteristic of a biomass-modulating polypeptide. SEQ ID NO: 749 sets forth the amino acid sequence of a Panicum virgatum clone, identified herein as CeresClone:1955766 (SEQ ID NO:748), that is predicted to encode a polypeptide containing a Potato inhibitor I family domain. For example, a biomass-modulating polypeptide can comprise a Potato inhibitor I family domain having 60 percent or greater sequence identity to residues 17 to 76 of SEQ ID NO:749. In some embodiments, a biomass-modulating polypeptide can comprise a Potato inhibitor I family domain having 60 percent or greater sequence identity to the Potato inhibitor I family domain of one or more of the polypeptides set forth in SEQ ID NOs: 749, 751, 752, 753, 755, 757, 759, 760, 762, 764, 766, 768, 770, 772, 773, 775, 776, 778, 780, 782, 784, 786, 788, 789, 791, 793, 794, 795, 796, 798, 800, 801, 802, 804, 805, 807, 809, 811, 813, 815, 817, 819, 820, 822, 823, 824, 825, 827, 828, 830, or 832. The Potato inhibitor I family domains of such sequences are set forth in the Sequence Listing. Potato inhibitor type I sequences are found in various plant species. Peptide proteinase inhibitors can be single domain proteins or single or multiple domains within proteins (simple or compound inhibitors, respectively). In many cases, they are synthesized as part of a larger precursor protein, either as a prepropeptide or as an N-terminal domain associated with an inactive peptidase or zymogen.

[0201] A biomass-modulating polypeptide can contain a Plant Thionin domain (thionin), which is predicted to be characteristic of a biomass-modulating polypeptide.

[0202] SEQ ID NO:79 sets forth the amino acid sequence of a Panicum virgatum clone, identified herein as CeresClone:2010191 (SEQ ID NO:78), that is predicted to encode a polypeptide containing a Plant Thionin domain. For example, a biomass-modulating polypeptide can comprise a Plant Thionin domain having 60 percent or greater sequence identity to residues 25 to 67 of SEQ ID NO:79. In some embodiments, a biomass-modulating polypeptide can comprise a Plant Thionin domain having 60 percent or greater sequence identity to the Plant Thionin domain of one or more of the polypeptides set forth in SEQ ID NOs 79, 80, 81, 82, 83, 84, 85, 86, 88, 90, 91, 92, 93, 94, 95, 96, 97, 98, 99, 100, 101, 102, 103, 104, 105, 106, 107, 108, 109, 110, 111, 112, or 113. The Plant Thionin domains of such sequences are set forth in the Sequence Listing. Thionins are small, basic plant proteins, 45 to 50 amino acids in length, which include three or four conserved disulphide linkages. The proteins are toxic to animal cells, presumably attacking the cell membrane and rendering it permeable. This activity results in the inhibition of sugar uptake and allows potassium and phosphate ions, proteins, and nucleotides to leak from cells. Thionins are mainly found in seeds, where they may act as a defense against herbivory or microbial infections.

[0203] A biomass-modulating polypeptide can contain a Heavy-Metal-Associated (HMA) domain, which is predicted to be characteristic of a biomass-modulating polypeptide. SEQ ID NO:2915 sets forth the amino acid sequence of a Panicum virgatum clone, identified herein as CeresClone:2010191 (SEQ ID NO:2916), that is predicted to encode a polypeptide containing a HMA domain. For example, a biomass-modulating polypeptide can comprise a HMA domain having 60 percent or greater sequence identity to residues 6 to 73 of SEQ ID NO:2915. In some embodiments, a biomass-modulating polypeptide can comprise a HMA domain having 60 percent or greater sequence identity to the HMA domain of one or more of the polypeptides set forth in SEQ ID NOs: 2915, 2917, 2918, 2919, 2920, 2921, 2922, 2923, 2924, or 2926. The HMA domains of such sequences are set forth in the Sequence Listing. The HMA domains contain two conserved cysteines that are involved in metal binding. Proteins containing HMA domains may be involved in metal ion transport.

[0204] In some embodiments, a biomass-modulating polypeptide is truncated at the amino- or carboxy-terminal end of a naturally occurring polypeptide. A truncated polypeptide may retain certain domains of the naturally occurring polypeptide while lacking others. Thus, length variants that are up to 5 amino acids shorter or longer typically exhibit the biomass-modulating activity of a truncated polypeptide. In some embodiments, a truncated polypeptide is a dominant negative polypeptide. Expression in a plant of such a truncated polypeptide confers a difference in the level of biomass of a plant as compared to the corresponding level of a control plant that does not comprise the truncation.

[0205] B. Functional Homologs Identified by Reciprocal BLAST

[0206] In some embodiments, one or more functional homologs of a reference biomass-modulating polypeptide defined by one or more of the Pfam descriptions indicated above are suitable for use as biomass-modulating polypeptides. A functional homolog is a polypeptide that has sequence similarity to a reference polypeptide, and that carries out one or more of the biochemical or physiological function(s) of the reference polypeptide. A functional homolog and the reference polypeptide may be natural occurring polypeptides, and the sequence similarity may be due to convergent or divergent evolutionary events. As such, functional homologs are sometimes designated in the literature as homologs, or orthologs, or paralogs. Variants of a naturally occurring functional homolog, such as polypeptides encoded by mutants of a wild type coding sequence, may themselves be functional homologs. Functional homologs can also be created via site-directed mutagenesis of the coding sequence for a biomass-modulating polypeptide, or by combining domains from the coding sequences for different naturally-occurring biomass-modulating polypeptides (“domain swapping”). The term “functional homolog” is sometimes applied to the nucleic acid that encodes a functionally homologous polypeptide.

[0207] Functional homologs can be identified by analysis of nucleotide and polypeptide sequence alignments. For example, performing a query on a database of nucleotide or polypeptide sequences can identify homologs of biomass-modulating polypeptides. Sequence analysis can involve BLAST, Reciprocal BLAST, or PSI-BLAST analysis of nonredundant databases using a biomass-modulating polypeptide amino acid sequence as the reference sequence Amino acid sequence is, in some instances, deduced from the nucleotide sequence. Those polypeptides in the database that have greater than 40% sequence identity are candidates for further evaluation for suitability as a biomass-modulating polypeptide. Amino acid sequence similarity allows for conservative amino acid substitutions, such as substitution of one hydrophobic residue for another or substitution of one polar residue for another. If desired, manual inspection of such candidates can be carried out in order to narrow the number of candidates to be further evaluated. Manual inspection can be performed by selecting those candidates that appear to have domains present in biomass-modulating polypeptides, e.g., conserved functional domains.

[0208] Conserved regions can be identified by locating a region within the primary amino acid sequence of a biomass-modulating polypeptide that is a repeated sequence, forms some secondary structure (e.g., helices and beta sheets), establishes positively or negatively charged domains, or represents a protein motif or domain. See, e.g., the Pfam web site describing consensus sequences for a variety of protein motifs and domains on the World Wide Web at sanger.ac.uk/Software/Pfam/ and pfam.janelia.org/. A description of the information included at the Pfam database is described in Sonnhammer et al., Nucl. Acids Res., 26:320-322 (1998); Sonnhammer et al., Proteins, 28:405-420 (1997); and Bateman et al., Nucl. Acids Res., 27:260-262 (1999). Conserved regions also can be determined by aligning sequences of the same or related polypeptides from closely related species. Closely related species preferably are from the same family. In some embodiments, alignment of sequences from two different species is adequate.

[0209] Typically, polypeptides that exhibit at least about 40% amino acid sequence identity are useful to identify conserved regions. Conserved regions of related polypeptides exhibit at least 45% amino acid sequence identity (e.g., at least 50%, at least 60%, at least 70%, at least 80%, or at least 90% amino acid sequence identity). In some embodiments, a conserved region exhibits at least 92%, 94%, 96%, 98%, or 99% amino acid sequence identity.

[0210] Examples of amino acid sequences of functional homologs of the polypeptide set forth in SEQ ID NO:2880 are provided in FIG. 1 and in the Sequence Listing. Such functional homologs include, for example, CeresAnnot:1469074 (SEQ ID NO:2882), GI:157346953 (SEQ ID NO:2883), CeresClone:1948185 (SEQ ID NO:2885), GI:87241324 (SEQ ID NO:2886), CeresClone:1398728 (SEQ ID NO:2888), CeresClone:513273 (SEQ ID NO:2890), GI:15223612 (SEQ ID NO:2891), GI:147833906 (SEQ ID NO:2892), GI:147767556 (SEQ ID NO:2893), GI:225437752 (SEQ ID NO:2894), CeresAnnot:1471467 (SEQ ID NO:2896), CeresAnnot:1444604 (SEQ ID NO:2898), CeresClone:1855571 (SEQ ID NO:2900), CeresClone:1929622 (SEQ ID NO:2902), GI:212722316 (SEQ ID NO:2903), GI:115461995 (SEQ ID NO:2904), CeresClone:1769439 (SEQ ID NO:2906), GI:115436030 (SEQ ID NO:2907), GI:125525446 (SEQ ID NO:2908), GI:56605400 (SEQ ID NO:2909), GI:28628949 (SEQ ID NO:2910), GI:194698774 (SEQ ID NO:2911), or CeresAnnot:845710 (SEQ ID NO:2913). In some cases, a functional homolog of SEQ ID NO:2880 has an amino acid sequence with at least 45% sequence identity, e.g., 50%, 52%, 56%, 59%, 61%, 65%, 70%, 75%, 80%, 85%, 90%, 95%, 97%, 98%, or 99% sequence identity, to the amino acid sequence set forth in SEQ ID NO:2880.

[0211] Examples of amino acid sequences of functional homologs of the polypeptide set forth in SEQ ID NO:310 are provided in FIG. 2 and in the Sequence Listing. Such functional homologs include, for example, GI:157360325 (SEQ ID NO:311), CeresAnnot:1500617 (SEQ ID NO:313), CeresAnnot:8457473 (SEQ ID NO:315), GI:115475946 (SEQ ID NO:316), GI:116789121 (SEQ ID NO:317), GI:12323467 (SEQ ID NO:318), GI:6633808 (SEQ ID NO:319), GI:147766222 (SEQ ID NO:320), CeresAnnot:1491360 (SEQ ID NO:322), CeresAnnot:1447617 (SEQ ID NO:324), CeresAnnot:1438527 (SEQ ID NO:326), CeresClone:1818368 (SEQ ID NO:328), CeresClone:1784441 (SEQ ID NO:330), GI:38424026 (SEQ ID NO:331), or CeresClone:860956 (SEQ ID NO:333). In some cases, a functional homolog of SEQ ID NO:310 has an amino acid sequence with at least 45% sequence identity, e.g., 50%, 52%, 56%, 59%, 61%, 65%, 70%, 75%, 80%, 85%, 90%, 95%, 97%, 98%, or 99% sequence identity, to the amino acid sequence set forth in SEQ ID NO:310.

[0212] Examples of amino acid sequences of functional homologs of the polypeptide set forth in SEQ ID NO:403 are provided in FIG. 3 and in the Sequence Listing. Such functional homologs include, for example, GI:3912986 (SEQ ID NO:404), CeresClone:1935363 (SEQ ID NO:406), CeresClone:511680 (SEQ ID NO:408), GI:225425372 (SEQ ID NO:409), GI:126842923 (SEQ ID NO:410), GI:60100342 (SEQ ID NO:411), GI:31747210 (SEQ ID NO:412), CeresAnnot:1438157 (SEQ ID NO:414), GI:22329771 (SEQ ID NO:415), CeresClone:873647 (SEQ ID NO:417), CeresClone:1793863 (SEQ ID NO:419), GI:20385588 (SEQ ID NO:420), GI:58330675 (SEQ ID NO:421), GI:5070138 (SEQ ID NO:422), GI:1345965 (SEQ ID NO:423), GI:30314024 (SEQ ID NO:424), GI:75278480 (SEQ ID NO:425), GI:90903289 (SEQ ID NO:426), GI:1239959 (SEQ ID NO:427), GI:23194451 (SEQ ID NO:428), GI:121309556 (SEQ ID NO:429), GI:194247734 (SEQ ID NO:430), GI:116078097 (SEQ ID NO 431), GI:113207077 (SEQ ID NO:432), GI:87116791 (SEQ ID NO:433), GI:1239963 (SEQ ID NO:434), GI:114309696 (SEQ ID NO:435), GI:87045092 (SEQ ID NO:436), GI:27804361 (SEQ ID NO:437), GI:8745070 (SEQ ID NO:438), GI:87045090 (SEQ ID NO:439), GI:48727596 (SEQ ID NO:440), GI:148540546 (SEQ ID NO:441), GI:42491278 (SEQ ID NO:442), GI:60265532 (SEQ ID NO:443), GI:33309873 (SEQ ID NO:444), GI:34979580 (SEQ ID NO:445), GI:60265530 (SEQ ID NO:446), GI:85376980 (SEQ ID NO:447), GI:60265524 (SEQ ID NO:448), GI:117582132 (SEQ ID NO:449), GI:172034210 (SEQ ID NO:450), GI:99109356 (SEQ ID NO:451), GI:60265520 (SEQ ID NO:452), GI:172034212 (SEQ ID NO:453), GI:74053671 (SEQ ID NO:454), CeresClone:100031683 (SEQ ID NO:456), or GI:33309876 (SEQ ID NO:457). In some cases, a functional homolog of SEQ ID NO:403 has an amino acid sequence with at least 45% sequence identity, e.g., 50%, 52%, 56%, 59%, 61%, 65%, 70%, 75%, 80%, 85%, 90%, 95%, 97%, 98%, or 99% sequence identity, to the amino acid sequence set forth in SEQ ID NO:403.

[0213] Examples of amino acid sequences of functional homologs of the polypeptide set forth in SEQ ID NO:669 are provided in FIG. 4 and in the Sequence Listing. Such functional homologs include, for example, CeresAnnot:1510674 (SEQ ID NO:671), GI:147825147 (SEQ ID NO:672), CeresClone:648620 (SEQ ID NO:674), CeresClone:1896520 (SEQ ID NO:676), GI:125603139 (SEQ ID NO:677), CeresAnnot:1470809 (SEQ ID NO:679), GI:157332804 (SEQ ID NO:680), CeresAnnot:1457468 (SEQ ID NO:682), CeresAnnot:552718 (SEQ ID NO:684), GI:125561247 (SEQ ID NO:685), CeresClone:1837887 (SEQ ID NO:687), CeresClone:1924353 (SEQ ID NO:689), GI:42563231 (SEQ ID NO:690), or GI:10120439 (SEQ ID NO:691). In some cases, a functional homolog of SEQ ID NO:669 has an amino acid sequence with at least 45% sequence identity, e.g., 50%, 52%, 56%, 59%, 61%, 65%, 70%, 75%, 80%, 85%, 90%, 95%, 97%, 98%, or 99% sequence identity, to the amino acid sequence set forth in SEQ ID NO:669.

[0214] Examples of amino acid sequences of functional homologs of the polypeptide set forth in SEQ ID NO:1797 are provided in FIG. 5 and in the Sequence Listing. Such functional homologs include, for example GI:111038269 (SEQ ID NO:1798), GI:3023961 (SEQ ID NO:1799), CeresAnnot:1531214 (SEQ ID NO:1801), CeresClone:667754 (SEQ ID NO:1803), GI:132424655 (SEQ ID NO:1804), GI:167178664 (SEQ ID NO:1805), GI:3116212 (SEQ ID NO:1806), GI:225463014 (SEQ ID NO:1807), GI:132424659 (SEQ ID NO:1808), GI:6016226 (SEQ ID NO:1809), GI:221272018 (SEQ ID NO:1810), GI:15238743 (SEQ ID NO:1811), GI:79328660 (SEQ ID NO:1812), GI:1045044 (SEQ ID NO:1813), CeresAnnot:882143 (SEQ ID NO:1815), GI:21539535 (SEQ ID NO:1816), GI:9795158 (SEQ ID NO:1817), CeresAnnot:1508832 (SEQ ID NO:1819), CeresClone:1971046 (SEQ ID NO:1821), GI:163838594 (SEQ ID NO:1822), GI:168199347 (SEQ ID NO:1823), CeresClone:515966 (SEQ ID NO:1825), GI:1805617 (SEQ ID NO:1826), GI:167178668 (SEQ ID NO:1827), GI:168199344 (SEQ ID NO:1828), GI:157339759 (SEQ ID NO:1829), CeresAnnot:1531927 (SEQ ID NO:1831), CeresAnnot:1507861 (SEQ ID NO:1833), GI:15236649 (SEQ ID NO:1834), GI:11463943 (SEQ ID NO:1835), CeresClone:1848387 (SEQ ID NO:1837), CeresAnnot:8671843 (SEQ ID NO:1839), CeresAnnot:8743760 (SEQ ID NO:1841), GI:115469202 (SEQ ID NO:1842), CeresClone:1816333 (SEQ ID NO:1844), GI:162458143 (SEQ ID NO:1845), CeresClone:218346 (SEQ ID NO:1847), CeresClone:1834447 (SEQ ID NO:1849), GI:33333542 (SEQ ID NO:1850), CeresClone:106887 (SEQ ID NO:1852), GI:21618231 (SEQ ID NO:1853), GI:132424657 (SEQ ID NO:1854), GI:26451690 (SEQ ID NO:1855), GI:8493589 (SEQ ID NO:1856), GI:18407708 (SEQ ID NO:1857), GI:58011289 (SEQ ID NO:1858), GI:168040482 (SEQ ID NO:1859), CeresClone:1923949 (SEQ ID NO:1861), CeresAnnot:1478433 (SEQ ID NO:1863), CeresClone:1920037 (SEQ ID NO:1865), GI:225426739 (SEQ ID NO:1866), GI:14348597 (SEQ ID NO:1867), CeresClone:528991 (SEQ ID NO:1869), CeresAnnot:1491629 (SEQ ID NO:1871), GI:118481200 (SEQ ID NO:1872), CeresClone:298091 (SEQ ID NO:1874), CeresClone:558121 (SEQ ID NO:1876), GI:75306683 (SEQ ID NO:1877), CeresAnnot:8643472 (SEQ ID NO:1879), CeresClone:1824153 (SEQ ID NO:1881), GI:168026109 (SEQ ID NO:1882), GI:4098246 (SEQ ID NO:1883), or CeresClone:336323 (SEQ ID NO:1885). In some cases, a functional homolog of SEQ ID NO:1797 has an amino acid sequence with at least 45% sequence identity, e.g., 50%, 52%, 56%, 59%, 61%, 65%, 70%, 75%, 80%, 85%, 90%, 95%, 97%, 98%, or 99% sequence identity, to the amino acid sequence set forth in SEQ ID NO:1797.

[0215] Examples of amino acid sequences of functional homologs of the polypeptide set forth in SEQ ID NO:717 are provided in FIG. 6 and in the Sequence Listing. Such functional homologs include, for example, GI:14578615 (SEQ ID NO:718), GI:4104220 (SEQ ID NO:719), GI:148337324 (SEQ ID NO:720), GI:151579841 (SEQ ID NO:721), GI:115474869 (SEQ ID NO:722), GI:30385246 (SEQ ID NO:723), CeresClone:1824196 (SEQ ID NO:725), GI:14578613 (SEQ ID NO:726), GI:14578611 (SEQ ID NO:727), GI:14578617 (SEQ ID NO:728), CeresClone:1453701 (SEQ ID NO:730), GI:77818928 (SEQ ID NO:731), GI:2388664 (SEQ ID NO:732), GI:145693796 (SEQ ID NO:733), GI:125560205 (SEQ ID NO:734), GI:125602246 (SEQ ID NO:735), CeresClone:1769444 (SEQ ID NO:737), CeresClone:1869486 (SEQ ID NO:739), CeresClone:1769168 (SEQ ID NO:741), CeresAnnot:8704591 (SEQ ID NO:743), GI:29839259 (SEQ ID NO:744), GI:18033964 (SEQ ID NO:745), GI:34398680 (SEQ ID NO:746), or GI:33641708 (SEQ ID NO:747). In some cases, a functional homolog of SEQ ID NO:717 has an amino acid sequence with at least 45% sequence identity, e.g., 50%, 52%, 56%, 59%, 61%, 65%, 70%, 75%, 80%, 85%, 90%, 95%, 97%, 98%, or 99% sequence identity, to the amino acid sequence set forth in SEQ ID NO:717.

[0216] Examples of amino acid sequences of functional homologs of the polypeptide set forth in SEQ ID NO:693 are provided in FIG. 7 and in the Sequence Listing. Such functional homologs include, for example, GI:193237575 (SEQ ID NO:694), CeresAnnot:1443093 (SEQ ID NO:696), GI:147834261 (SEQ ID NO:697), GI:115464101 (SEQ ID NO:698), CeresAnnot:887551 (SEQ ID NO:700), CeresAnnot:1452324 (SEQ ID NO:702), CeresClone:1365932 (SEQ ID NO:704), GI:157352501 (SEQ ID NO:705), GI:225438481 (SEQ ID NO:706), GI:125533543 (SEQ ID NO:707), CeresAnnot:1451017 (SEQ ID NO:709), GI:115484369 (SEQ ID NO:710), CeresAnnot:1456607 (SEQ ID NO:712), CeresAnnot:8683331 (SEQ ID NO:714), or GI:115441277 (SEQ ID NO:715). In some cases, a functional homolog of SEQ ID NO:693 has an amino acid sequence with at least 45% sequence identity, e.g., 50%, 52%, 56%, 59%, 61%, 65%, 70%, 75%, 80%, 85%, 90%, 95%, 97%, 98%, or 99% sequence identity, to the amino acid sequence set forth in SEQ ID NO:693.

[0217] Examples of amino acid sequences of functional homologs of the polypeptide set forth in SEQ ID NO:1518 are provided in FIG. 8 and in the Sequence Listing. Such functional homologs include, for example, CeresClone:1671049 (SEQ ID NO:1520), CeresAnnot:8651870 (SEQ ID NO:1522), GI:115478142 (SEQ ID NO:1523), GI:115349940 (SEQ ID NO:1524), GI:84468390 (SEQ ID NO:1525), GI:157273672 (SEQ ID NO:1526), CeresClone:4620 (SEQ ID NO:1528), GI:84871616 (SEQ ID NO:1529), CeresClone:664500 (SEQ ID NO:1531), CeresClone:1995956 (SEQ ID NO:1533), GI:194706396 (SEQ ID NO:1534), GI:115475872 (SEQ ID NO:1535), CeresClone:700193 (SEQ ID NO:1537), GI:115349890 (SEQ ID NO:1538), CeresAnnot:8725185 (SEQ ID NO:1540), CeresClone:1409995 (SEQ ID NO:1542), CeresClone:1726596 (SEQ ID NO:1544), CeresClone:1790253 (SEQ ID NO:1546), GI:125602970 (SEQ ID NO:1547), CeresClone:1895671 (SEQ ID NO:1549), GI:13377778 (SEQ ID NO:1550), CeresClone:1929508 (SEQ ID NO:1552), CeresAnnot:1494487 (SEQ ID NO:1554), GI:147798736 (SEQ ID NO:1555), CeresAnnot:8461260 (SEQ ID NO:1557), GI:157273654 (SEQ ID NO:1558), CeresClone:1884727 (SEQ ID NO:1560), CeresAnnot:1466294 (SEQ ID NO:1562), GI:157273656 (SEQ ID NO:1563), GI:157351001 (SEQ ID NO:1564), GI:157353205 (SEQ ID NO:1565), or CeresClone:257067 (SEQ ID NO:1567). In some cases, a functional homolog of SEQ ID NO:1518 has an amino acid sequence with at least 45% sequence identity, e.g., 50%, 52%, 56%, 59%, 61%, 65%, 70%, 75%, 80%, 85%, 90%, 95%, 97%, 98%, or 99% sequence identity, to the amino acid sequence set forth in SEQ ID NO:1518.

[0218] Examples of amino acid sequences of functional homologs of the polypeptide set forth in SEQ ID NO:1624 are provided in FIG. 9 and in the Sequence Listing. Such functional homologs include, for example, CeresClone:292606 (SEQ ID NO:1626), CeresAnnot:8743842 (SEQ ID NO:1628), GI:115469272 (SEQ ID NO:1629), GI:157343111 (SEQ ID NO:1630), CeresClone:1841546 (SEQ ID NO:1632), CeresAnnot:1478288 (SEQ ID NO:1634), CeresClone:463953 (SEQ ID NO:1636), GI:18394547 (SEQ ID NO:1637), CeresClone:2016499 (SEQ ID NO:1639), GI:125556307 (SEQ ID NO:1640), CeresClone:1996507 (SEQ ID NO:1642), CeresAnnot:1454854 (SEQ ID NO:1644), CeresClone:1393254 (SEQ ID NO:1646), GI:116788501 (SEQ ID NO:1647), GI:30698929 (SEQ ID NO:1648), GI:75098650 (SEQ ID NO:1649), GI:168058075 (SEQ ID NO:1650), CeresClone:19576 (SEQ ID NO:1652), CeresClone:1823703 (SEQ ID NO:1654), CeresAnnot:8743837 (SEQ ID NO:1656), GI:115469270 (SEQ ID NO:1657), or GI:125556305 (SEQ ID NO:1658). In some cases, a functional homolog of SEQ ID NO:1624 has an amino acid sequence with at least 45% sequence identity, e.g., 50%, 52%, 56%, 59%, 61%, 65%, 70%, 75%, 80%, 85%, 90%, 95%, 97%, 98%, or 99% sequence identity, to the amino acid sequence set forth in SEQ ID NO:1624.

[0219] Examples of amino acid sequences of functional homologs of the polypeptide set forth in SEQ ID NO:1887 are provided in FIG. 10 and in the Sequence Listing. Such functional homologs include, for example, CeresClone:1724783 (SEQ ID NO:1889), CeresClone:1724784 (SEQ ID NO:1891), CeresClone:1724785 (SEQ ID NO:1893), CeresClone:1724786 (SEQ ID NO:1894), CeresClone:1724787 (SEQ ID NO:1895), CeresClone:1724788 (SEQ ID NO:1897), CeresClone:1724789 (SEQ ID NO:1898), CeresClone:1724790 (SEQ ID NO:1900), CeresClone:1724791 (SEQ ID NO:1902), CeresClone:1724792 (SEQ ID NO:1903), CeresClone:1724793 (SEQ ID NO:1904), CeresClone:1724794 (SEQ ID NO:1906), CeresClone:1724795 (SEQ ID NO:1908), CeresClone:1724796 (SEQ ID NO:1910), CeresClone:1724797 (SEQ ID NO:1912), CeresClone:1724798 (SEQ ID NO:1913), CeresClone:1724799 (SEQ ID NO:1915), CeresClone:1724800 (SEQ ID NO:1917), CeresClone:1724801 (SEQ ID NO:1918), CeresClone:1724802 (SEQ ID NO:1919), CeresClone:1724803 (SEQ ID NO:1920), CeresClone:1724804 (SEQ ID NO:1922), CeresClone:1724805 (SEQ ID NO:1924), CeresClone:1724806 (SEQ ID NO:1926), CeresClone:1724807 (SEQ ID NO:1928), CeresClone:1724808 (SEQ ID NO:1929), CeresClone:1724809 (SEQ ID NO:1931), CeresClone:1724810 (SEQ ID NO:1933), CeresClone:1724811 (SEQ ID NO:1935), CeresClone:1724812 (SEQ ID NO:1936), CeresClone:1724813 (SEQ ID NO:1938), CeresClone:1724814 (SEQ ID NO:1940), CeresClone:1724815 (SEQ ID NO:1942), or CeresClone:1724816 (SEQ ID NO:1944). In some cases, a functional homolog of SEQ ID NO:1887 has an amino acid sequence with at least 45% sequence identity, e.g., 50%, 52%, 56%, 59%, 61%, 65%, 70%, 75%, 80%, 85%, 90%, 95%, 97%, 98%, or 99% sequence identity, to the amino acid sequence set forth in SEQ ID NO:1887.

[0220] Examples of amino acid sequences of functional homologs of the polypeptide set forth in SEQ ID NO:834 are provided in FIG. 11 and in the Sequence Listing. Such functional homologs include, for example, CeresAnnot:8701141 (SEQ ID NO:836), CeresClone:917740 (SEQ ID NO:838), CeresClone:101143919 (SEQ ID NO:840), CeresClone:1858677 (SEQ ID NO:842), GI:125571017 (SEQ ID NO:843), or GI:53791578 (SEQ ID NO:844). In some cases, a functional homolog of SEQ ID NO:834 has an amino acid sequence with at least 45% sequence identity, e.g., 50%, 52%, 56%, 59%, 61%, 65%, 70%, 75%, 80%, 85%, 90%, 95%, 97%, 98%, or 99% sequence identity, to the amino acid sequence set forth in SEQ ID NO:834.

[0221] Examples of amino acid sequences of functional homologs of the polypeptide set forth in SEQ ID NO:1318 are provided in FIG. 12 and in the Sequence Listing. Such functional homologs include, for example, CeresClone:1816881 (SEQ ID NO:1320), CeresClone:100825990 (SEQ ID NO:1322), CeresAnnot:8722479 (SEQ ID NO:1324), GI:55701143 (SEQ ID NO:1325), GI:146335701 (SEQ ID NO:1326), CeresAnnot:1467253 (SEQ ID NO:1328), GI:225436825 (SEQ ID NO:1329), GI:116793602 (SEQ ID NO:1330), CeresClone:1922578 (SEQ ID NO:1332), GI:575605 (SEQ ID NO:1333), GI:575603 (SEQ ID NO:1334), CeresClone:1725430 (SEQ ID NO:1336), CeresClone:1402519 (SEQ ID NO:1338), GI:146289957 (SEQ ID NO:1339), GI:115436654 (SEQ ID NO:1340), GI:122726082 (SEQ ID NO:1341), GI:225432418 (SEQ ID NO:1342), GI:157336355 (SEQ ID NO:1343), GI:115469560 (SEQ ID NO:1344), GI:55701045 (SEQ ID NO:1345), CeresClone:1528781 (SEQ ID NO:1347), CeresAnnot:8632045 (SEQ ID NO:1349), GI:194701190 (SEQ ID NO:1350), CeresAnnot:8659657 (SEQ ID NO:1352), GI:125535203 (SEQ ID NO:1353), CeresClone:293854 (SEQ ID NO:1355), CeresClone:1559089 (SEQ ID NO:1357), GI:115486535 (SEQ ID NO:1358), GI:115467740 (SEQ ID NO:1359), GI:125555057 (SEQ ID NO:1360), GI:15225011 (SEQ ID NO:1361), CeresAnnot:8643832 (SEQ ID NO:1363), GI:118484065 (SEQ ID NO:1364), CeresAnnot:1488035 (SEQ ID NO:1366), GI:51970718 (SEQ ID NO:1367), CeresAnnot:8464351 (SEQ ID NO:1369), GI:115435890 (SEQ ID NO:1370), GI:115472505 (SEQ ID NO:1371), GI:125558613 (SEQ ID NO:1372), GI:225447326 (SEQ ID NO:1373), CeresClone:909358 (SEQ ID NO:1375), GI:115444399 (SEQ ID NO:1376), GI:125538188 (SEQ ID NO:1377), CeresAnnot:8457856 (SEQ ID NO:1379), GI:15220463 (SEQ ID NO:1380), GI:21536908 (SEQ ID NO:1381), GI:50261255 (SEQ ID NO:1382), CeresClone:757325 (SEQ ID NO:1384), CeresAnnot:8643830 (SEQ ID NO:1386), CeresAnnot:8744201 (SEQ ID NO:1388), GI:55700915 (SEQ ID NO:1389), CeresClone:1923915 (SEQ ID NO:1391), CeresClone:114862 (SEQ ID NO:1393), CeresAnnot:1509237 (SEQ ID NO:1395), CeresClone:100906383 (SEQ ID NO:1397), CeresClone:1796942 (SEQ ID NO:1399), CeresClone:1777201 (SEQ ID NO:1401), GI:54290444 (SEQ ID NO:1402), GI:147772815 (SEQ ID NO:1403), CeresClone:280031 (SEQ ID NO:1405), CeresAnnot:1456042 (SEQ ID NO:1407), CeresClone:39952 (SEQ ID NO:1409), GI:225447324 (SEQ ID NO:1410), CeresClone:1982544 (SEQ ID NO:1412), CeresAnnot:863218 (SEQ ID NO:1414), CeresAnnot:8733417 (SEQ ID NO:1416), CeresAnnot:8671598 (SEQ ID NO:1418), CeresClone:1004743 (SEQ ID NO:1420), GI:212274719 (SEQ ID NO:1421), GI:678547 (SEQ ID NO:1422), or CeresAnnot:1488034 (SEQ ID NO:1424). In some cases, a functional homolog of SEQ ID NO:1318 has an amino acid sequence with at least 45% sequence identity, e.g., 50%, 52%, 56%, 59%, 61%, 65%, 70%, 75%, 80%, 85%, 90%, 95%, 97%, 98%, or 99% sequence identity, to the amino acid sequence set forth in SEQ ID NO:1318.

[0222] Examples of amino acid sequences of functional homologs of the polypeptide set forth in SEQ ID NO:459 are provided in FIG. 13 and in the Sequence Listing. Such functional homologs include, for example, CeresClone:219838 (SEQ ID NO:461), GI:115468072 (SEQ ID NO:462), CeresClone:819125 (SEQ ID NO:464), CeresAnnot:8678791 (SEQ ID NO:466), GI:55792425 (SEQ ID NO:467), GI:194702014 (SEQ ID NO:468), GI:125563028 (SEQ ID NO:469), GI:115445865 (SEQ ID NO:470), CeresClone:1784280 (SEQ ID NO:472), CeresAnnot:8681869 (SEQ ID NO:474), GI:31296712 (SEQ ID NO:475), CeresAnnot:8659077 (SEQ ID NO:477), CeresAnnot:8659066 (SEQ ID NO:479), GI:194690360 (SEQ ID NO:480), CeresClone:375289 (SEQ ID NO:482), GI:212274959 (SEQ ID NO:483), GI:115434208 (SEQ ID NO:484), GI:56409854 (SEQ ID NO:485), CeresClone:1748522 (SEQ ID NO:487), GI:115457236 (SEQ ID NO:488), GI:116317832 (SEQ ID NO:489), GI:115434210 (SEQ ID NO:490), GI:56409856 (SEQ ID NO:491), GI:125568815 (SEQ ID NO:492), GI:31296713 (SEQ ID NO:493), GI:125524186 (SEQ ID NO:494), GI:55792424 (SEQ ID NO:495), CeresAnnot:8659052 (SEQ ID NO:497), or CeresAnnot:8659059 (SEQ ID NO:499). In some cases, a functional homolog of SEQ ID NO:459 has an amino acid sequence with at least 45% sequence identity, e.g., 50%, 52%, 56%, 59%, 61%, 65%, 70%, 75%, 80%, 85%, 90%, 95%, 97%, 98%, or 99% sequence identity, to the amino acid sequence set forth in SEQ ID NO:459.

[0223] Examples of amino acid sequences of functional homologs of the polypeptide set forth in SEQ ID NO:335 are provided in FIG. 14 and in the Sequence Listing. Such functional homologs include, for example, CeresClone:1988535 (SEQ ID NO:337), GI:21326123 (SEQ ID NO:338), CeresAnnot:8632623 (SEQ ID NO:340), CeresClone:702826 (SEQ ID NO:342), GI:13236659 (SEQ ID NO:343), CeresAnnot:8632621 (SEQ ID NO:345), GI:115455443 (SEQ ID NO:346), GI:125545776 (SEQ ID NO:347), CeresAnnot:8632620 (SEQ ID NO:349), GI:115455447 (SEQ ID NO:350), GI:115455451 (SEQ ID NO:351), CeresAnnot:8632618 (SEQ ID NO:353), GI:13236658 (SEQ ID NO:354), GI:125587975 (SEQ ID NO:355), CeresClone:1776335 (SEQ ID NO:357), GI:157341250 (SEQ ID NO:358), CeresAnnot:1450062 (SEQ ID NO:360), CeresAnnot:8632619 (SEQ ID NO:362), GI:157342353 (SEQ ID NO:363), GI:21326128 (SEQ ID NO:364), GI:157341249 (SEQ ID NO:365), CeresAnnot:1450233 (SEQ ID NO:367), CeresAnnot:1476898 (SEQ ID NO:369), GI:147802898 (SEQ ID NO:370), GI:157342349 (SEQ ID NO:371), GI:157342357 (SEQ ID NO:372), GI:147822731 (SEQ ID NO:373), GI:157341247 (SEQ ID NO:374), GI:157342350 (SEQ ID NO:375), CeresClone:1933155 (SEQ ID NO:377), GI:157341834 (SEQ ID NO:378), GI:157341251 (SEQ ID NO:379), GI:157342355 (SEQ ID NO:380), CeresClone:678597 (SEQ ID NO:382), GI:157342346 (SEQ ID NO:383), GI:147782587 (SEQ ID NO:384), GI:21326126 (SEQ ID NO:385), GI:125531499 (SEQ ID NO:386), GI:22655755 (SEQ ID NO:387), CeresAnnot:8454605 (SEQ ID NO:389), GI:212721816 (SEQ ID NO:390), GI:157342345 (SEQ ID NO:391), CeresAnnot:8456560 (SEQ ID NO:393), CeresAnnot:8632034 (SEQ ID NO:395), GI:10953887 (SEQ ID NO:396), CeresClone:463302 (SEQ ID NO:398), CeresClone:337235 (SEQ ID NO:400), or WO2008034648-136421 (SEQ ID NO:401). In some cases, a functional homolog of SEQ ID NO:335 has an amino acid sequence with at least 45% sequence identity, e.g., 50%, 52%, 56%, 59%, 61%, 65%, 70%, 75%, 80%, 85%, 90%, 95%, 97%, 98%, or 99% sequence identity, to the amino acid sequence set forth in SEQ ID NO:335.

[0224] Examples of amino acid sequences of functional homologs of the polypeptide set forth in SEQ ID NO:846 are provided in FIG. 15 and in the Sequence Listing. Such functional homologs include, for example, CeresAnnot:8670072 (SEQ ID NO:848), GI:162460449 (SEQ ID NO:849), GI:56409862 (SEQ ID NO:850), GI:115482674 (SEQ ID NO:851), CeresClone:1770027 (SEQ ID NO:853), CeresClone:100815759 (SEQ ID NO:855), GI:46390169 (SEQ ID NO:856), GI:115445889 (SEQ ID NO:857), GI:125581917 (SEQ ID NO:858), CeresAnnot:8734902 (SEQ ID NO:860), GI:125539258 (SEQ ID NO:861), CeresClone:1726616 (SEQ ID NO:863), GI:115444075 (SEQ ID NO:864), CeresClone:825530 (SEQ ID NO:866), CeresAnnot:8671335 (SEQ ID NO:868), CeresClone:1795292 (SEQ ID NO:870), GI:125580725 (SEQ ID NO:871), CeresAnnot:8744577 (SEQ ID NO:873), GI:115469852 (SEQ ID NO:874), or CeresClone:845464 (SEQ ID NO:876). In some cases, a functional homolog of SEQ ID NO:846 has an amino acid sequence with at least 45% sequence identity, e.g., 50%, 52%, 56%, 59%, 61%, 65%, 70%, 75%, 80%, 85%, 90%, 95%, 97%, 98%, or 99% sequence identity, to the amino acid sequence set forth in SEQ ID NO:846.

[0225] Examples of amino acid sequences of functional homologs of the polypeptide set forth in SEQ ID NO:1426 are provided in FIG. 16 and in the Sequence Listing. Such functional homologs include, for example, CeresClone:729979 (SEQ ID NO:1428), GI:115448365 (SEQ ID NO:1429), CeresClone:1451881 (SEQ ID NO:1431), CeresAnnot:8680955 (SEQ ID NO:1433), CeresClone:1047334 (SEQ ID NO:1435), CeresClone:6841 (SEQ ID NO:1437), CeresAnnot:1495176 (SEQ ID NO:1439), GI:225446345 (SEQ ID NO:1440), GI:3868853 (SEQ ID NO:1441), CeresClone:1727134 (SEQ ID NO:1443), CeresAnnot:8458866 (SEQ ID NO:1445), GI:124484379 (SEQ ID NO:1446), CeresClone:1970015 (SEQ ID NO:1448), CeresClone:1879623 (SEQ ID NO:1450), CeresClone:1994946 (SEQ ID NO:1452), CeresClone:101992420 (SEQ ID NO:1454), CeresClone:1790201 (SEQ ID NO:1456), GI:125540938 (SEQ ID NO:1457), CeresClone:1961617 (SEQ ID NO:1459), CeresClone:236422 (SEQ ID NO:1461), CeresClone:481087 (SEQ ID NO:1463), CeresClone:955288 (SEQ ID NO:1465), CeresClone:628828 (SEQ ID NO:1467), CeresClone:1939564 (SEQ ID NO:1469), CeresClone:100011399 (SEQ ID NO:1471), CeresAnnot:1480568 (SEQ ID NO:1473), CeresClone:1927778 (SEQ ID NO:1475), CeresClone:1446925 (SEQ ID NO:1477), or CeresClone:1727113 (SEQ ID NO:1479). In some cases, a functional homolog of SEQ ID NO:1426 has an amino acid sequence with at least 45% sequence identity, e.g., 50%, 52%, 56%, 59%, 61%, 65%, 70%, 75%, 80%, 85%, 90%, 95%, 97%, 98%, or 99% sequence identity, to the amino acid sequence set forth in SEQ ID NO:1426.

[0226] Examples of amino acid sequences of functional homologs of the polypeptide set forth in SEQ ID NO:2525 are provided in FIG. 17 and in the Sequence Listing. Such functional homologs include, for example, CeresClone:100892614 (SEQ ID NO:2527), CeresAnnot:8692947 (SEQ ID NO:2529), GI:53791709 (SEQ ID NO:2530), GI:55416171 (SEQ ID NO:2531), CeresClone:1019755 (SEQ ID NO:2533), CeresClone:1956225 (SEQ ID NO:2535), CeresClone:379196 (SEQ ID NO:2537), CeresClone:275753 (SEQ ID NO:2539), GI:125525841 (SEQ ID NO:2540), GI:37700483 (SEQ ID NO:2541), or GI:42454402 (SEQ ID NO:2542). In some cases, a functional homolog of SEQ ID NO:2525 has an amino acid sequence with at least 45% sequence identity, e.g., 50%, 52%, 56%, 59%, 61%, 65%, 70%, 75%, 80%, 85%, 90%, 95%, 97%, 98%, or 99% sequence identity, to the amino acid sequence set forth in SEQ ID NO:2525.

[0227] Examples of amino acid sequences of functional homologs of the polypeptide set forth in SEQ ID NO:1272 are provided in FIG. 18 and in the Sequence Listing. Such functional homologs include, for example, CeresAnnot:8726250 (SEQ ID NO:1274), CeresClone:899059 (SEQ ID NO:1276), CeresClone:945132 (SEQ ID NO:1278), GI:115462673 (SEQ ID NO:1279), CeresClone:16400 (SEQ ID NO:1281), CeresClone:1712201 (SEQ ID NO:1283), CeresAnnot:1524669 (SEQ ID NO:1285), CeresAnnot:8672987 (SEQ ID NO:1287), CeresClone:1434951 (SEQ ID NO:1289), CeresClone:299745 (SEQ ID NO:1291), CeresClone:323696 (SEQ ID NO:1293), GI:194695666 (SEQ ID NO:1294), CeresClone:1771257 (SEQ ID NO:1296), GI:115445433 (SEQ ID NO:1297), CeresAnnot:8667876 (SEQ ID NO:1299), GI:115438957 (SEQ ID NO:1300), CeresClone:1100814 (SEQ ID NO:1302), CeresClone:1029710 (SEQ ID NO:1304), CeresClone:969326 (SEQ ID NO:1306), CeresClone:100955392 (SEQ ID NO:1308), GI:225454450 (SEQ ID NO:1309), GI:116779724 (SEQ ID NO:1310), CeresAnnot:1447561 (SEQ ID NO:1312), GI:20149060 (SEQ ID NO:1313), GI:225462683 (SEQ ID NO:1314), or CeresClone:595099 (SEQ ID NO:1316). In some cases, a functional homolog of SEQ ID NO:1272 has an amino acid sequence with at least 45% sequence identity, e.g., 50%, 52%, 56%, 59%, 61%, 65%, 70%, 75%, 80%, 85%, 90%, 95%, 97%, 98%, or 99% sequence identity, to the amino acid sequence set forth in SEQ ID NO:1272.

[0228] Examples of amino acid sequences of functional homologs of the polypeptide set forth in SEQ ID NO:878 are provided in FIG. 19 and in the Sequence Listing. Such functional homologs include, for example, CeresAnnot:8701398 (SEQ ID NO:880), CeresClone:2030878 (SEQ ID NO:882), GI:21741986 (SEQ ID NO:883), CeresClone:488555 (SEQ ID NO:885), CeresAnnot:1472210 (SEQ ID NO:887), CeresClone:1778664 (SEQ ID NO:889), GI:115458882 (SEQ ID NO:890), CeresAnnot:8701404 (SEQ ID NO:892), GI:115458830 (SEQ ID NO:893), CeresAnnot:8701387 (SEQ ID NO:895), GI:116310418 (SEQ ID NO:896), GI:46806258 (SEQ ID NO:897), CeresAnnot:8679943 (SEQ ID NO:899), CeresAnnot:8701391 (SEQ ID NO:901), GI:46806257 (SEQ ID NO:902), GI:125540058 (SEQ ID NO:903), CeresClone:1018979 (SEQ ID NO:905), CeresClone:1725423 (SEQ ID NO:907), GI:115446965 (SEQ ID NO:908), GI:125540059 (SEQ ID NO:909), GI:115458886 (SEQ ID NO:910), CeresClone:1955791 (SEQ ID NO:912), CeresClone:2032166 (SEQ ID NO:914), GI:125540060 (SEQ ID NO:915), GI:46806261 (SEQ ID NO:916), GI:115458884 (SEQ ID NO:917), CeresClone:100178733 (SEQ ID NO:919), CeresClone:351547 (SEQ ID NO:921), CeresClone:1906874 (SEQ ID NO:923), CeresClone:1885857 (SEQ ID NO:925), GI:38606532 (SEQ ID NO:926), CeresClone:1771513 (SEQ ID NO:928), CeresClone:1950928 (SEQ ID NO:930), CeresClone:273420 (SEQ ID NO:932), CeresAnnot:8701399 (SEQ ID NO:934), GI:194700536 (SEQ ID NO:935), GI:125540061 (SEQ ID NO:936), GI:115446971 (SEQ ID NO:937), CeresClone:1802499 (SEQ ID NO:939), CeresClone:1839543 (SEQ ID NO:941), CeresClone:1850157 (SEQ ID NO:943), or CeresClone:1471240 (SEQ ID NO:945). In some cases, a functional homolog of SEQ ID NO:878 has an amino acid sequence with at least 45% sequence identity, e.g., 50%, 52%, 56%, 59%, 61%, 65%, 70%, 75%, 80%, 85%, 90%, 95%, 97%, 98%, or 99% sequence identity, to the amino acid sequence set forth in SEQ ID NO:878.

[0229] Examples of amino acid sequences of functional homologs of the polypeptide set forth in SEQ ID NO:1660 are provided in FIG. 20 and in the Sequence Listing. Such functional homologs include, for example, GI:157355547 (SEQ ID NO:1661), GI:124360659 (SEQ ID NO:1662), CeresAnnot:1527994 (SEQ ID NO:1664), CeresClone:1150649 (SEQ ID NO:1666), CeresAnnot:8681260 (SEQ ID NO:1668), GI:15220471 (SEQ ID NO:1669), GI:2388565 (SEQ ID NO:1670), GI:147825336 (SEQ ID NO:1671), GI:157356769 (SEQ ID NO:1672), CeresAnnot:1485042 (SEQ ID NO:1674), CeresAnnot:861154 (SEQ ID NO:1676), GI:27754550 (SEQ ID NO:1677), CeresAnnot:8647624 (SEQ ID NO:1679), GI:115480795 (SEQ ID NO:1680), GI:15241163 (SEQ ID NO:1681), GI:157342726 (SEQ ID NO:1682), GI:147776052 (SEQ ID NO:1683), GI:168034634 (SEQ ID NO:1684), CeresAnnot:1446775 (SEQ ID NO:1686), CeresClone:1926613 (SEQ ID NO:1688), GI:115464955 (SEQ ID NO:1689), CeresClone:1640838 (SEQ ID NO:1691), CeresClone:1829495 (SEQ ID NO:1693), CeresAnnot:8668633 (SEQ ID NO:1695), CeresClone:797976 (SEQ ID NO:1697), CeresClone:853161 (SEQ ID NO:1699), GI:168033534 (SEQ ID NO:1700), GI:115439873 (SEQ ID NO:1701), GI:116794391 (SEQ ID NO:1702), CeresClone:39717 (SEQ ID NO:1704), GI:15238111 (SEQ ID NO:1705), GI:157327785 (SEQ ID NO:1706), GI:38345478 (SEQ ID NO:1707), GI:9758778 (SEQ ID NO:1708), CeresClone:560813 (SEQ ID NO:1710), GI:89257516 (SEQ ID NO:1711), GI:168033536 (SEQ ID NO:1712), GI:167999009 (SEQ ID NO:1713), GI:168051768 (SEQ ID NO:1714), GI:89257486 (SEQ ID NO:1715), CeresAnnot:1484806 (SEQ ID NO:1717), CeresAnnot:8702233 (SEQ ID NO:1719), CeresAnnot:8463390 (SEQ ID NO:1721), CeresAnnot:1480738 (SEQ ID NO:1723), GI:168023639 (SEQ ID NO:1724), or GI:157342478 (SEQ ID NO:1725). In some cases, a functional homolog of SEQ ID NO:1660 has an amino acid sequence with at least 45% sequence identity, e.g., 50%, 52%, 56%, 59%, 61%, 65%, 70%, 75%, 80%, 85%, 90%, 95%, 97%, 98%, or 99% sequence identity, to the amino acid sequence set forth in SEQ ID NO:1660.

[0230] Examples of amino acid sequences of functional homologs of the polypeptide set forth in SEQ ID NO:2654 are provided in FIG. 21 and in the Sequence Listing. Such functional homologs include, for example, CeresAnnot:8701724 (SEQ ID NO:2656), CeresClone:1531656 (SEQ ID NO:2658), GI:115456900 (SEQ ID NO:2659), CeresClone:869980 (SEQ ID NO:2661), CeresClone:1739862 (SEQ ID NO:2663), CeresAnnot:1452831 (SEQ ID NO:2665), CeresClone:1123182 (SEQ ID NO:2667), GI:225427800 (SEQ ID NO:2668), CeresClone:100011527 (SEQ ID NO:2670), CeresClone:1347664 (SEQ ID NO:2672), CeresClone:679875 (SEQ ID NO:2674), GI:116780182 (SEQ ID NO:2675), CeresClone:1606594 (SEQ ID NO:2677), CeresClone:1628000 (SEQ ID NO:2679), CeresClone:1710212 (SEQ ID NO:2681), CeresClone:1649408 (SEQ ID NO:2683), CeresClone:1964117 (SEQ ID NO:2685), CeresClone:660530 (SEQ ID NO:2687), CeresClone:1330898 (SEQ ID NO:2689), CeresClone:1751352 (SEQ ID NO:2691), CeresClone:1068004 (SEQ ID NO:2693), CeresAnnot:1442596 (SEQ ID NO:2695), CeresClone:1898903 (SEQ ID NO:2697), CeresClone:266374 (SEQ ID NO:2699), CeresClone:120248 (SEQ ID NO:2701), CeresAnnot:1513988 (SEQ ID NO:2703), GI:118481824 (SEQ ID NO:2704), or CeresClone:872136 (SEQ ID NO:2706). In some cases, a functional homolog of SEQ ID NO:2654 has an amino acid sequence with at least 45% sequence identity, e.g., 50%, 52%, 56%, 59%, 61%, 65%, 70%, 75%, 80%, 85%, 90%, 95%, 97%, 98%, or 99% sequence identity, to the amino acid sequence set forth in SEQ ID NO:2654.

[0231] Examples of amino acid sequences of functional homologs of the polypeptide set forth in SEQ ID NO:1137 are provided in FIG. 22 and in the Sequence Listing. Such functional homologs include, for example, CeresClone:331755 (SEQ ID NO:1139), CeresAnnot:8667653 (SEQ ID NO:1141), GI:115465643 (SEQ ID NO:1142), CeresAnnot:1487827 (SEQ ID NO:1144), CeresClone:1069222 (SEQ ID NO:1146), CeresClone:1722230 (SEQ ID NO:1148), CeresClone:1763593 (SEQ ID NO:1150), CeresClone:1910072 (SEQ ID NO:1152), CeresClone:1761808 (SEQ ID NO:1154), CeresAnnot:8734209 (SEQ ID NO:1156), GI:125526974 (SEQ ID NO:1157), GI:115438765 (SEQ ID NO:1158), CeresClone:1523182 (SEQ ID NO:1160), CeresAnnot:1450327 (SEQ ID NO:1162), CeresClone:143475 (SEQ ID NO:1164), CeresAnnot:1514100 (SEQ ID NO:1166), CeresAnnot:1460832 (SEQ ID NO:1168), GI:147767321 (SEQ ID NO:1169), CeresClone:1723374 (SEQ ID NO:1171), CeresAnnot:1510450 (SEQ ID NO:1173), CeresAnnot:1457249 (SEQ ID NO:1175), GI:157335318 (SEQ ID NO:1176), GI:124360540 (SEQ ID NO:1177), CeresClone:100002959 (SEQ ID NO:1179), GI:147784500 (SEQ ID NO:1180), GI:157340812 (SEQ ID NO:1181), CeresClone:477814 (SEQ ID NO:1183), CeresClone:1785685 (SEQ ID NO:1185), CeresClone:1653552 (SEQ ID NO:1187), GI:110931736 (SEQ ID NO:1188), CeresClone:638126 (SEQ ID NO:1190), CeresAnnot:838426 (SEQ ID NO:1192), GI:145327247 (SEQ ID NO:1193), GI:124264312 (SEQ ID NO:1194), CeresClone:1847251 (SEQ ID NO:1196), CeresAnnot:543794 (SEQ ID NO:1198), CeresAnnot:850366 (SEQ ID NO:1200), GI:145356202 (SEQ ID NO:1201), CeresAnnot:8734211 (SEQ ID NO:1203), CeresClone:857342 (SEQ ID NO:1205), CeresAnnot:827713 (SEQ ID NO:1207), CeresClone:1113584 (SEQ ID NO:1209), GI:118137433 (SEQ ID NO:1210), CeresAnnot:1460824 (SEQ ID NO:1212), CeresAnnot:1503394 (SEQ ID NO:1214), CeresClone:1916884 (SEQ ID NO:1216), CeresClone:100068619 (SEQ ID NO:1218), GI:5091605 (SEQ ID NO:1219), CeresClone:1897493 (SEQ ID NO:1221), GI:125553458 (SEQ ID NO:1222), CeresAnnot:1495620 (SEQ ID NO:1224), CeresAnnot:1442707 (SEQ ID NO:1226), CeresAnnot:8461532 (SEQ ID NO:1228), CeresClone:100067803 (SEQ ID NO:1230), CeresAnnot:1679467 (SEQ ID NO:1232), CeresClone:41695 (SEQ ID NO:1234), GI:112292440 (SEQ ID NO:1235), GI:116830269 (SEQ ID NO:1236), CeresClone:1914387 (SEQ ID NO:1238), CeresAnnot:1445878 (SEQ ID NO:1240), GI:7981380 (SEQ ID NO:1241), CeresClone:1927753 (SEQ ID NO:1243), CeresAnnot:8456508 (SEQ ID NO:1245), CeresClone:1086604 (SEQ ID NO:1247), CeresClone:1787372 (SEQ ID NO:1249), CeresClone:2034321 (SEQ ID NO: 1251), GI:112292438 (SEQ ID NO:1252), GI:118489684 (SEQ ID NO:1253), CeresAnnot:8667941 (SEQ ID NO:1255), CeresClone:100965215 (SEQ ID NO:1257), CeresAnnot:8461540 (SEQ ID NO:1259), CeresAnnot:1457231 (SEQ ID NO:1261), CeresAnnot:1457230 (SEQ ID NO:1263), CeresAnnot:1510435 (SEQ ID NO:1265), GI:125553354 (SEQ ID NO:1266), CeresClone:343607 (SEQ ID NO:1268), or CeresClone:100865050 (SEQ ID NO:1270). In some cases, a functional homolog of SEQ ID NO:1137 has an amino acid sequence with at least 45% sequence identity, e.g., 50%, 52%, 56%, 59%, 61%, 65%, 70%, 75%, 80%, 85%, 90%, 95%, 97%, 98%, or 99% sequence identity, to the amino acid sequence set forth in SEQ ID NO:1137.

[0232] Examples of amino acid sequences of functional homologs of the polypeptide set forth in SEQ ID NO:2466 are provided in FIG. 23 and in the Sequence Listing. Such functional homologs include, for example, CeresAnnot:8715706 (SEQ ID NO:2468), GI:115488372 (SEQ ID NO:2469), GI:114217393 (SEQ ID NO:2470), GI:84579373 (SEQ ID NO:2471), GI:34148077 (SEQ ID NO:2472), CeresAnnot:1543402 (SEQ ID NO:2474), GI:18403090 (SEQ ID NO:2475), GI:7939617 (SEQ ID NO:2476), GI:108862584 (SEQ ID NO:2477), GI:61162194 (SEQ ID NO:2478), CeresClone:1152402 (SEQ ID NO:2480), CeresAnnot:1490015 (SEQ ID NO:2482), GI:168045621 (SEQ ID NO:2483), GI:116787095 (SEQ ID NO:2484), GI:6686888 (SEQ ID NO:2485), GI:56201401 (SEQ ID NO:2486), GI:4510395 (SEQ ID NO:2487), GI:115451981 (SEQ ID NO:2488), GI:125543160 (SEQ ID NO:2489), GI:14970841 (SEQ ID NO:2490), GI:125583741 (SEQ ID NO:2491), CeresAnnot:8642086 (SEQ ID NO:2493), GI:157337481 (SEQ ID NO:2494), GI:61162203 (SEQ ID NO:2495), GI:168008096 (SEQ ID NO:2496), GI:7939619 (SEQ ID NO:2497), GI:183238710 (SEQ ID NO:2498), GI:7939623 (SEQ ID NO:2499), GI:114217395 (SEQ ID NO:2500), CeresAnnot:1515371 (SEQ ID NO:2502), GI:157313304 (SEQ ID NO:2503), CeresAnnot:1462072 (SEQ ID NO:2505), GI:1352077 (SEQ ID NO:2506), GI:108707233 (SEQ ID NO:2507), CeresClone:1860044 (SEQ ID NO:2509), GI:15231354 (SEQ ID NO:2510), GI:20260596 (SEQ ID NO:2511), GI:14970839 (SEQ ID NO:2512), GI:157340015 (SEQ ID NO:2513), GI:118488890 (SEQ ID NO:2514), CeresAnnot:1540596 (SEQ ID NO:2516), GI:61162201 (SEQ ID NO:2517), GI:57232107 (SEQ ID NO:2518), GI:1168654 (SEQ ID NO:2519), CeresAnnot:1543613 (SEQ ID NO:2521), GI:115437888 (SEQ ID NO:2522), or GI:124360385 (SEQ ID NO:2523). In some cases, a functional homolog of SEQ ID NO:2466 has an amino acid sequence with at least 45% sequence identity, e.g., 50%, 52%, 56%, 59%, 61%, 65%, 70%, 75%, 80%, 85%, 90%, 95%, 97%, 98%, or 99% sequence identity, to the amino acid sequence set forth in SEQ ID NO:2466.

[0233] Examples of amino acid sequences of functional homologs of the polypeptide set forth in SEQ ID NO:1107 are provided in FIG. 24 and in the Sequence Listing. Such functional homologs include, for example, GI:56409848 (SEQ ID NO:1108), CeresAnnot:8659084 (SEQ ID NO:1110), GI:31339690 (SEQ ID NO:1111), GI:115434204 (SEQ ID NO:1112), GI:56409850 (SEQ ID NO:1113), GI:162460428 (SEQ ID NO:1114), GI:56409844 (SEQ ID NO:1115), CeresClone:1888614 (SEQ ID NO:1117), CeresAnnot:8740887 (SEQ ID NO:1119), GI:115453815 (SEQ ID NO:1120), GI:125544555 (SEQ ID NO:1121), GI:115445881 (SEQ ID NO:1122), CeresClone:1957829 (SEQ ID NO:1124), CeresAnnot:8674833 (SEQ ID NO:1126), CeresClone:914572 (SEQ ID NO:1128), CeresClone:343865 (SEQ ID NO:1130), CeresClone:322206 (SEQ ID NO:1132), GI:77554062 (SEQ ID NO:1133), or CeresAnnot:8659080 (SEQ ID NO:1135). In some cases, a functional homolog of SEQ ID NO:1107 has an amino acid sequence with at least 45% sequence identity, e.g., 50%, 52%, 56%, 59%, 61%, 65%, 70%, 75%, 80%, 85%, 90%, 95%, 97%, 98%, or 99% sequence identity, to the amino acid sequence set forth in SEQ ID NO:1107.

[0234] Examples of amino acid sequences of functional homologs of the polypeptide set forth in SEQ ID NO:1946 are provided in FIG. 25 and in the Sequence Listing. Such functional homologs include, for example, CeresClone:1910014 (SEQ ID NO:1948), GI:194697480 (SEQ ID NO:1949), CeresClone:2056605 (SEQ ID NO:1951), CeresClone:1914331 (SEQ ID NO:1953), CeresClone:1886911 (SEQ ID NO:1955), CeresAnnot:8733425 (SEQ ID NO:1957), CeresClone:1754974 (SEQ ID NO:1959), CeresClone:1988346 (SEQ ID NO:1961), CeresClone:918401 (SEQ ID NO:1963), CeresClone:353187 (SEQ ID NO:1965), CeresClone:1726495 (SEQ ID NO:1967), CeresAnnot:8733426 (SEQ ID NO:1969), CeresAnnot:8733429 (SEQ ID NO:1971), GI:194701962 (SEQ ID NO:1972), GI:115464717 (SEQ ID NO:1973), GI:125534461 (SEQ ID NO:1974), GI:115464719 (SEQ ID NO:1975), GI:115464721 (SEQ ID NO:1976), CeresClone:280182 (SEQ ID NO:1978), GI:115456097 (SEQ ID NO:1979), GI:125545696 (SEQ ID NO:1980), CeresAnnot:8632742 (SEQ ID NO:1982), GI:115455283 (SEQ ID NO:1983), CeresAnnot:8667668 (SEQ ID NO:1985), GI:115438785 (SEQ ID NO:1986), GI:125526997 (SEQ ID NO:1987), CeresAnnot:8667665 (SEQ ID NO:1989), GI:157335556 (SEQ ID NO:1990), CeresClone:464566 (SEQ ID NO:1992), CeresClone:678511 (SEQ ID NO:1994), CeresAnnot:1494030 (SEQ ID NO:1996), GI:115438196 (SEQ ID NO:1997), CeresAnnot:8667669 (SEQ ID NO:1999), GI:125571055 (SEQ ID NO:2000), CeresAnnot:1441129 (SEQ ID NO:2002), GI:125526697 (SEQ ID NO:2003), CeresClone:847251 (SEQ ID NO:2005), CeresClone:463175 (SEQ ID NO:2007), GI:125526698 (SEQ ID NO:2008), GI:147839909 (SEQ ID NO:2009), GI:157341038 (SEQ ID NO:2010), GI:50284482 (SEQ ID NO:2011), CeresClone:577260 (SEQ ID NO:2013), CeresAnnot:1461026 (SEQ ID NO:2015), GI:82880420 (SEQ ID NO:2016), GI:18418380 (SEQ ID NO:2017), GI:125524633 (SEQ ID NO:2018), GI:115481308 (SEQ ID NO:2019), CeresAnnot:8656592 (SEQ ID NO:2021), GI:2911049 (SEQ ID NO:2022), GI:125526993 (SEQ ID NO:2023), GI:125531288 (SEQ ID NO:2024), or CeresAnnot:1443816 (SEQ ID NO:2026). In some cases, a functional homolog of SEQ ID NO:1946 has an amino acid sequence with at least 45% sequence identity, e.g., 50%, 52%, 56%, 59%, 61%, 65%, 70%, 75%, 80%, 85%, 90%, 95%, 97%, 98%, or 99% sequence identity, to the amino acid sequence set forth in SEQ ID NO:1946.

[0235] Examples of amino acid sequences of functional homologs of the polypeptide set forth in SEQ ID NO:1054 are provided in FIG. 26 and in the Sequence Listing. Such functional homologs include, for example, CeresClone:300029 (SEQ ID NO:1056), CeresAnnot:8670788 (SEQ ID NO:1058), CeresClone:243057 (SEQ ID NO:1060), GI:115442487 (SEQ ID NO:1061), GI:21594350 (SEQ ID NO:1062), CeresAnnot:8460479 (SEQ ID NO:1064), CeresClone:1948444 (SEQ ID NO:1066), GI:225465764 (SEQ ID NO:1067), CeresClone:1995643 (SEQ ID NO:1069), GI:162462229 (SEQ ID NO:1070), GI:125529268 (SEQ ID NO:1071), GI:194689614 (SEQ ID NO:1072), CeresAnnot:863641 (SEQ ID NO:1074), CeresClone:1969770 (SEQ ID NO:1076), GI:14596185 (SEQ ID NO:1077), GI:225436371 (SEQ ID NO:1078), GI:85718018 (SEQ ID NO:1079), CeresClone:28205 (SEQ ID NO:1081), CeresAnnot:1541782 (SEQ ID NO:1083), CeresClone:1936952 (SEQ ID NO:1085), CeresClone:1459647 (SEQ ID NO:1087), GI:37379419 (SEQ ID NO:1088), CeresAnnot:1460446 (SEQ ID NO:1090), CeresAnnot:1488364 (SEQ ID NO:1092), GI:45935133 (SEQ ID NO:1093), CeresClone:1874074 (SEQ ID NO:1095), GI:225464984 (SEQ ID NO:1096), GI:147771536 (SEQ ID NO:1097), CeresClone:6892 (SEQ ID NO:1099), CeresClone:1047104 (SEQ ID NO:1101), GI:168063797 (SEQ ID NO:1102), CeresClone:100063067 (SEQ ID NO:1104), or GI:85376636 (SEQ ID NO:1105). In some cases, a functional homolog of SEQ ID NO:1054 has an amino acid sequence with at least 45% sequence identity, e.g., 50%, 52%, 56%, 59%, 61%, 65%, 70%, 75%, 80%, 85%, 90%, 95%, 97%, 98%, or 99% sequence identity, to the amino acid sequence set forth in SEQ ID NO:1054.

[0236] Examples of amino acid sequences of functional homologs of the polypeptide set forth in SEQ ID NO:115 are provided in FIG. 27 and in the Sequence Listing. Such functional homologs include, for example, CeresAnnot:8670354 (SEQ ID NO:117), CeresClone:363483 (SEQ ID NO:119), GI:115441965 (SEQ ID NO:120), GI:225456511 (SEQ ID NO:121), GI:150246869 (SEQ ID NO:122), GI:116793780 (SEQ ID NO:123), GI:18424516 (SEQ ID NO:124), CeresAnnot:1447833 (SEQ ID NO:126), CeresClone:1904977 (SEQ ID NO:128), GI:125528940 (SEQ ID NO:129), CeresAnnot:8670355 (SEQ ID NO:131), CeresClone:313262 (SEQ ID NO:133), CeresClone:1807519 (SEQ ID NO:135), CeresAnnot:8670356 (SEQ ID NO:137), CeresAnnot:8733886 (SEQ ID NO:139), GI:212276027 (SEQ ID NO:140), GI:115458146 (SEQ ID NO:141), GI:194708308 (SEQ ID NO:142), CeresClone:1471197 (SEQ ID NO:144), CeresClone:244622 (SEQ ID NO:146), GI:194700342 (SEQ ID NO:147), GI:194704652 (SEQ ID NO:148), GI:115441969 (SEQ ID NO:149), GI:49389081 (SEQ ID NO:150), CeresClone:1788372 (SEQ ID NO:152), CeresAnnot:8679199 (SEQ ID NO:154), GI:125582313 (SEQ ID NO:155), CeresAnnot:8699946 (SEQ ID NO:157), GI:212275360 (SEQ ID NO:158), CeresClone:246342 (SEQ ID NO:160), CeresClone:1875736 (SEQ ID NO:162), GI:115441967 (SEQ ID NO:163), CeresAnnot:8733887 (SEQ ID NO:165), CeresClone:2008277 (SEQ ID NO:167), CeresAnnot:1522137 (SEQ ID NO:169), CeresClone:280575 (SEQ ID NO:171), CeresAnnot:1522133 (SEQ ID NO:173), CeresAnnot:8460007 (SEQ ID NO:175), GI:194706890 (SEQ ID NO:176), CeresClone:34861 (SEQ ID NO:178), CeresClone:206413 (SEQ ID NO:180), CeresAnnot:1491074 (SEQ ID NO:182), GI:60657598 (SEQ ID NO:183), CeresAnnot:8733056 (SEQ ID NO:185), CeresAnnot:8458833 (SEQ ID NO:187), CeresClone:1818144 (SEQ ID NO:189), CeresAnnot:1468764 (SEQ ID NO:191), CeresAnnot:1468760 (SEQ ID NO:193), GI:115481310 (SEQ ID NO:194), GI:21671946 (SEQ ID NO:195), GI:18642697 (SEQ ID NO:196), GI:168000965 (SEQ ID NO:197), GI:23821292 (SEQ ID NO:198), GI:157359959 (SEQ ID NO:199), GI:125539672 (SEQ ID NO:200), GI:10176877 (SEQ ID NO:201), CeresClone:2013135 (SEQ ID NO:203), CeresClone:910275 (SEQ ID NO:205), CeresAnnot:1438255 (SEQ ID NO:207), GI:39725600 (SEQ ID NO:208), or GI:110288702 (SEQ ID NO:209). In some cases, a functional homolog of SEQ ID NO:115 has an amino acid sequence with at least 45% sequence identity, e.g., 50%, 52%, 56%, 59%, 61%, 65%, 70%, 75%, 80%, 85%, 90%, 95%, 97%, 98%, or 99% sequence identity, to the amino acid sequence set forth in SEQ ID NO:115.

[0237] Examples of amino acid sequences of functional homologs of the polypeptide set forth in SEQ ID NO:2708 are provided in FIG. 28 and in the Sequence Listing. Such functional homologs include, for example, CeresAnnot:8726940 (SEQ ID NO:2710), GI:212274887 (SEQ ID NO:2711), GI:225461808 (SEQ ID NO:2712), CeresClone:1920439 (SEQ ID NO:2714), CeresAnnot:1482328 (SEQ ID NO:2716), GI:115452247 (SEQ ID NO:2717), CeresAnnot:869962 (SEQ ID NO:2719), CeresAnnot:8461116 (SEQ ID NO:2721), GI:168046471 (SEQ ID NO:2722), CeresClone:1792946 (SEQ ID NO:2724), CeresClone:351260 (SEQ ID NO:2726), CeresAnnot:8641839 (SEQ ID NO:2728), CeresClone:1951869 (SEQ ID NO:2730), CeresAnnot:8641817 (SEQ ID NO:2732), CeresClone:1920196 (SEQ ID NO:2734), GI:15231926 (SEQ ID NO:2735), GI:42562732 (SEQ ID NO:2736), CeresClone:1924612 (SEQ ID NO:2738), GI:168054569 (SEQ ID NO:2739), GI:168028758 (SEQ ID NO:2740), GI:225464343 (SEQ ID NO:2741), CeresAnnot:1480867 (SEQ ID NO:2743), CeresAnnot:8464234 (SEQ ID NO:2745), or GI:116056148 (SEQ ID NO:2746). In some cases, a functional homolog of SEQ ID NO:2708 has an amino acid sequence with at least 45% sequence identity, e.g., 50%, 52%, 56%, 59%, 61%, 65%, 70%, 75%, 80%, 85%, 90%, 95%, 97%, 98%, or 99% sequence identity, to the amino acid sequence set forth in SEQ ID NO:2708.

[0238] Examples of amino acid sequences of functional homologs of the polypeptide set forth in SEQ ID NO:1481 are provided in FIG. 29 and in the Sequence Listing. Such functional homologs include, for example, GI:194701352 (SEQ ID NO:1482), GI:63087724 (SEQ ID NO:1483), CeresAnnot:8724648 (SEQ ID NO:1485), GI:115461821 (SEQ ID NO:1486), CeresAnnot:1528801 (SEQ ID NO:1488), GI:225439900 (SEQ ID NO:1489), GI:33771692 (SEQ ID NO:1490), CeresClone:547127 (SEQ ID NO:1492), GI:162459701 (SEQ ID NO:1493), CeresAnnot:8641721 (SEQ ID NO:1495), CeresClone:1788804 (SEQ ID NO:1497), GI:115452359 (SEQ ID NO:1498), CeresClone:1819717 (SEQ ID NO:1500), CeresClone:1558521 (SEQ ID NO:1502), GI:108707574 (SEQ ID NO:1503), CeresClone:575502 (SEQ ID NO:1505), GI:150246871 (SEQ ID NO:1506), GI:60657596 (SEQ ID NO:1507), GI:145408198 (SEQ ID NO:1508), GI:63087726 (SEQ ID NO:1509), CeresAnnot:1538289 (SEQ ID NO:1511), GI:60657594 (SEQ ID NO:1512), CeresAnnot:1475351 (SEQ ID NO:1514), GI:61673388 (SEQ ID NO:1515), or GI:15228084 (SEQ ID NO:1516). In some cases, a functional homolog of SEQ ID NO:1481 has an amino acid sequence with at least 45% sequence identity, e.g., 50%, 52%, 56%, 59%, 61%, 65%, 70%, 75%, 80%, 85%, 90%, 95%, 97%, 98%, or 99% sequence identity, to the amino acid sequence set forth in SEQ ID NO:1481.

[0239] Examples of amino acid sequences of functional homologs of the polypeptide set forth in SEQ ID NO:2748 are provided in FIG. 30 and in the Sequence Listing. Such functional homologs include, for example, CeresClone:1790340 (SEQ ID NO:2748), CeresClone:327425 (SEQ ID NO:2750), GI:115444129 (SEQ ID NO:2751), CeresClone:1152436 (SEQ ID NO:2753), GI:157353536 (SEQ ID NO:2754), CeresAnnot:1482019 (SEQ ID NO:2756), CeresClone:651435 (SEQ ID NO:2758), CeresAnnot:8458215 (SEQ ID NO:2760), CeresClone:114877 (SEQ ID NO:2762), CeresClone:2007431 (SEQ ID NO:2764), CeresClone:1875367 (SEQ ID NO:2766), CeresClone:1882421 (SEQ ID NO:2768), CeresAnnot:1469752 (SEQ ID NO:2770), GI:115468738 (SEQ ID NO:2771), GI:46518473 (SEQ ID NO:2772), GI:15224778 (SEQ ID NO:2773), CeresClone:1810424 (SEQ ID NO:2775), CeresClone:1559140 (SEQ ID NO:2777), GI:16604491 (SEQ ID NO:2778), CeresClone:1795733 (SEQ ID NO:2780), GI:115475361 (SEQ ID NO:2781), GI:125560593 (SEQ ID NO:2782), CeresAnnot:1507103 (SEQ ID NO:2784), CeresAnnot:1453959 (SEQ ID NO:2786), CeresAnnot:1480967 (SEQ ID NO:2788), CeresAnnot:1476972 (SEQ ID NO:2790), GI:15235840 (SEQ ID NO:2791), GI:157342450 (SEQ ID NO:2792), CeresAnnot:1455089 (SEQ ID NO:2794), CeresClone:1581235 (SEQ ID NO:2796), GI:116789946 (SEQ ID NO:2797), CeresClone:790682 (SEQ ID NO:2799), CeresClone:1926644 (SEQ ID NO:2801), GI:125544205 (SEQ ID NO:2802), GI:30017525 (SEQ ID NO:2803), GI:225441645 (SEQ ID NO:2804), CeresClone:616565 (SEQ ID NO:2806), GI:225438519 (SEQ ID NO:2807), CeresAnnot:1523133 (SEQ ID NO:2809), GI:15242078 (SEQ ID NO:2810), GI:115454419 (SEQ ID NO:2811), CeresAnnot:1532670 (SEQ ID NO:2813), CeresClone:1788618 (SEQ ID NO:2815), GI:225445328 (SEQ ID NO:2816), CeresClone:1596827 (SEQ ID NO:2818), GI:124365582 (SEQ ID NO:2819), CeresClone:1786326 (SEQ ID NO:2821), GI:48374979 (SEQ ID NO:2822), GI:18483232 (SEQ ID NO:2823), CeresClone:1597530 (SEQ ID NO:2825), GI:37223500 (SEQ ID NO:2826), CeresAnnot:1479207 (SEQ ID NO:2828), CeresAnnot:8705326 (SEQ ID NO:2830), CeresAnnot:8458673 (SEQ ID NO:2832), GI:115470771 (SEQ ID NO:2833), CeresAnnot:1477929 (SEQ ID NO:2835), GI:194691368 (SEQ ID NO:2836), CeresAnnot:1456572 (SEQ ID NO:2838), CeresClone:940271 (SEQ ID NO:2840), CeresClone:1790079 (SEQ ID NO:2842), CeresAnnot:1509765 (SEQ ID NO:2844), GI:77551687 (SEQ ID NO:2845), GI:125577601 (SEQ ID NO:2846), GI:125534858 (SEQ ID NO:2847), CeresClone:1551402 (SEQ ID NO:2849), GI:42563478 (SEQ ID NO:2850), GI:125597725 (SEQ ID NO:2851), GI:15217739 (SEQ ID NO:2852), GI:15230097 (SEQ ID NO:2853), CeresClone:445269 (SEQ ID NO:2855), GI:15238768 (SEQ ID NO:2856), GI:115465107 (SEQ ID NO:2857), GI:5042412 (SEQ ID NO:2858), GI:194705838 (SEQ ID NO:2859), CeresAnnot:1533786 (SEQ ID NO:2861), GI:124360899 (SEQ ID NO:2862), GI:115475910 (SEQ ID NO:2863), GI:125561098 (SEQ ID NO:2864), CeresAnnot:887555 (SEQ ID NO:2866), GI:115478288 (SEQ ID NO:2867), GI:147845562 (SEQ ID NO:2868), GI:157329499 (SEQ ID NO:2869), GI:168046763 (SEQ ID NO:2870), CeresAnnot:1480316 (SEQ ID NO:2872), GI:168003834 (SEQ ID NO:2873), CeresAnnot:877895 (SEQ ID NO:2875), GI:125602994 (SEQ ID NO:2876), GI:89257617 (SEQ ID NO:2877), or GI:168041780 (SEQ ID NO:2878). In some cases, a functional homolog of SEQ ID NO:2748 has an amino acid sequence with at least 45% sequence identity, e.g., 50%, 52%, 56%, 59%, 61%, 65%, 70%, 75%, 80%, 85%, 90%, 95%, 97%, 98%, or 99% sequence identity, to the amino acid sequence set forth in SEQ ID NO:2748.

[0240] Examples of amino acid sequences of functional homologs of the polypeptide set forth in SEQ ID NO:947 are provided in FIG. 31 and in the Sequence Listing. Such functional homologs include, for example, CeresAnnot:8713285 (SEQ ID NO:949), GI:194706702 (SEQ ID NO:950), CeresClone:569098 (SEQ ID NO:952), GI:115479225 (SEQ ID NO:953), CeresClone:298496 (SEQ ID NO:955), CeresClone:1534877 (SEQ ID NO:957), CeresAnnot:8713281 (SEQ ID NO:959), GI:125563758 (SEQ ID NO:960), CeresClone:333204 (SEQ ID NO:962), CeresAnnot:8654155 (SEQ ID NO:964), GI:125554333 (SEQ ID NO:965), CeresAnnot:8658834 (SEQ ID NO:967), GI:115466798 (SEQ ID NO:968), CeresClone:1788581 (SEQ ID NO:970), CeresClone:245537 (SEQ ID NO:972), CeresAnnot:8682006 (SEQ ID NO:974), CeresClone:1032064 (SEQ ID NO:976), CeresClone:725011 (SEQ ID NO:978), CeresAnnot:8654153 (SEQ ID NO:980), GI:115477609 (SEQ ID NO:981), CeresClone:1903575 (SEQ ID NO:983), CeresClone:221247 (SEQ ID NO:985), GI:194701434 (SEQ ID NO:986), GI:125562404 (SEQ ID NO:987), CeresAnnot:8754033 (SEQ ID NO:989), CeresAnnot:8658583 (SEQ ID NO:991), CeresAnnot:8658570 (SEQ ID NO:993), CeresAnnot:8658589 (SEQ ID NO:995), CeresAnnot:8658592 (SEQ ID NO:997), GI:125554336 (SEQ ID NO:998), CeresAnnot:8658566 (SEQ ID NO:1000), CeresAnnot:8653415 (SEQ ID NO:1002), GI:125554335 (SEQ ID NO:1003), CeresAnnot:8735477 (SEQ ID NO:1005), CeresClone:1995174 (SEQ ID NO:1007), GI:194707128 (SEQ ID NO:1008), GI:115466808 (SEQ ID NO:1009), CeresAnnot:8701741 (SEQ ID NO:1011), CeresClone:788394 (SEQ ID NO:1013), GI:115459250 (SEQ ID NO:1014), CeresClone:764333 (SEQ ID NO:1016), CeresAnnot:8735476 (SEQ ID NO:1018), CeresAnnot:8735473 (SEQ ID NO:1020), CeresClone:465877 (SEQ ID NO:1022), GI:194700936 (SEQ ID NO:1023), GI:115484487 (SEQ ID NO:1024), GI:125576435 (SEQ ID NO:1025), GI:115447257 (SEQ ID NO:1026), GI:82568711 (SEQ ID NO:1027), CeresClone:786100 (SEQ ID NO:1029), CeresClone:1920450 (SEQ ID NO:1031), CeresClone:1920870 (SEQ ID NO:1033), GI:32400295 (SEQ ID NO:1034), CeresClone:1920088 (SEQ ID NO:1036), CeresClone:741711 (SEQ ID NO:1038), GI:32400293 (SEQ ID NO:1039), CeresClone:886187 (SEQ ID NO:1041), GI:115475267 (SEQ ID NO:1042), GI:6469032 (SEQ ID NO:1043), GI:73671233 (SEQ ID NO:1044), GI:70663907 (SEQ ID NO:1045), GI:212722240 (SEQ ID NO:1046), CeresClone:1691303 (SEQ ID NO:1048), GI:32400291 (SEQ ID NO:1049), GI:40644899 (SEQ ID NO:1050), GI:40253398 (SEQ ID NO:1051), or GI:139538848 (SEQ ID NO:1052). In some cases, a functional homolog of SEQ ID NO:947 has an amino acid sequence with at least 45% sequence identity, e.g., 50%, 52%, 56%, 59%, 61%, 65%, 70%, 75%, 80%, 85%, 90%, 95%, 97%, 98%, or 99% sequence identity, to the amino acid sequence set forth in SEQ ID NO:947.

[0241] Examples of amino acid sequences of functional homologs of the polypeptide set forth in SEQ ID NO:1727 are provided in FIG. 32 and in the Sequence Listing. Such functional homologs include, for example, CeresAnnot:8735802 (SEQ ID NO:1729), CeresClone:292537 (SEQ ID NO:1731), GI:51090388 (SEQ ID NO:1732), CeresClone:732524 (SEQ ID NO:1734), GI:115467066 (SEQ ID NO:1735), CeresAnnot:8735801 (SEQ ID NO:1737), CeresClone:1807095 (SEQ ID NO:1739), CeresClone:2024952 (SEQ ID NO:1741), CeresClone:281110 (SEQ ID NO:1743), CeresAnnot:8735800 (SEQ ID NO:1745), GI:115479613 (SEQ ID NO:1746), GI:82697943 (SEQ ID NO:1747), CeresAnnot:8713623 (SEQ ID NO:1749), CeresClone:243558 (SEQ ID NO:1751), CeresClone:816193 (SEQ ID NO:1753), CeresAnnot:8654590 (SEQ ID NO:1755), CeresClone:1725434 (SEQ ID NO:1757), GI:125596482 (SEQ ID NO:1758), GI:115476880 (SEQ ID NO:1759), CeresClone:1814324 (SEQ ID NO:1761), GI:125554537 (SEQ ID NO:1762), CeresClone:1031198 (SEQ ID NO:1764), GI:115479609 (SEQ ID NO:1765), GI:116310075 (SEQ ID NO:1766), GI:115476872 (SEQ ID NO:1767), CeresClone:1989171 (SEQ ID NO:1769), GI:115479603 (SEQ ID NO:1770), CeresClone:100896047 (SEQ ID NO:1772), GI:42408206 (SEQ ID NO:1773), GI:125564014 (SEQ ID NO:1774), CeresClone:457826 (SEQ ID NO:1776), GI:157335490 (SEQ ID NO:1777), CeresClone:1017543 (SEQ ID NO:1779), CeresClone:219954 (SEQ ID NO:1781), CeresAnnot:8654584 (SEQ ID NO:1783), GI:115476870 (SEQ ID NO:1784), CeresClone:1446903 (SEQ ID NO:1786), CeresClone:1907709 (SEQ ID NO:1788), CeresAnnot:8722921 (SEQ ID NO:1790), CeresAnnot:8735798 (SEQ ID NO:1792), CeresAnnot:8713597 (SEQ ID NO:1794), or GI:225428761 (SEQ ID NO:1795). In some cases, a functional homolog of SEQ ID NO:1727 has an amino acid sequence with at least 45% sequence identity, e.g., 50%, 52%, 56%, 59%, 61%, 65%, 70%, 75%, 80%, 85%, 90%, 95%, 97%, 98%, or 99% sequence identity, to the amino acid sequence set forth in SEQ ID NO:1727.

[0242] Examples of amino acid sequences of functional homologs of the polypeptide set forth in SEQ ID NO:2146 are provided in FIG. 33 and in the Sequence Listing. Such functional homologs include, for example, CeresAnnot:8735532 (SEQ ID NO:2148), GI:162463323 (SEQ ID NO:2149), GI:115466870 (SEQ ID NO:2150), GI:136746 (SEQ ID NO:2151), GI:57157447 (SEQ ID NO:2152), GI:225435965 (SEQ ID NO:2153), GI:77732554 (SEQ ID NO:2154), CeresAnnot:882862 (SEQ ID NO:2156), CeresClone:1769212 (SEQ ID NO:2158), GI:104303700 (SEQ ID NO:2159), GI:136745 (SEQ ID NO:2160), GI:104303696 (SEQ ID NO:2161), GI:104303698 (SEQ ID NO:2162), GI:55741074 (SEQ ID NO:2163), CeresClone:1900402 (SEQ ID NO:2165), CeresAnnot:8656644 (SEQ ID NO:2167), CeresClone:100743430 (SEQ ID NO:2169), GI:125557238 (SEQ ID NO:2170), GI:115470585 (SEQ ID NO:2171), GI:125554377 (SEQ ID NO:2172), GI:13620855 (SEQ ID NO:2173), GI:13620861 (SEQ ID NO:2174), GI:13620869 (SEQ ID NO:2175), GI:149350038 (SEQ ID NO:2176), GI:13620857 (SEQ ID NO:2177), GI:40645337 (SEQ ID NO:2178), GI:133874214 (SEQ ID NO:2179), CeresAnnot:1486671 (SEQ ID NO:2181), CeresClone:1851632 (SEQ ID NO:2183), GI:133874216 (SEQ ID NO:2184), CeresAnnot:1540082 (SEQ ID NO:2186), GI:51872677 (SEQ ID NO:2187), or GI:157343279 (SEQ ID NO:2188). In some cases, a functional homolog of SEQ ID NO:2146 has an amino acid sequence with at least 45% sequence identity, e.g., 50%, 52%, 56%, 59%, 61%, 65%, 70%, 75%, 80%, 85%, 90%, 95%, 97%, 98%, or 99% sequence identity, to the amino acid sequence set forth in SEQ ID NO:2146.

[0243] Examples of amino acid sequences of functional homologs of the polypeptide set forth in SEQ ID NO:2619 are provided in FIG. 34 and in the Sequence Listing. Such functional homologs include, for example, CeresClone:240112 (SEQ ID NO:2621), CeresAnnot:8632546 (SEQ ID NO:2623), GI:115455537 (SEQ ID NO:2624), CeresClone:630408 (SEQ ID NO:2626), GI:102139855 (SEQ ID NO:2627), GI:147860059 (SEQ ID NO:2628), GI:118486821 (SEQ ID NO:2629), CeresClone:1104471 (SEQ ID NO:2631), GI:125588020 (SEQ ID NO:2632), CeresClone:537690 (SEQ ID NO:2634), CeresClone:1828957 (SEQ ID NO:2636), CeresAnnot:8644036 (SEQ ID NO:2638), CeresClone:285434 (SEQ ID NO:2640), GI:115470343 (SEQ ID NO:2641), GI:125557053 (SEQ ID NO:2642), CeresClone:225486 (SEQ ID NO:2644), CeresAnnot:1733246 (SEQ ID NO:2646), GI:147858322 (SEQ ID NO:2647), GI:115489338 (SEQ ID NO:2648), GI:125537206 (SEQ ID NO:2649), GI:157340951 (SEQ ID NO:2650), or CeresClone:560820 (SEQ ID NO:2652). In some cases, a functional homolog of SEQ ID NO:2619 has an amino acid sequence with at least 45% sequence identity, e.g., 50%, 52%, 56%, 59%, 61%, 65%, 70%, 75%, 80%, 85%, 90%, 95%, 97%, 98%, or 99% sequence identity, to the amino acid sequence set forth in SEQ ID NO:2619.

[0244] Examples of amino acid sequences of functional homologs of the polypeptide set forth in SEQ ID NO:211 are provided in FIG. 35 and in the Sequence Listing. Such functional homologs include, for example, CeresAnnot:8643337 (SEQ ID NO:213), GI:212275494 (SEQ ID NO:214), GI:115450541 (SEQ ID NO:215), CeresAnnot:1450642 (SEQ ID NO:217), GI:1781042 (SEQ ID NO:218), GI:33414050 (SEQ ID NO:219), GI:90287922 (SEQ ID NO:220), CeresClone:1672778 (SEQ ID NO:222), GI:1800141 (SEQ ID NO:223), GI:3892724 (SEQ ID NO:224), CeresClone:1319431 (SEQ ID NO:226), CeresClone:1074387 (SEQ ID NO:228), GI:544015 (SEQ ID NO:229), CeresAnnot:1513807 (SEQ ID NO:231), GI:190588358 (SEQ ID NO:232), GI:17932712 (SEQ ID NO:233), GI:4960049 (SEQ ID NO:234), GI:33414052 (SEQ ID NO:235), GI:30844174 (SEQ ID NO:236), GI:116349 (SEQ ID NO:237), GI:6573210 (SEQ ID NO:238), GI:116314 (SEQ ID NO:239), GI:584928 (SEQ ID NO:240), CeresClone:1851776 (SEQ ID NO:242), CeresClone:862325 (SEQ ID NO:244), GI:67867096 (SEQ ID NO:245), GI:116321 (SEQ ID NO:246), GI:11558417 (SEQ ID NO:247), GI:3126965 (SEQ ID NO:248), GI:10880381 (SEQ ID NO:249), GI:256133 (SEQ ID NO:250), GI:1705807 (SEQ ID NO:251), GI:30844172 (SEQ ID NO:252), CeresClone:705065 (SEQ ID NO:254), GI:38261495 (SEQ ID NO:255), GI:17932710 (SEQ ID NO:256), GI:125552257 (SEQ ID NO:257), GI:48237775 (SEQ ID NO:258), GI:38371990 (SEQ ID NO:259), GI:1705813 (SEQ ID NO:260), GI:1354129 (SEQ ID NO:261), GI:561873 (SEQ ID NO:262), GI:3201547 (SEQ ID NO:263), GI:89242716 (SEQ ID NO:264), GI:115470054 (SEQ ID NO:265), GI:17028128 (SEQ ID NO:266), GI:227845 (SEQ ID NO:267), GI:48237771 (SEQ ID NO:268), GI:115463755 (SEQ ID NO:269), GI:157328752 (SEQ ID NO:270), GI:118489654 (SEQ ID NO:271), GI:88659025 (SEQ ID NO:272), GI:147805840 (SEQ ID NO:273), GI:75309544 (SEQ ID NO:274), GI:89275293 (SEQ ID NO:275), GI:407472 (SEQ ID NO:276), GI:10047221 (SEQ ID NO:277), GI:115463753 (SEQ ID NO:278), GI:169990894 (SEQ ID NO:279), CeresClone:2022546 (SEQ ID NO:281), or GI:116786735 (SEQ ID NO:282) In some cases, a functional homolog of SEQ ID NO:211 has an amino acid sequence with at least 45% sequence identity, e.g., 50%, 52%, 56%, 59%, 61%, 65%, 70%, 75%, 80%, 85%, 90%, 95%, 97%, 98%, or 99% sequence identity, to the amino acid sequence set forth in SEQ ID NO:211.

[0245] Examples of amino acid sequences of functional homologs of the polypeptide set forth in SEQ ID NO:629 are provided in FIG. 36 and in the Sequence Listing. Such functional homologs include, for example, CeresAnnot:8702536 (SEQ ID NO:631), CeresClone:222556 (SEQ ID NO:633), GI:44894790 (SEQ ID NO:634), GI:115460126 (SEQ ID NO:635), GI:157347738 (SEQ ID NO:636), GI:18396479 (SEQ ID NO:637), GI:4138912 (SEQ ID NO:638), CeresClone:1722246 (SEQ ID NO:640), CeresClone:100892266 (SEQ ID NO:642), CeresClone:683350 (SEQ ID NO:644), CeresClone:659599 (SEQ ID NO:646), CeresClone:1793544 (SEQ ID NO:648), CeresAnnot:1449519 (SEQ ID NO:650), GI:6714416 (SEQ ID NO:651), CeresAnnot:1487289 (SEQ ID NO:653), GI:29467505 (SEQ ID NO:654), GI:147712812 (SEQ ID NO:655), GI:29467507 (SEQ ID NO:656), GI:29466641 (SEQ ID NO:657), GI:17484121 (SEQ ID NO:658), GI:10180019 (SEQ ID NO:659), GI:38046730 (SEQ ID NO:660), CeresAnnot:1464450 (SEQ ID NO:662), GI:225464253 (SEQ ID NO:663), GI:20502788 (SEQ ID NO:664), GI:6942322 (SEQ ID NO:665), GI:1040875 (SEQ ID NO:666), or GI:167860796 (SEQ ID NO:667). In some cases, a functional homolog of SEQ ID NO:629 has an amino acid sequence with at least 45% sequence identity, e.g., 50%, 52%, 56%, 59%, 61%, 65%, 70%, 75%, 80%, 85%, 90%, 95%, 97%, 98%, or 99% sequence identity, to the amino acid sequence set forth in SEQ ID NO:629.

[0246] Examples of amino acid sequences of functional homologs of the polypeptide set forth in SEQ ID NO:2544 are provided in FIG. 37 and in the Sequence Listing. Such functional homologs include, for example, CeresClone:1806608 (SEQ ID NO:2544), CeresAnnot:8735307 (SEQ ID NO:2546), GI:115466686 (SEQ ID NO:2547), GI:162462869 (SEQ ID NO:2548), CeresAnnot:1478531 (SEQ ID NO:2550), GI:147865342 (SEQ ID NO:2551), GI:15241300 (SEQ ID NO:2552), CeresAnnot:1453769 (SEQ ID NO:2554), CeresAnnot:1532021 (SEQ ID NO:2556), GI:157343006 (SEQ ID NO:2557), GI:50540754 (SEQ ID NO:2558), GI:125546144 (SEQ ID NO:2559), CeresAnnot:8632040 (SEQ ID NO:2561), GI:167100 (SEQ ID NO:2562), CeresClone:1807161 (SEQ ID NO:2564), GI:157348674 (SEQ ID NO:2565), CeresAnnot:8645125 (SEQ ID NO:2567), CeresClone:1533376 (SEQ ID NO:2569), CeresAnnot:1453705 (SEQ ID NO:2571), GI:125557655 (SEQ ID NO:2572), GI:29838631 (SEQ ID NO:2573), GI:115471135 (SEQ ID NO:2574), GI:488787 (SEQ ID NO:2575), GI:91075914 (SEQ ID NO:2576), CeresAnnot:1474940 (SEQ ID NO:2578), CeresAnnot:875520 (SEQ ID NO:2580), GI:7242785 (SEQ ID NO:2581), CeresAnnot:1528375 (SEQ ID NO:2583), GI:148925503 (SEQ ID NO:2584), GI:42408863 (SEQ ID NO:2585), CeresAnnot:1480477 (SEQ ID NO:2587), GI:23452226 (SEQ ID NO:2588), GI:29838629 (SEQ ID NO:2589), GI:157353289 (SEQ ID NO:2590), CeresClone:927786 (SEQ ID NO:2592), GI:87128422 (SEQ ID NO:2593), GI:168002098 (SEQ ID NO:2594), GI:15222768 (SEQ ID NO:2595), or CeresClone:1768954 (SEQ ID NO:2597). In some cases, a functional homolog of SEQ ID NO:2544 has an amino acid sequence with at least 45% sequence identity, e.g., 50%, 52%, 56%, 59%, 61%, 65%, 70%, 75%, 80%, 85%, 90%, 95%, 97%, 98%, or 99% sequence identity, to the amino acid sequence set forth in SEQ ID NO:2544.

[0247] Examples of amino acid sequences of functional homologs of the polypeptide set forth in SEQ ID NO:2599 are provided in FIG. 38 and in the Sequence Listing. Such functional homologs include, for example, CeresAnnot:8654883 (SEQ ID NO:2601), CeresClone:236513 (SEQ ID NO:2603), GI:115479865 (SEQ ID NO:2604), CeresClone:1857333 (SEQ ID NO:2606), CeresAnnot:1528328 (SEQ ID NO:2608), GI:18410809 (SEQ ID NO:2609), CeresClone:1905277 (SEQ ID NO:2611), GI:194697548 (SEQ ID NO:2612), CeresAnnot:1474898 (SEQ ID NO:2614), GI:168063573 (SEQ ID NO:2615), GI:157348638 (SEQ ID NO:2616), or GI:17473561 (SEQ ID NO:2617). In some cases, a functional homolog of SEQ ID NO:2599 has an amino acid sequence with at least 45% sequence identity, e.g., 50%, 52%, 56%, 59%, 61%, 65%, 70%, 75%, 80%, 85%, 90%, 95%, 97%, 98%, or 99% sequence identity, to the amino acid sequence set forth in SEQ ID NO:2599.

[0248] Examples of amino acid sequences of functional homologs of the polypeptide set forth in SEQ ID NO:2437 are provided in FIG. 39 and in the Sequence Listing. Such functional homologs include, for example, CeresAnnot:8656832 (SEQ ID NO:2439), GI:22093785 (SEQ ID NO:2440), GI:71084353 (SEQ ID NO:2441), GI:71084351 (SEQ ID NO:2442), GI:157345040 (SEQ ID NO:2443), CeresAnnot:575801 (SEQ ID NO:2445), GI:544184 (SEQ ID NO:2446), CeresAnnot:1509727 (SEQ ID NO:2448), GI:115473487 (SEQ ID NO:2449), CeresClone:1858312 (SEQ ID NO:2451), GI:99031627 (SEQ ID NO:2452), CeresClone:1190476 (SEQ ID NO:2454), CeresAnnot:1456535 (SEQ ID NO:2456), GI:168016526 (SEQ ID NO:2457), GI:168034311 (SEQ ID NO:2458), GI:168001012 (SEQ ID NO:2459), GI:11095335 (SEQ ID NO:2460), GI:159489864 (SEQ ID NO:2461), GI:145342068 (SEQ ID NO:2462), GI:116061732 (SEQ ID NO:2463), or GI:46360132 (SEQ ID NO:2464). In some cases, a functional homolog of SEQ ID NO:2437 has an amino acid sequence with at least 45% sequence identity, e.g., 50%, 52%, 56%, 59%, 61%, 65%, 70%, 75%, 80%, 85%, 90%, 95%, 97%, 98%, or 99% sequence identity, to the amino acid sequence set forth in SEQ ID NO:2437.

[0249] Examples of amino acid sequences of functional homologs of the polypeptide set forth in SEQ ID NO:2090 are provided in FIG. 40 and in the Sequence Listing. Such functional homologs include, for example, GI:115470521 (SEQ ID NO:2091), GI:84873492 (SEQ ID NO:2092), GI:157351651 (SEQ ID NO:2093), CeresClone:1971052 (SEQ ID NO:2095), CeresAnnot:1520551 (SEQ ID NO:2097), GI:93172441 (SEQ ID NO:2098), CeresClone:913922 (SEQ ID NO:2100), CeresClone:1659137 (SEQ ID NO:2102), CeresClone:2010819 (SEQ ID NO:2104), GI:25553524 (SEQ ID NO:2105), GI:27260937 (SEQ ID NO:2106), CeresClone:1754251 (SEQ ID NO:2108), CeresAnnot:8641586 (SEQ ID NO:2110), CeresClone:1985329 (SEQ ID NO:2112), GI:22329866 (SEQ ID NO:2113), CeresAnnot:8702875 (SEQ ID NO:2115), CeresAnnot:1495011 (SEQ ID NO:2117), GI:24417398 (SEQ ID NO:2118), GI:115474641 (SEQ ID NO:2119), GI:42408459 (SEQ ID NO:2120), GI:125560032 (SEQ ID NO:2121), GI:145324086 (SEQ ID NO:2122), CeresClone:522841 (SEQ ID NO:2124), CeresAnnot:1467188 (SEQ ID NO:2126), CeresClone:1396123 (SEQ ID NO:2128), GI:82592627 (SEQ ID NO:2129), GI:84873496 (SEQ ID NO:2130), CeresAnnot:1442125 (SEQ ID NO:2132), GI:157352102 (SEQ ID NO:2133), CeresAnnot:1453370 (SEQ ID NO:2135), GI:115460580 (SEQ ID NO:2136), GI:90399327 (SEQ ID NO:2137), GI:15241503 (SEQ ID NO:2138), CeresAnnot:1528021 (SEQ ID NO:2140), GI:168042311 (SEQ ID NO:2141), GI:168013276 (SEQ ID NO:2142), GI:168021237 (SEQ ID NO:2143), or GI:168056693 (SEQ ID NO:2144). In some cases, a functional homolog of SEQ ID NO:2090 has an amino acid sequence with at least 45% sequence identity, e.g., 50%, 52%, 56%, 59%, 61%, 65%, 70%, 75%, 80%, 85%, 90%, 95%, 97%, 98%, or 99% sequence identity, to the amino acid sequence set forth in SEQ ID NO:2090.

[0250] Examples of amino acid sequences of functional homologs of the polypeptide set forth in SEQ ID NO:2323 are provided in FIG. 41 and in the Sequence Listing. Such functional homologs include, for example, CeresAnnot:860791 (SEQ ID NO:2325), CeresClone:100899726 (SEQ ID NO:2327), CeresAnnot:8743558 (SEQ ID NO:2329), GI:115469012 (SEQ ID NO:2330), CeresClone:696103 (SEQ ID NO:2332), CeresClone:1930079 (SEQ ID NO:2334), GI:157350602 (SEQ ID NO:2335), CeresAnnot:8743563 (SEQ ID NO:2337), CeresAnnot:8743566 (SEQ ID NO:2339), CeresClone:677424 (SEQ ID NO:2341), CeresAnnot:8743556 (SEQ ID NO:2343), CeresAnnot:8690999 (SEQ ID NO:2345), GI:115469010 (SEQ ID NO:2346), GI:125556115 (SEQ ID NO:2347), GI:212721784 (SEQ ID NO:2348), CeresAnnot:8704900 (SEQ ID NO:2350), CeresAnnot:8743557 (SEQ ID NO:2352), CeresClone:229676 (SEQ ID NO:2354), CeresClone:336720 (SEQ ID NO:2356), GI:194707432 (SEQ ID NO:2357), GI:15226135 (SEQ ID NO:2358), CeresAnnot:8462178 (SEQ ID NO:2360), GI:157358613 (SEQ ID NO:2361), GI:125560374 (SEQ ID NO:2362), CeresClone:477792 (SEQ ID NO:2364), CeresClone:1824941 (SEQ ID NO:2366), GI:157344669 (SEQ ID NO:2367), CeresAnnot:1506214 (SEQ ID NO:2369), CeresAnnot:1442360 (SEQ ID NO:2371), CeresClone:1790816 (SEQ ID NO:2373), CeresClone:1536779 (SEQ ID NO:2375), GI:157344658 (SEQ ID NO:2376), CeresClone:303165 (SEQ ID NO:2378), CeresClone:2008188 (SEQ ID NO:2380), GI:145337634 (SEQ ID NO:2381), CeresClone:569938 (SEQ ID NO:2383), GI:12323980 (SEQ ID NO:2384), CeresAnnot:1442362 (SEQ ID NO:2386), CeresClone:726598 (SEQ ID NO:2388), CeresClone:1814046 (SEQ ID NO:2390), GI:6554472 (SEQ ID NO:2391), GI:116780880 (SEQ ID NO:2392), CeresClone:221950 (SEQ ID NO:2394), CeresAnnot:8654926 (SEQ ID NO:2396), GI:116786601 (SEQ ID NO:2397), CeresAnnot:8654929 (SEQ ID NO:2399), CeresAnnot:8654924 (SEQ ID NO:2401), GI:3341511 (SEQ ID NO:2402), GI:104162062 (SEQ ID NO:2403), CeresClone:1895447 (SEQ ID NO:2405), CeresAnnot:8643098 (SEQ ID NO:2407), GI:25140432 (SEQ ID NO:2408), GI:65306612 (SEQ ID NO:2409), CeresClone:238838 (SEQ ID NO:2411), CeresAnnot:1490817 (SEQ ID NO:2413), CeresAnnot:1448084 (SEQ ID NO:2415), CeresAnnot:8713261 (SEQ ID NO:2417), GI:9964087 (SEQ ID NO:2418), GI:65306614 (SEQ ID NO:2419), CeresClone:1993306 (SEQ ID NO:2421), GI:3242328 (SEQ ID NO:2422), GI:9998901 (SEQ ID NO:2423), GI:194702744 (SEQ ID NO:2424), GI:2058311 (SEQ ID NO:2425), CeresAnnot:1490808 (SEQ ID NO:2427), GI:10304406 (SEQ ID NO:2428), GI:190710713 (SEQ ID NO:2429), GI:50345920 (SEQ ID NO:2430), CeresClone:2022068 (SEQ ID NO:2432), CeresAnnot:8743567 (SEQ ID NO:2434), or GI:212720841 (SEQ ID NO:2435). In some cases, a functional homolog of SEQ ID NO:2323 has an amino acid sequence with at least 45% sequence identity, e.g., 50%, 52%, 56%, 59%, 61%, 65%, 70%, 75%, 80%, 85%, 90%, 95%, 97%, 98%, or 99% sequence identity, to the amino acid sequence set forth in SEQ ID NO:2323

[0251] Examples of amino acid sequences of functional homologs of the polypeptide set forth in SEQ ID NO:2 are provided in FIG. 42 and in the Sequence Listing. Such functional homologs include, for example, CeresAnnot:8703827 (SEQ ID NO:4), GI:115474357 (SEQ ID NO:5), GI:212723110 (SEQ ID NO:6), CeresAnnot:1540152 (SEQ ID NO:8), CeresClone:151034 (SEQ ID NO:10), CeresClone:546186 (SEQ ID NO:12), GI:157352570 (SEQ ID NO:13), CeresClone:1707861 (SEQ ID NO:15), CeresAnnot:8703721 (SEQ ID NO:17), GI:125559843 (SEQ ID NO:18), CeresAnnot:1533215 (SEQ ID NO:20), CeresAnnot:8643427 (SEQ ID NO:22), CeresAnnot:8734475 (SEQ ID NO:24), GI:115483104 (SEQ ID NO:25), GI:115465900 (SEQ ID NO:26), GI:115450461 (SEQ ID NO:27), CeresClone:1579097 (SEQ ID NO:29), GI:38605889 (SEQ ID NO:30), CeresAnnot:849986 (SEQ ID NO:32), CeresAnnot:1486736 (SEQ ID NO:34), GI:125583042 (SEQ ID NO:35), CeresAnnot:827270 (SEQ ID NO:37), GI:157354896 (SEQ ID NO:38), GI:73759951 (SEQ ID NO:39), CeresClone:1848312 (SEQ ID NO:41), CeresAnnot:8702071 (SEQ ID NO:43), CeresAnnot:1692437 (SEQ ID NO:45), CeresAnnot:8681598 (SEQ ID NO:47), CeresAnnot:857774 (SEQ ID NO:49), CeresClone:1944387 (SEQ ID NO:51), CeresAnnot:832306 (SEQ ID NO:53), CeresClone:528201 (SEQ ID NO:55), GI:78499704 (SEQ ID NO:56), GI:194704142 (SEQ ID NO:57), CeresAnnot:836923 (SEQ ID NO:59), GI:115445339 (SEQ ID NO:60), CeresAnnot:8464728 (SEQ ID NO:62), GI:33321040 (SEQ ID NO:63), GI:157360723 (SEQ ID NO:64), GI:10086508 (SEQ ID NO:65), CeresClone:1877937 (SEQ ID NO:67), CeresAnnot:1533211 (SEQ ID NO:69), GI:124360182 (SEQ ID NO:70), GI:194700068 (SEQ ID NO:71), CeresAnnot:1487753 (SEQ ID NO:73), GI:32487489 (SEQ ID NO:74), GI:90399258 (SEQ ID NO:75), or CeresClone:630591 (SEQ ID NO:77). In some cases, a functional homolog of SEQ ID NO:2 has an amino acid sequence with at least 45% sequence identity, e.g., 50%, 52%, 56%, 59%, 61%, 65%, 70%, 75%, 80%, 85%, 90%, 95%, 97%, 98%, or 99% sequence identity, to the amino acid sequence set forth in SEQ ID NO:2.

[0252] Examples of amino acid sequences of functional homologs of the polypeptide set forth in SEQ ID NO:2028 are provided in FIG. 43 and in the Sequence Listing. Such functional homologs include, for example, CeresAnnot:8669366 (SEQ ID NO:2030), GI:157337055 (SEQ ID NO:2031), GI:47900734 (SEQ ID NO:2032), CeresClone:626124 (SEQ ID NO:2034), CeresClone:1411238 (SEQ ID NO:2036), GI:68159360 (SEQ ID NO:2037), GI:116786528 (SEQ ID NO:2038), CeresAnnot:8669367 (SEQ ID NO:2040), GI:56202090 (SEQ ID NO:2041), GI:115440809 (SEQ ID NO:2042), GI:76573313 (SEQ ID NO:2043), GI:15237678 (SEQ ID NO:2044), CeresClone:30064 (SEQ ID NO:2046), GI:115456211 (SEQ ID NO:2047), GI:125588404 (SEQ ID NO:2048), GI:166080305 (SEQ ID NO:2049), CeresClone:931114 (SEQ ID NO:2051), CeresClone:257394 (SEQ ID NO:2053), CeresClone:339107 (SEQ ID NO:2055), GI:212275195 (SEQ ID NO:2056), CeresClone:1986400 (SEQ ID NO:2058), CeresAnnot:8631946 (SEQ ID NO:2060), CeresAnnot:8631947 (SEQ ID NO:2062), CeresClone:100845730 (SEQ ID NO:2064), CeresAnnot:1543142 (SEQ ID NO:2066), GI:15226955 (SEQ ID NO:2067), CeresClone:114042 (SEQ ID NO:2069), GI:157354338 (SEQ ID NO:2070), CeresClone:625502 (SEQ ID NO:2072), GI:2981475 (SEQ ID NO:2073), GI:17978649 (SEQ ID NO:2074), GI:115476626 (SEQ ID NO:2075), GI:170286897 (SEQ ID NO:2076), GI:162458118 (SEQ ID NO:2077), GI:28544965 (SEQ ID NO:2078), GI:28544959 (SEQ ID NO:2079), CeresClone:2023103 (SEQ ID NO:2081), CeresAnnot:1514866 (SEQ ID NO:2083), CeresClone:1724312 (SEQ ID NO:2085), CeresClone:1850477 (SEQ ID NO:2087), or GI:25140434 (SEQ ID NO:2088). In some cases, a functional homolog of SEQ ID NO:2028 has an amino acid sequence with at least 45% sequence identity, e.g., 50%, 52%, 56%, 59%, 61%, 65%, 70%, 75%, 80%, 85%, 90%, 95%, 97%, 98%, or 99% sequence identity, to the amino acid sequence set forth in SEQ ID NO:2028.

[0253] Examples of amino acid sequences of functional homologs of the polypeptide set forth in SEQ ID NO:1569 are provided in FIG. 44 and in the Sequence Listing. Such functional homologs include, for example, CeresClone:347043 (SEQ ID NO:1571), GI:115462965 (SEQ ID NO:1572), CeresClone:615256 (SEQ ID NO:1574), GI:225437789 (SEQ ID NO:1575), CeresAnnot:1471495 (SEQ ID NO:1577), GI:115436066 (SEQ ID NO:1578), CeresClone:1792947 (SEQ ID NO:1580), GI:115461963 (SEQ ID NO:1581), CeresClone:1804757 (SEQ ID NO:1583), GI:194707276 (SEQ ID NO:1584), CeresClone:1993287 (SEQ ID NO:1586), CeresClone:1791289 (SEQ ID NO:1588), GI:125597752 (SEQ ID NO:1589), CeresClone:346820 (SEQ ID NO:1591), CeresClone:1991829 (SEQ ID NO:1593), GI:125555936 (SEQ ID NO:1594), GI:115434876 (SEQ ID NO:1595), GI:115462409 (SEQ ID NO:1596), CeresClone:1790661 (SEQ ID NO:1598), GI:125551047 (SEQ ID NO:1599), GI:125524662 (SEQ ID NO:1600), CeresClone:1844794 (SEQ ID NO:1602), GI:151175361 (SEQ ID NO:1603), GI:151175359 (SEQ ID NO:1604), GI:150246875 (SEQ ID NO:1605), CeresClone:1811754 (SEQ ID NO:1607), CeresClone:334953 (SEQ ID NO:1609), CeresClone:1780550 (SEQ ID NO:1611), GI:115434962 (SEQ ID NO:1612), GI:125569315 (SEQ ID NO:1613), CeresClone:1973047 (SEQ ID NO:1615), GI:151175355 (SEQ ID NO:1616), CeresClone:283413 (SEQ ID NO:1618), GI:151175357 (SEQ ID NO:1619), CeresClone:1978685 (SEQ ID NO:1621), or GI:15228696 (SEQ ID NO:1622). In some cases, a functional homolog of SEQ ID NO:1569 has an amino acid sequence with at least 45% sequence identity, e.g., 50%, 52%, 56%, 59%, 61%, 65%, 70%, 75%, 80%, 85%, 90%, 95%, 97%, 98%, or 99% sequence identity, to the amino acid sequence set forth in SEQ ID NO:1569.

[0254] Examples of amino acid sequences of functional homologs of the polypeptide set forth in SEQ ID NO:501 are provided in FIG. 45 and in the Sequence Listing. Such functional homologs include, for example, GI:115439265 (SEQ ID NO:502), GI:189095136 (SEQ ID NO:503), GI:83853955 (SEQ ID NO:504), CeresClone:100882327 (SEQ ID NO:506), GI:13560118 (SEQ ID NO:507), CeresAnnot:8646122 (SEQ ID NO:509), GI:544006 (SEQ ID NO:510), GI:762879 (SEQ ID NO:511), GI:106647236 (SEQ ID NO:512), CeresAnnot:1471221 (SEQ ID NO:514), GI:4835582 (SEQ ID NO:515), GI:27817953 (SEQ ID NO:516), GI:10954033 (SEQ ID NO:517), GI:125557999 (SEQ ID NO:518), CeresAnnot:8646117 (SEQ ID NO:520), CeresAnnot:8646118 (SEQ ID NO:522), CeresAnnot:1467383 (SEQ ID NO:524), CeresAnnot:8646120 (SEQ ID NO:526), CeresAnnot:8667904 (SEQ ID NO:528), CeresAnnot:1467381 (SEQ ID NO:530), GI:115438985 (SEQ ID NO:531), GI:162462924 (SEQ ID NO:532), GI:33562677 (SEQ ID NO:533), GI:124294787 (SEQ ID NO:534), GI:116330 (SEQ ID NO:535), GI:4530607 (SEQ ID NO:536), GI:157349836 (SEQ ID NO:537), GI:75708015 (SEQ ID NO:538), GI:20975280 (SEQ ID NO:539), GI:157349835 (SEQ ID NO:540), CeresAnnot:1497300 (SEQ ID NO:542), GI:28971736 (SEQ ID NO:543), CeresClone:562682 (SEQ ID NO:545), GI:4835584 (SEQ ID NO:546), GI:157360148 (SEQ ID NO:547), GI:197253305 (SEQ ID NO:548), CeresAnnot:1483301 (SEQ ID NO:550), GI:147791187 (SEQ ID NO:551), CeresAnnot:1483300 (SEQ ID NO:553), GI:4689374 (SEQ ID NO:554), GI:157349837 (SEQ ID NO:555), CeresAnnot:1498645 (SEQ ID NO:557), CeresAnnot:1483298 (SEQ ID NO:559), GI:157349845 (SEQ ID NO:560), CeresAnnot:1471220 (SEQ ID NO:562), GI:3451147 (SEQ ID NO:563), CeresClone:536756 (SEQ ID NO:565), GI:15553476 (SEQ ID NO:566), CeresClone:630327 (SEQ ID NO:568), CeresAnnot:8669695 (SEQ ID NO:570), CeresAnnot:1471240 (SEQ ID NO:572), GI:20981684 (SEQ ID NO:573), CeresAnnot:1483302 (SEQ ID NO:575), GI:1705812 (SEQ ID NO:576), GI:119393870 (SEQ ID NO:577), CeresClone:631157 (SEQ ID NO:579), GI:33562679 (SEQ ID NO:580), GI:33323055 (SEQ ID NO:581), GI:125528455 (SEQ ID NO:582), GI:147805131 (SEQ ID NO:583), GI:147860736 (SEQ ID NO:584), GI:115441185 (SEQ ID NO:585), GI:10880383 (SEQ ID NO:586), GI:125572708 (SEQ ID NO:587), CeresAnnot:1467380 (SEQ ID NO:589), GI:2425170 (SEQ ID NO:590), GI:116328 (SEQ ID NO:591), GI:116332 (SEQ ID NO:592), GI:125570070 (SEQ ID NO:593), CeresAnnot:8643742 (SEQ ID NO:595), GI:11967922 (SEQ ID NO:596), GI:7595839 (SEQ ID NO:597), GI:2342459 (SEQ ID NO:598), GI:166664 (SEQ ID NO:599), CeresClone:1825429 (SEQ ID NO:601), GI:2342461 (SEQ ID NO:602), CeresAnnot:8669693 (SEQ ID NO:604), GI:2342453 (SEQ ID NO:605), CeresAnnot:8669692 (SEQ ID NO:607), CeresAnnot:570753 (SEQ ID NO:609), GI:2342443 (SEQ ID NO:610), GI:2342433 (SEQ ID NO:611), GI:22775364 (SEQ ID NO:612), GI:115441183 (SEQ ID NO:613), GI:22775368 (SEQ ID NO:614), GI:22775376 (SEQ ID NO:615), GI:22775370 (SEQ ID NO:616), GI:22775382 (SEQ ID NO:617), GI:22775358 (SEQ ID NO:618), GI:125528454 (SEQ ID NO:619), GI:2342439 (SEQ ID NO:620), GI:2342457 (SEQ ID NO:621), GI:22775380 (SEQ ID NO:622), GI:2342465 (SEQ ID NO:623), GI:2853142 (SEQ ID NO:624), GI:116337 (SEQ ID NO:625), GI:167540 (SEQ ID NO:626), or GI:28848952 (SEQ ID NO:627). In some cases, a functional homolog of SEQ ID NO:501 has an amino acid sequence with at least 45% sequence identity, e.g., 50%, 52%, 56%, 59%, 61%, 65%, 70%, 75%, 80%, 85%, 90%, 95%, 97%, 98%, or 99% sequence identity, to the amino acid sequence set forth in SEQ ID NO:501.

[0255] Examples of amino acid sequences of functional homologs of the polypeptide set forth in SEQ ID NO:2190 are provided in FIG. 46 and in the Sequence Listing. Such functional homologs include, for example, CeresAnnot:8744420 (SEQ ID NO:2192), CeresClone:331385 (SEQ ID NO:2194), GI:115469712 (SEQ ID NO:2195), GI:1890577 (SEQ ID NO:2196), GI:51039064 (SEQ ID NO:2197), GI:14330332 (SEQ ID NO:2198), GI:147854712 (SEQ ID NO:2199), GI:157352236 (SEQ ID NO:2200), GI:118722746 (SEQ ID NO:2201), GI:8886867 (SEQ ID NO:2202), GI:115334952 (SEQ ID NO:2203), CeresClone:1789502 (SEQ ID NO:2205), CeresClone:1805428 (SEQ ID NO:2207), CeresClone:1724099 (SEQ ID NO:2209), CeresClone:1724817 (SEQ ID NO:2211), CeresClone:1804995 (SEQ ID NO:2213), CeresClone:1446366 (SEQ ID NO:2215), CeresClone:1054422 (SEQ ID NO:2217), CeresClone:263803 (SEQ ID NO:2219), CeresClone:1821034 (SEQ ID NO:2221), CeresClone:1806021 (SEQ ID NO:2223), CeresClone:1727689 (SEQ ID NO:2225), GI:115469720 (SEQ ID NO:2226), CeresAnnot:8744425 (SEQ ID NO:2228), GI:212275237 (SEQ ID NO:2229), CeresClone:1724271 (SEQ ID NO:2231), CeresClone:247073 (SEQ ID NO:2233), CeresClone:1020658 (SEQ ID NO:2235), GI:1890575 (SEQ ID NO:2236), GI:225446111 (SEQ ID NO:2237), GI:225446115 (SEQ ID NO:2238), GI:147854714 (SEQ ID NO:2239), GI:68532877 (SEQ ID NO:2240), GI:147779866 (SEQ ID NO:2241), CeresClone:100062911 (SEQ ID NO:2243), GI:225446117 (SEQ ID NO:2244), CeresClone:1832719 (SEQ ID NO:2246), CeresClone:1793297 (SEQ ID NO:2248), CeresClone:1848637 (SEQ ID NO:2250), GI:225446103 (SEQ ID NO:2251), CeresAnnot:1362908 (SEQ ID NO:2253), CeresClone:100064069 (SEQ ID NO:2255), CeresAnnot:1469128 (SEQ ID NO:2257), CeresClone:656868 (SEQ ID NO:2259), CeresClone:1793334 (SEQ ID NO:2261), GI:29500891 (SEQ ID NO:2262), CeresClone:1895226 (SEQ ID NO:2264), GI:8886865 (SEQ ID NO:2265), CeresAnnot:878947 (SEQ ID NO:2267), CeresClone:1045431 (SEQ ID NO:2269), GI:22947852 (SEQ ID NO:2270), CeresClone:1855067 (SEQ ID NO:2272), GI:17064792 (SEQ ID NO:2273), CeresClone:662227 (SEQ ID NO:2275), GI:225446109 (SEQ ID NO:2276), CeresClone:522574 (SEQ ID NO:2278), GI:115334954 (SEQ ID NO:2279), CeresClone:581426 (SEQ ID NO:2281), GI:124109191 (SEQ ID NO:2282), CeresAnnot:1471882 (SEQ ID NO:2284), GI:34809190 (SEQ ID NO:2285), GI:29500893 (SEQ ID NO:2286), CeresAnnot:1452398 (SEQ ID NO:2288), GI:124109199 (SEQ ID NO:2289), CeresAnnot:1478206 (SEQ ID NO:2291), CeresAnnot:1445599 (SEQ ID NO:2293), CeresAnnot:1452397 (SEQ ID NO:2295), GI:19911573 (SEQ ID NO:2296), GI:124109181 (SEQ ID NO:2297), GI:22327914 (SEQ ID NO:2298), GI:42795468 (SEQ ID NO:2299), GI:42795462 (SEQ ID NO:2300), CeresAnnot:1466060 (SEQ ID NO:2302), CeresAnnot:8461207 (SEQ ID NO:2304), CeresAnnot:1506985 (SEQ ID NO:2306), GI:3901012 (SEQ ID NO:2307), CeresAnnot:1443040 (SEQ ID NO:2309), GI:90811697 (SEQ ID NO:2310), CeresAnnot:1443041 (SEQ ID NO:2312), GI:157358970 (SEQ ID NO:2313), GI:90656516 (SEQ ID NO:2314), GI:577066 (SEQ ID NO:2315), GI:90656520 (SEQ ID NO:2316), GI:88683124 (SEQ ID NO:2317), GI:90656518 (SEQ ID NO:2318), CeresAnnot:1482565 (SEQ ID NO:2320), or GI:15238891 (SEQ ID NO:2321). In some cases, a functional homolog of SEQ ID NO:2190 has an amino acid sequence with at least 45% sequence identity, e.g., 50%, 52%, 56%, 59%, 61%, 65%, 70%, 75%, 80%, 85%, 90%, 95%, 97%, 98%, or 99% sequence identity, to the amino acid sequence set forth in SEQ ID NO:2190.

[0256] Examples of amino acid sequences of functional homologs of the polypeptide set forth in SEQ ID NO:749 are provided in FIG. 47 and in the Sequence Listing. Such functional homologs include, for example, CeresClone:1955766 (SEQ ID NO:749), CeresClone:570179 (SEQ ID NO:751), GI:54290293 (SEQ ID NO:752), GI:1617121 (SEQ ID NO:753), CeresClone:896724 (SEQ ID NO:757), CeresClone:607452 (SEQ ID NO:759), GI:37904392 (SEQ ID NO:760), CeresClone:1870473 (SEQ ID NO:762), CeresClone:2026564 (SEQ ID NO:764), CeresClone:2004365 (SEQ ID NO:766), CeresClone:2020677 (SEQ ID NO:768), CeresClone:2039538 (SEQ ID NO:770), CeresClone:844611 (SEQ ID NO:772), GI:125526847 (SEQ ID NO:773), CeresClone:597887 (SEQ ID NO:775), GI:58396949 (SEQ ID NO:776), CeresClone:684778 (SEQ ID NO:778), CeresClone:699511 (SEQ ID NO:780), CeresClone:1803377 (SEQ ID NO:782), CeresClone:1888961 (SEQ ID NO:784), CeresClone:897331 (SEQ ID NO:786), CeresClone:617775 (SEQ ID NO:788), GI:20513866 (SEQ ID NO:789), CeresAnnot:8724387 (SEQ ID NO:791), CeresClone:1804405 (SEQ ID NO:793), GI:48093396 (SEQ ID NO:794), GI:108862602 (SEQ ID NO:795), GI:115488400 (SEQ ID NO:796), CeresClone:759663 (SEQ ID NO:798), CeresClone:1801827 (SEQ ID NO:800), GI:48093418 (SEQ ID NO:801), GI:48093360 (SEQ ID NO:802), CeresClone:1457620 (SEQ ID NO:804), GI:48093370 (SEQ ID NO:805), CeresClone:639183 (SEQ ID NO:807), CeresClone:1453564 (SEQ ID NO:809), CeresClone:1531954 (SEQ ID NO:811), CeresClone:1460371 (SEQ ID NO:813), CeresClone:1627479 (SEQ ID NO:815), CeresClone:992630 (SEQ ID NO:817), CeresClone:685480 (SEQ ID NO:819), GI:75994159 (SEQ ID NO:820), CeresAnnot:8724380 (SEQ ID NO:822), GI:48093378 (SEQ ID NO:823), GI:75994143 (SEQ ID NO:824), GI:75994153 (SEQ ID NO:825), CeresAnnot:8724381 (SEQ ID NO:827), GI:75994157 (SEQ ID NO:828), CeresClone:730301 (SEQ ID NO:830), or CeresAnnot:8724388 (SEQ ID NO:832). In some cases, a functional homolog of SEQ ID NO:749 has an amino acid sequence with at least 45% sequence identity, e.g., 50%, 52%, 56%, 59%, 61%, 65%, 70%, 75%, 80%, 85%, 90%, 95%, 97%, 98%, or 99% sequence identity, to the amino acid sequence set forth in SEQ ID NO:749.

[0257] Examples of amino acid sequences of functional homologs of the polypeptide set forth in SEQ ID NO:79 are provided in FIG. 48 and in the Sequence Listing. Such functional homologs include, for example, GI:246215 (SEQ ID NO:80), GI:21069037 (SEQ ID NO:81), GI:4007850 (SEQ ID NO:82), GI:4007745 (SEQ ID NO:83), GI:54290571 (SEQ ID NO:84), GI:1052551 (SEQ ID NO:85), GI:802168 (SEQ ID NO:86), CeresClone:2047875 (SEQ ID NO:88), CeresClone:2024838 (SEQ ID NO:90), GI:246217 (SEQ ID NO:91), GI:1351242 (SEQ ID NO:92), GI:2507457 (SEQ ID NO:93), GI:44888362 (SEQ ID NO:94), GI:225958 (SEQ ID NO:95), GI:44888508 (SEQ ID NO:96), GI:401185 (SEQ ID NO:97), GI:21069039 (SEQ ID NO:98), GI:401184 (SEQ ID NO:99), GI:514332 (SEQ ID NO:100), GI:1304262 (SEQ ID NO:101), GI:21069045 (SEQ ID NO:102), GI:225008 (SEQ ID NO:103), GI:21069041 (SEQ ID NO:104), GI:2851607 (SEQ ID NO:105), GI:135788 (SEQ ID NO:106), GI:21069043 (SEQ ID NO:107), GI:4007846 (SEQ ID NO:108), GI:115468270 (SEQ ID NO:109), GI:125555528 (SEQ ID NO:110), GI:115468266 (SEQ ID NO:111), GI:54291433 (SEQ ID NO:112), or GI:1052819 (SEQ ID NO:113). In some cases, a functional homolog of SEQ ID NO:79 has an amino acid sequence with at least 45% sequence identity, e.g., 50%, 52%, 56%, 59%, 61%, 65%, 70%, 75%, 80%, 85%, 90%, 95%, 97%, 98%, or 99% sequence identity, to the amino acid sequence set forth in SEQ ID NO:79.

[0258] Examples of amino acid sequences of functional homologs of the polypeptide set forth in SEQ ID NO:284 are provided in FIG. 49 and in the Sequence Listing. Such functional homologs include, for example, CeresAnnot:8679595 (SEQ ID NO:286), GI:115446685 (SEQ ID NO:287), GI:225447803 (SEQ ID NO:288), GI:30698042 (SEQ ID NO:289), CeresClone:611438 (SEQ ID NO:291), CeresClone:1953842 (SEQ ID NO:293), GI:38344065 (SEQ ID NO:294), GI:115458512 (SEQ ID NO:295), CeresAnnot:8700901 (SEQ ID NO:297), CeresAnnot:1446112 (SEQ ID NO:299), GI:157359819 (SEQ ID NO:300), CeresAnnot:1439208 (SEQ ID NO:302), CeresAnnot:1450728 (SEQ ID NO:304), CeresAnnot:1456235 (SEQ ID NO:306), GI:116310781 (SEQ ID NO:307), or GI:187940289 (SEQ ID NO:308). In some cases, a functional homolog of SEQ ID NO:284 has an amino acid sequence with at least 45% sequence identity, e.g., 50%, 52%, 56%, 59%, 61%, 65%, 70%, 75%, 80%, 85%, 90%, 95%, 97%, 98%, or 99% sequence identity, to the amino acid sequence set forth in SEQ ID NO:284.

[0259] Examples of amino acid sequences of functional homologs for the polypeptide set forth in SEQ ID NO:2915 are provided in FIG. 50 and in the Sequence Listing. Such functional homologs include, for example, CeresAnnot:8703443 (SEQ ID NO:2917), GI:194702514 (SEQ ID NO:2918), CeresClone:699934 (SEQ ID NO:2919), CeresClone:1999925 (SEQ ID NO:2920), CeresClone:1830084 (SEQ ID NO:2921), CeresClone:1822001 (SEQ ID NO:2922), CeresClone:326580 (SEQ ID NO:2923), or GI:32488374 (SEQ ID NO:2924). In some cases, a functional homolog of SEQ ID NO:2915 has an amino acid sequence with at least 45% sequence identity, e.g., 50%, 52%, 56%, 59%, 61%, 65%, 70%, 75%, 80%, 85%, 90%, 95%, 97%, 98%, or 99% sequence identity, to the amino acid sequence set forth in SEQ ID NO:2915.

[0260] The identification of conserved regions in a biomass-modulating polypeptide facilitates production of variants of biomass-modulating polypeptides. Variants of biomass-modulating polypeptides typically have 10 or fewer conservative amino acid substitutions within the primary amino acid sequence, e.g., 7 or fewer conservative amino acid substitutions, 5 or fewer conservative amino acid substitutions, or between 1 and 5 conservative substitutions. A useful variant polypeptide can be constructed based on one of the alignments set forth in FIG. 1, FIG. 2, FIG. 3, FIG. 4, FIG. 5, FIG. 6, FIG. 7, FIG. 8, FIG. 9, FIG. 10, FIG. 11, FIG. 12, FIG. 13, FIG. 14, FIG. 15, FIG. 16, FIG. 17, FIG. 18, FIG. 19, FIG. 20, FIG. 21, FIG. 22, FIG. 23, FIG. 24, FIG. 25, FIG. 26, FIG. 27, FIG. 28, FIG. 29, FIG. 30, FIG. 31, FIG. 32, FIG. 33, FIG. 34, FIG. 35, FIG. 36, FIG. 37, FIG. 38, FIG. 39, FIG. 40, FIG. 41, FIG. 42, FIG. 43, FIG. 44, FIG. 45, FIG. 46, FIG. 47, FIG. 48, FIG. 49, or FIG. 50 and/or homologs identified in the Sequence Listing. Such a polypeptide includes the conserved regions, arranged in the order depicted in the Figure from amino-terminal end to carboxy-terminal end. Such a polypeptide may also include zero, one, or more than one amino acid in positions marked by dashes. When no amino acids are present at positions marked by dashes, the length of such a polypeptide is the sum of the amino acid residues in all conserved regions. When amino acids are present at a position marked by dashes, such a polypeptide has a length that is the sum of the amino acid residues in all conserved regions and all dashes.

[0261] C. Functional Homologs Identified by HMMER

[0262] In some embodiments, useful biomass-modulating polypeptides include those that fit a Hidden Markov Model based on the polypeptides set forth in any one of FIGS. 1-50. A Hidden Markov Model (HMM) is a statistical model of a consensus sequence for a group of functional homologs. See, Durbin et al., Biological Sequence Analysis: Probabilistic Models of Proteins and Nucleic Acids, Cambridge University Press, Cambridge, UK (1998). An HMM is generated by the program HMMER 2.3.2 with default program parameters, using the sequences of the group of functional homologs as input. The multiple sequence alignment is generated by ProbCons (Do et al., Genome Res., 15(2):330-40 (2005)) version 1.11 using a set of default parameters: -c, —consistency REPS of 2; -ir, —iterative-refinement REPS of 100; -pre, —pre-training REPS of 0. ProbCons is a public domain software program provided by Stanford University.

[0263] The default parameters for building an HMM (hmmbuild) are as follows: the default “architecture prior” (archpri) used by MAP architecture construction is 0.85, and the default cutoff threshold (idlevel) used to determine the effective sequence number is 0.62. HMMER 2.3.2 was released Oct. 3, 2003 under a GNU general public license, and is available from various sources on the World Wide Web such as hmmer.janelia.org; hmmer wust1.edu; and fr.com/hmmer232/. Hmmbuild outputs the model as a text file.

[0264] The HMM for a group of functional homologs can be used to determine the likelihood that a candidate biomass-modulating polypeptide sequence is a better fit to that particular HMM than to a null HMM generated using a group of sequences that are not structurally or functionally related. The likelihood that a candidate polypeptide sequence is a better fit to an HMM than to a null HMM is indicated by the HMM bit score, a number generated when the candidate sequence is fitted to the HMM profile using the HMMER hmmsearch program. The following default parameters are used when running hmmsearch: the default E-value cutoff (E) is 10.0, the default bit score cutoff (T) is negative infinity, the default number of sequences in a database (Z) is the real number of sequences in the database, the default E-value cutoff for the per-domain ranked hit list (domE) is infinity, and the default bit score cutoff for the per-domain ranked hit list (domT) is negative infinity. A high HMM bit score indicates a greater likelihood that the candidate sequence carries out one or more of the biochemical or physiological function(s) of the polypeptides used to generate the HMM. A high HMM bit score is at least 20, and often is higher. Slight variations in the HMM bit score of a particular sequence can occur due to factors such as the order in which sequences are processed for alignment by multiple sequence alignment algorithms such as the ProbCons program. Nevertheless, such HMM bit score variation is minor.

[0265] The biomass-modulating polypeptides discussed below fit the indicated HMM with an HMM bit score greater than 93 (e.g., greater than 95, 96, 97, 98, 99, 100, 105, 110, 120, 130, 150, 170, 200, 300, 500, 1000, 1500, or 2000). In some embodiments, the HMM bit score of a biomass-modulating polypeptide discussed below is about 50%, 60%, 70%, 80%, 90%, or 95% of the HMM bit score of a functional homolog provided in the Sequence Listing of this application. In some embodiments, a biomass-modulating polypeptide discussed below fits the indicated HMM with an HMM bit score greater than 93, and has a domain indicative of a biomass-modulating polypeptide. In some embodiments, a biomass-modulating polypeptide discussed below fits the indicated HMM with an HMM bit score greater than 93, and has 65% or greater sequence identity (e.g., 75%, 80%, 85%, 90%, 95%, or 100% sequence identity) to an amino acid sequence shown in any one of FIGS. 1-50.

[0266] Examples of polypeptides are shown in the sequence listing that have HMM bit scores greater than 915 when fitted to an HMM generated from the amino acid sequences set forth in FIG. 1 and are identified in the Sequence Listing of this application. Such polypeptides include, for example, SEQ ID NOs: 2880, 2882, 2883, 2885, 2886, 2888, or 2890.

[0267] Examples of polypeptides are shown in the sequence listing that have HMM bit scores greater than 1149 when fitted to an HMM generated from the amino acid sequences set forth in FIG. 2 and are identified in the Sequence Listing of this application. Such polypeptides include, for example, SEQ ID NOs: 310, 311, 313, 315, 316, or 317.

[0268] Examples of polypeptides are shown in the sequence listing that have HMM bit scores greater than 618 when fitted to an HMM generated from the amino acid sequences set forth in FIG. 3 and are identified in the Sequence Listing of this application. Such polypeptides include, for example, SEQ ID NOs: 403, 404, 406, 408, 409, 410, 411, 412, or 414.

[0269] Examples of polypeptides are shown in the sequence listing that have HMM bit scores greater than 324 when fitted to an HMM generated from the amino acid sequences set forth in FIG. 4 and are identified in the Sequence Listing of this application. Such polypeptides include, for example, SEQ ID NOs: 669, 671, 672, 674, 676, or 677.

[0270] Examples of polypeptides are shown in the sequence listing that have HMM bit scores greater than 752 when fitted to an HMM generated from the amino acid sequences set forth in FIG. 5 and are identified in the Sequence Listing of this application. Such polypeptides include, for example, SEQ ID NOs: 1797, 1798, 1799, 1801, 1803, 1804, 1805, 1806, 1807, 1808, 1809, or 1810.

[0271] Examples of polypeptides are shown in the sequence listing that have HMM bit scores greater than 866 when fitted to an HMM generated from the amino acid sequences set forth in FIG. 6 and are identified in the Sequence Listing of this application. Such polypeptides include, for example, SEQ ID NOs: 717, 718, 719, 720, 721, or 722.

[0272] Examples of polypeptides are shown in the sequence listing that have HMM bit scores greater than 703 when fitted to an HMM generated from the amino acid sequences set forth in FIG. 7 and are identified in the Sequence Listing of this application. Such polypeptides include, for example, SEQ ID NOs: 693, 694, 696, 697, 698, or 700.

[0273] Examples of polypeptides are shown in the sequence listing that have HMM bit scores greater than 862 when fitted to an HMM generated from the amino acid sequences set forth in FIG. 8 and are identified in the Sequence Listing of this application. Such polypeptides include, for example, SEQ ID NOs: 1518, 1520, 1522, 1523, 1524, 1525, 1526, 1528, 1529, or 1531.

[0274] Examples of polypeptides are shown in the sequence listing that have HMM bit scores greater than 883 when fitted to an HMM generated from the amino acid sequences set forth in FIG. 9 and are identified in the Sequence Listing of this application. Such polypeptides include, for example, SEQ ID NOs: 1624, 1626, 1628, 1629, 1630, 1632, 1634, 1636, or 1637.

[0275] Examples of polypeptides are shown in the sequence listing that have HMM bit scores greater than 393 when fitted to an HMM generated from the amino acid sequences set forth in FIG. 10 and are identified in the Sequence Listing of this application. Such polypeptides include, for example, SEQ ID NOs: 1887, 1889, 1891, 1893, 1894, 1895, 1897, 1898, or 1900.

[0276] Examples of polypeptides are shown in the sequence listing that have HMM bit scores greater than 232 when fitted to an HMM generated from the amino acid sequences set forth in FIG. 11 and are identified in the Sequence Listing of this application. Such polypeptides include, for example, SEQ ID NOs: 834, 836, 838, 840, 842, 843, or 844.

[0277] Examples of polypeptides are shown in the sequence listing that have HMM bit scores greater than 815 when fitted to an HMM generated from the amino acid sequences set forth in FIG. 12 and are identified in the Sequence Listing of this application. Such polypeptides include, for example, SEQ ID NOs: 1318, 1320, 1322, 1324, 1325, 1326, 1328, 1329, 1330, 1332, 1333, 1334.

[0278] Examples of polypeptides are shown in the sequence listing that have HMM bit scores greater than 1251 when fitted to an HMM generated from the amino acid sequences set forth in FIG. 13 and are identified in the Sequence Listing of this application. Such polypeptides include, for example, SEQ ID NOs: 459, 461, 462, 464, 466, or 467.

[0279] Examples of polypeptides are shown in the sequence listing that have HMM bit scores greater than 1066 when fitted to an HMM generated from the amino acid sequences set forth in FIG. 14 and are identified in the Sequence Listing of this application. Such polypeptides include, for example, SEQ ID NOs: 335, 338, 342, 343, 358, 360, 377, 382, 389, 390, or 396.

[0280] Examples of polypeptides are shown in the sequence listing that have HMM bit scores greater than 1398 when fitted to an HMM generated from the amino acid sequences set forth in FIG. 15 and are identified in the Sequence Listing of this application. Such polypeptides include, for example, SEQ ID NOs: 846, 848, 849, 850, or 851.

[0281] Examples of polypeptides are shown in the sequence listing that have HMM bit scores greater than 370 when fitted to an HMM generated from the amino acid sequences set forth in FIG. 16 and are identified in the Sequence Listing of this application. Such polypeptides include, for example, SEQ ID NOs: 1426, 1428, 1429, 1431, 1433, 1435, 1437, 1439, 1440, 1441, 1443, 1445, 1446, or 1448.

[0282] Examples of polypeptides are shown in the sequence listing that have HMM bit scores greater than 328 when fitted to an HMM generated from the amino acid sequences set forth in FIG. 17 and are identified in the Sequence Listing of this application. Such polypeptides include, for example, SEQ ID NOs: 2525, 2527, 2529, 2530, 2531, or 2533.

[0283] Examples of polypeptides are shown in the sequence listing that have HMM bit scores greater than 133 when fitted to an HMM generated from the amino acid sequences set forth in FIG. 18 and are identified in the Sequence Listing of this application. Such polypeptides include, for example, SEQ ID NOs: 1272, 1274, 1276, 1278, 1279, 1281, 1283, or 1285.

[0284] Examples of polypeptides are shown in the sequence listing that have HMM bit scores greater than 265 when fitted to an HMM generated from the amino acid sequences set forth in FIG. 19 and are identified in the Sequence Listing of this application. Such polypeptides include, for example, SEQ ID NOs: 878, 880, 882, 883, 885, or 887.

[0285] Examples of polypeptides are shown in the sequence listing that have HMM bit scores greater than 843 when fitted to an HMM generated from the amino acid sequences set forth in FIG. 20 and are identified in the Sequence Listing of this application. Such polypeptides include, for example, SEQ ID NOs: 1660, 1661, 1662, 1664, 1666, or 1668.

[0286] Examples of polypeptides are shown in the sequence listing that have HMM bit scores greater than 93 when fitted to an HMM generated from the amino acid sequences set forth in FIG. 21 and are identified in the Sequence Listing of this application. Such polypeptides include, for example, SEQ ID NOs: 2654, 2656, 2658, 2659, 2661, 2663, 2665, 2667, 2668, 2670, 2672, 2674, 2675, 2677, or 2679.

[0287] Examples of polypeptides are shown in the sequence listing that have HMM bit scores greater than 175 when fitted to an HMM generated from the amino acid sequences set forth in FIG. 22 and are identified in the Sequence Listing of this application. Such polypeptides include, for example, SEQ ID NOs: 1137, 1139, 1141, 1142, 1144, or 1146.

[0288] Examples of polypeptides are shown in the sequence listing that have HMM bit scores greater than 2105 when fitted to an HMM generated from the amino acid sequences set forth in FIG. 23 and are identified in the Sequence Listing of this application. Such polypeptides include, for example, SEQ ID NOs: 2466, 2468, 2469, 2470, 2471, 2472, 2474, 2475, or 2476.

[0289] Examples of polypeptides are shown in the sequence listing that have HMM bit scores greater than 1213 when fitted to an HMM generated from the amino acid sequences set forth in FIG. 24 and are identified in the Sequence Listing of this application. Such polypeptides include, for example, SEQ ID NOs: 1107, 1110, 1111, 1112, 1113, 1114, 1115, or 1117.

[0290] Examples of polypeptides are shown in the sequence listing that have HMM bit scores greater than 1174 when fitted to an HMM generated from the amino acid sequences set forth in FIG. 25 and are identified in the Sequence Listing of this application. Such polypeptides include, for example, SEQ ID NOs: 1946, 1949, 1957, 1963, 1973, 1992, or 2022.

[0291] Examples of polypeptides are shown in the sequence listing that have HMM bit scores greater than 1138 when fitted to an HMM generated from the amino acid sequences set forth in FIG. 26 and are identified in the Sequence Listing of this application. Such polypeptides include, for example, SEQ ID NOs: 1054, 1056, 1058, 1060, 1061, 1062, 1064, 1066, or 1067.

[0292] Examples of polypeptides are shown in the sequence listing that have HMM bit scores greater than 1126 when fitted to an HMM generated from the amino acid sequences set forth in FIG. 27 and are identified in the Sequence Listing of this application. Such polypeptides include, for example, SEQ ID NOs: 115, 117, 119, 120, 121, 122, 123, 124, or 126.

[0293] Examples of polypeptides are shown in the sequence listing that have HMM bit scores greater than 1812 when fitted to an HMM generated from the amino acid sequences set forth in FIG. 28 and are identified in the Sequence Listing of this application. Such polypeptides include, for example, SEQ ID NOs: 2708, 2710, 2711, 2712, 2714, 2716, 2717, 2719, 2721, or 2722.

[0294] Examples of polypeptides are shown in the sequence listing that have HMM bit scores greater than 824 when fitted to an HMM generated from the amino acid sequences set forth in FIG. 29 and are identified in the Sequence Listing of this application. Such polypeptides include, for example, SEQ ID NOs: 1481, 1482, 1483, 1485, 1486, 1488, 1489, 1490, or 1492.

[0295] Examples of polypeptides are shown in the sequence listing that have HMM bit scores greater than 1240 when fitted to an HMM generated from the amino acid sequences set forth in FIG. 30 and are identified in the Sequence Listing of this application. Such polypeptides include, for example, SEQ ID NOs: 2748, 2750, 2751, 2753, 2754, 2756, 2758, or 2760.

[0296] Examples of polypeptides are shown in the sequence listing that have HMM bit scores greater than 1078 when fitted to an HMM generated from the amino acid sequences set forth in FIG. 31 and are identified in the Sequence Listing of this application. Such polypeptides include, for example, SEQ ID NOs: 947, 949, 950, 952, or 953.

[0297] Examples of polypeptides are shown in the sequence listing that have HMM bit scores greater than 873 when fitted to an HMM generated from the amino acid sequences set forth in FIG. 32 and are identified in the Sequence Listing of this application. Such polypeptides include, for example, SEQ ID NOs: 1727, 1729, 1731, 1732, or 1734.

[0298] Examples of polypeptides are shown in the sequence listing that have HMM bit scores greater than 1102 when fitted to an HMM generated from the amino acid sequences set forth in FIG. 33 and are identified in the Sequence Listing of this application. Such polypeptides include, for example, SEQ ID NOs: 2146, 2148, 2149, 2150, 2151, 2152, 2153, 2154, or 2156.

[0299] Examples of polypeptides are shown in the sequence listing that have HMM bit scores greater than 754 when fitted to an HMM generated from the amino acid sequences set forth in FIG. 34 and are identified in the Sequence Listing of this application. Such polypeptides include, for example, SEQ ID NOs: 2619, 2621, 2623, 2624, 2626, 2627, 2628, 2629, or 2631.

[0300] Examples of polypeptides are shown in the sequence listing that have HMM bit scores greater than 539 when fitted to an HMM generated from the amino acid sequences set forth in FIG. 35 and are identified in the Sequence Listing of this application. Such polypeptides include, for example, SEQ ID NOs: 211, 213, 214, 215, 217, 218, 219, or 220.

[0301] Examples of polypeptides are shown in the sequence listing that have HMM bit scores greater than 657 when fitted to an HMM generated from the amino acid sequences set forth in FIG. 36 and are identified in the Sequence Listing of this application. Such polypeptides include, for example, SEQ ID NOs: 629, 631, 633, 634, 635, 636, 637, or 638.

[0302] Examples of polypeptides are shown in the sequence listing that have HMM bit scores greater than 1924 when fitted to an HMM generated from the amino acid sequences set forth in FIG. 37 and are identified in the Sequence Listing of this application. Such polypeptides include, for example, SEQ ID NOs: 2544, 2546, 2547, 2548, 2550, 2551, or 2552.

[0303] Examples of polypeptides are shown in the sequence listing that have HMM bit scores greater than 1104 when fitted to an HMM generated from the amino acid sequences set forth in FIG. 38 and are identified in the Sequence Listing of this application. Such polypeptides include, for example, SEQ ID NOs: 2599, 2601, 2603, 2604, 2606, 2608, or 2609.

[0304] Examples of polypeptides are shown in the sequence listing that have HMM bit scores greater than 1347 when fitted to an HMM generated from the amino acid sequences set forth in FIG. 39 and are identified in the Sequence Listing of this application. Such polypeptides include, for example, SEQ ID NOs: 2437, 2439, 2440, 2441, 2442, 2443, 2445, 2446, or 2448.

[0305] Examples of polypeptides are shown in the sequence listing that have HMM bit scores greater than 1096 when fitted to an HMM generated from the amino acid sequences set forth in FIG. 40 and are identified in the Sequence Listing of this application. Such polypeptides include, for example, SEQ ID NOs: 2090, 2091, 2092, 2093, 2095, 2097, 2098, 2100, or 2102.

[0306] Examples of polypeptides are shown in the sequence listing that have HMM bit scores greater than 851 when fitted to an HMM generated from the amino acid sequences set forth in FIG. 41 and are identified in the Sequence Listing of this application. Such polypeptides include, for example, SEQ ID NOs: 2323, 2325, 2327, 2329, 2330, 2332, 2334, or 2335.

[0307] Examples of polypeptides are shown in the sequence listing that have HMM bit scores greater than 761 when fitted to an HMM generated from the amino acid sequences set forth in FIG. 42 and are identified in the Sequence Listing of this application. Such polypeptides include, for example, SEQ ID NOs: 2, 4, 5, 6, 8, 10, 12, or 13.

[0308] Examples of polypeptides are shown in the sequence listing that have HMM bit scores greater than 815 when fitted to an HMM generated from the amino acid sequences set forth in FIG. 43 and are identified in the Sequence Listing of this application. Such polypeptides include, for example, SEQ ID NOs: 2028, 2030, 2031, 2032, 2034, 2036, 2037, or 2038.

[0309] Examples of polypeptides are shown in the sequence listing that have HMM bit scores greater than 1121 when fitted to an HMM generated from the amino acid sequences set forth in FIG. 44 and are identified in the Sequence Listing of this application. Such polypeptides include, for example, SEQ ID NOs: 1569, 1571, 1572, 1574, 1575, or 1577.

[0310] Examples of polypeptides are shown in the sequence listing that have HMM bit scores greater than 681 when fitted to an HMM generated from the amino acid sequences set forth in FIG. 45 and are identified in the Sequence Listing of this application. Such polypeptides include, for example, SEQ ID NOs: 501, 502, 503, 504, 506, 507, 509, 510, 511, 512, 514, or 515.

[0311] Examples of polypeptides are shown in the sequence listing that have HMM bit scores greater than 677 when fitted to an HMM generated from the amino acid sequences set forth in FIG. 46 and are identified in the Sequence Listing of this application. Such polypeptides include, for example, SEQ ID NOs: 2190, 2192, 2194, 2195, 2196, 2197, 2198, 2199, 2200, 2201, 2202, or 2203.

[0312] Examples of polypeptides are shown in the sequence listing that have HMM bit scores greater than 146 when fitted to an HMM generated from the amino acid sequences set forth in FIG. 47 and are identified in the Sequence Listing of this application. Such polypeptides include, for example, SEQ ID NOs: 749, 751, 752, 753, 755, 757, 759, or 760.

[0313] Examples of polypeptides are shown in the sequence listing that have HMM bit scores greater than 286 when fitted to an HMM generated from the amino acid sequences set forth in FIG. 48 and are identified in the Sequence Listing of this application. Such polypeptides include, for example, SEQ ID NOs: 79, 80, 81, 82, 83, 84, 85, or 86.

[0314] Examples of polypeptides are shown in the sequence listing that have HMM bit scores greater than 493 when fitted to an HMM generated from the amino acid sequences set forth in FIG. 49 and are identified in the Sequence Listing of this application. Such polypeptides include, for example, SEQ ID NOs: 284, 286, 287, 288, 289, or 291.

[0315] Examples of polypeptides are shown in the sequence listing that have HMM bit scores greater than 316 when fitted to an HMM generated from the amino acid sequences set forth in FIG. 50 and are identified in the Sequence Listing of this application. Such polypeptides include, for example, SEQ ID NOs: 2915, 2917, 2918, or 2919.

[0316] D. Percent Identity

[0317] In some embodiments, a biomass-modulating polypeptide has an amino acid sequence with at least 45% sequence identity, e.g., 50%, 52%, 56%, 59%, 61%, 65%, 70%, 75%, 80%, 85%, 90%, 95%, 97%, 98%, or 99% sequence identity, to one of the amino acid sequences set forth in SEQ ID NOs: 2, 4, 5, 6, 8, 10, 12, 13, 15, 17, 18, 20, 22, 24, 25, 26, 27, 29, 30, 32, 34, 35, 37, 38, 39, 41, 43, 45, 47, 49, 51, 53, 55, 56, 57, 59, 60, 62, 63, 64, 65, 67, 69, 70, 71, 73, 74, 75, 77, 79, 80, 81, 82, 83, 84, 85, 86, 88, 90, 91, 92, 93, 94, 95, 96, 97, 98, 99, 100, 101, 102, 100, 104, 105, 106, 107, 108, 109, 110, 111, 112, 113, 115, 117, 119, 120, 121, 122, 123, 124, 126, 128, 129, 131, 133, 135, 137, 139, 140, 141, 142, 144, 146, 147, 148, 149, 150, 152, 154, 155, 157, 158, 160, 162, 163, 165, 167, 169, 171, 173, 175, 176, 178, 180, 182, 183, 185, 187, 189, 191, 193, 194, 195, 196, 197, 198, 199, 200, 201, 203, 205, 207, 208, 209, 211, 213, 214, 215, 217, 218, 219, 220, 222, 223, 224, 226, 228, 229, 231, 232, 233, 234, 235, 236, 237, 238, 239, 240, 242, 244, 245, 246, 247, 248, 249, 250, 251, 252, 254, 255, 256, 257, 258, 259, 260, 261, 262, 263, 264, 265, 266, 267, 268, 269, 270, 271, 272, 273, 274, 275, 276, 277, 278, 279, 281, 282, 284, 286, 287, 288, 289, 291, 293, 294, 295, 297, 299, 300, 302, 304, 306, 307, 308, 310, 311, 313, 315, 316, 317, 318, 319, 320, 322, 324, 326, 328, 330, 331, 333, 335, 337, 338, 340, 342, 343, 345, 346, 347, 349, 350, 351, 353, 354, 355, 357, 358, 360, 362, 363, 364, 365, 367, 369, 370, 371, 372, 373, 374, 375, 377, 378, 379, 380, 382, 383, 384, 385, 386, 387, 389, 390, 391, 393, 395, 396, 398, 400, 401, 403, 404, 406, 408, 409, 410, 411, 412, 414, 415, 417, 419, 420, 421, 422, 423, 424, 425, 426, 427, 428, 429, 430, 431, 432, 433, 434, 435, 436, 437, 438, 439, 440, 441, 442, 443, 444, 445, 446, 447, 448, 449, 450, 451, 452, 453, 454, 456, 457, 459, 461, 462, 464, 466, 467, 468, 469, 470, 472, 474, 475, 477, 479, 480, 482, 483, 484, 485, 487, 488, 489, 490, 491, 492, 493, 494, 495, 497, 499, 501, 502, 503, 504, 506, 507, 509, 510, 511, 512, 514, 515, 516, 517, 518, 520, 522, 524, 526, 528, 530, 531, 532, 533, 534, 535, 536, 537, 538, 539, 540, 542, 543, 545, 546, 547, 548, 550, 551, 553, 554, 555, 557, 559, 560, 562, 563, 565, 566, 568, 570, 572, 573, 575, 576, 577, 579, 580, 581, 582, 583, 584, 585, 586, 587, 589, 590, 591, 592, 593, 595, 596, 597, 598, 599, 601, 602, 604, 605, 607, 609, 610, 611, 612, 613, 614, 615, 616, 617, 618, 619, 620, 621, 622, 623, 624, 625, 626, 627, 629, 631, 633, 634, 635, 36, 637, 638, 640, 642, 644, 646, 648, 650, 651, 653, 654, 655, 656, 657, 658, 659, 660, 662, 663, 664, 665, 666, 667, 669, 671, 672, 674, 676, 677, 679, 680, 682, 684, 685, 687, 689, 690, 691, 693, 694, 696, 697, 698, 00, 702, 704, 705, 706, 707, 709, 710, 712, 714, 715, 717, 718, 719, 720, 721, 722, 723, 725, 726, 727, 728, 730, 731, 732, 733, 734, 735, 737, 739, 741, 743, 744, 745, 746, 747, 749, 751, 752, 753, 755, 757, 759, 760, 762, 764, 766, 768, 770, 772, 773, 775, 776, 778, 780, 782, 784, 786, 788, 789, 791, 793, 794, 795, 796, 798, 800, 801, 802, 804, 805, 807, 809, 811, 813, 815, 817, 819, 820, 822, 823, 824, 825, 827, 828, 830, 832, 834, 836, 838, 840, 842, 843, 844, 846, 848, 849, 850, 851, 853, 855, 856, 857, 858, 860, 861, 863, 864, 866, 868, 870, 871, 873, 874, 876, 878, 880, 882, 883, 885, 887, 889, 890, 892, 893, 895, 896, 897, 899, 901, 902, 903, 905, 907, 908, 909, 910, 912, 914, 915, 916, 917, 919, 921, 923, 925, 926, 928, 930, 932, 934, 935, 936, 937, 939, 941, 943, 945, 947, 949, 950, 952, 953, 955, 957, 959, 960, 962, 964, 965, 967, 968, 970, 972, 974, 976, 978, 980, 981, 983, 985, 86, 87, 989, 991, 993, 995, 997, 998, 1000, 1002, 1003, 1005, 1007, 1008, 1009, 1011, 1013, 1014, 1016, 1018, 1020, 1022, 1023, 1024, 1025, 1026, 1027, 1029, 1001, 1003, 1004, 1006, 1008, 1009, 1041, 1042, 1043, 1044, 1045, 1046, 1048, 1049, 1050, 1051, 1052, 1054, 1056, 1058, 1060, 1061, 1062, 1064, 1066, 1067, 1069, 1070, 1071, 1072, 1074, 1076, 1077, 1078, 1079, 1081, 1083, 1085, 1087, 1088, 1090, 1092, 1093, 1095, 1096, 1097, 1099, 1101, 1102, 1104, 1105, 1107, 1108, 1110, 1111, 1112, 1113, 1114, 1115, 1117, 1119, 1120, 1121, 1122, 1124, 1126, 1128, 1130, 1132, 1133, 1135, 1137, 1139, 1141, 1142, 1144, 1146, 1148, 1150, 1152, 1154, 1156, 1157, 1158, 1160, 1162, 1164, 1166, 1168, 1169, 1171, 1173, 1175, 1176, 1177, 1179, 1180, 1181, 1183, 1185, 1187, 1188, 1190, 1192, 1193, 1194, 1196, 1198, 1200, 1201, 1203, 1205, 1207, 1209, 1210, 1212, 1214, 1216, 1218, 1219, 1221, 1222, 1224, 1226, 1228, 1230, 1232, 1234, 1235, 1236, 1238, 1240, 1241, 1243, 1245, 1247, 1249, 1251, 1252, 1253, 1255, 1257, 1259, 1261, 1263, 1265, 1266, 1268, 1270, 1272, 1274, 1276, 1278, 1279, 1281, 1283, 1285, 1287, 1289, 1291, 1293, 1294, 1296, 1297, 1299, 1300, 1302, 1304, 1306, 1308, 1309, 1310, 1312, 1313, 1314, 1316, 1318, 1320, 1322, 1324, 1325, 1326, 1328, 1329, 1330, 1332, 1333, 1334, 1336, 1338, 1339, 1340, 1341, 1342, 1343, 1344, 1345, 1347, 1349, 1350, 1352, 1353, 1355, 1357, 1358, 1359, 1360, 1361, 1363, 1364, 1366, 1367, 1369, 1370, 1371, 1372, 1373, 1375, 1376, 1377, 1379, 1380, 1381, 1382, 1384, 1386, 1388, 1389, 1391, 1393, 1395, 1397, 1399, 1401, 1402, 1403, 1405, 1407, 1409, 1410, 1412, 1414, 1416, 1418, 1420, 1421, 1422, 1424, 1426, 1428, 1429, 1431, 1433, 1435, 1437, 1439, 1440, 1441, 1443, 1445, 1446, 1448, 1450, 1452, 1454, 1456, 1457, 1459, 1461, 1463, 1465, 1467, 1469, 1471, 1473, 1475, 1477, 1479, 1481, 1482, 1483, 1485, 1486, 1488, 1489, 1490, 1492, 1493, 1495, 1497, 1498, 1500, 1502, 1503, 1505, 1506, 1507, 1508, 1509, 1511, 1512, 1514, 1515, 1516, 1518, 1520, 1522, 1523, 1524, 1525, 1526, 1528, 1529, 1531, 1533, 1534, 1535, 1537, 1538, 1540, 1542, 1544, 1546, 1547, 1549, 1550, 1552, 1554, 1555, 1557, 1558, 1560, 1562, 1563, 1564, 1565, 1568, 1569, 1571, 1572, 1574, 1575, 1577, 1578, 1580, 1581, 1583, 1584, 1586, 1588, 1589, 1591, 1593, 1594, 1595, 1596, 1598, 1599, 1600, 1602, 1603, 1604, 1605, 1607, 1609, 1611, 1612, 1613, 1615, 1616, 1618, 1619, 1621, 1622, 1624, 1626, 1628, 1629, 1630, 1632, 1634, 1636, 1637, 1639, 1640, 1642, 1644, 1646, 1647, 1648, 1649, 1650, 1652, 1654, 1656, 1657, 1658, 1660, 1661, 1662, 1664, 1666, 1668, 1669, 1670, 1671, 1672, 1674, 1676, 1677, 1679, 1680, 1681, 1682, 1683, 1684, 1686, 1688, 1689, 1691, 1693, 1695, 1697, 1699, 1700, 1701, 1702, 1704, 1705, 1706, 1707, 1708, 1710, 1711, 1712, 1713, 1714, 1715, 1717, 1719, 1721, 1723, 1724, 1725, 1727, 1729, 1731, 1732, 1734, 1735, 1737, 1739, 1741, 1743, 1745, 1746, 1747, 1749, 1751, 1753, 1755, 1757, 1758, 1759, 1761, 1762, 1764, 1765, 1766, 1767, 1769, 1770, 1772, 1773, 1774, 1776, 1777, 1779, 1781, 1783, 1784, 1786, 1788, 1790, 1792, 1794, 1795, 1797, 798, 1799, 1801, 1803, 1804, 1805, 1806, 1807, 1808, 1809, 1810, 1811, 1812, 1813, 1815, 1816, 1817, 1819, 1821, 1822, 1823, 1825, 1826, 1827, 1828, 1829, 1831, 1833, 1834, 1835, 1837, 1839, 1841, 1842, 1844, 1845, 1847, 1849, 1850, 1852, 1853, 1854, 1855, 1856, 1857, 1858, 1859, 1861, 1863, 1865, 1866, 1867, 1869, 1871, 1872, 1874, 1876, 1877, 1879, 1881, 1882, 1883, 1885, 1887, 1889, 1891, 1893, 1894, 1895, 1897, 1898, 1900, 1902, 1903, 1904, 1906, 1908, 1910, 1912, 1913, 1915, 1917, 1918, 1919, 1920, 1922, 1924, 1926, 1928, 1929, 1931, 1933, 1935, 1936, 1938, 1940, 1942, 1944, 1946, 1948, 1949, 1951, 1953, 1955, 1957, 1959, 1961, 1963, 1965, 1967, 1969, 1971, 1972, 1973, 1974, 1975, 1976, 1978, 1979, 1980, 1982, 1983, 1985, 1986, 1987, 1989, 1990, 1992, 1994, 1996, 1997, 1999, 2000, 2002, 2003, 2005, 2007, 2008, 2009, 2010, 2011, 2013, 2015, 2016, 2017, 2018, 2019, 2021, 2022, 2023, 2024, 2026, 2028, 2030, 2031, 2032, 2034, 2036, 2037, 2038, 2040, 2041, 2042, 2043, 2044, 2046, 2047, 2048, 2049, 2051, 2053, 2055, 2056, 2058, 2060, 2062, 2064, 2066, 2067, 2069, 2070, 2072, 2073, 2074, 2075, 2076, 2077, 2078, 2079, 2081, 2083, 2085, 2087, 2088, 2090, 2091, 2092, 2093, 2095, 2097, 2098, 2100, 2102, 2104, 2105, 2106, 2108, 2110, 2112, 2113, 2115, 2117, 2118, 2119, 2120, 2121, 2122, 2124, 2126, 2128, 2129, 2130, 2132, 2133, 2135, 2136, 2137, 2138, 2140, 2141, 2142, 2143, 2144, 2146, 2148, 2149, 2150, 2151, 2152, 2153, 2154, 2156, 2158, 2159, 2160, 2161, 2162, 2163, 2165, 2167, 2169, 2170, 2171, 2172, 2173, 2174, 2175, 2176, 2177, 2178, 2179, 2181, 2183, 2184, 2186, 2187, 2188, 2190, 2192, 2194, 2195, 2196, 2197, 2198, 2199, 2200, 2201, 2202, 2203, 2205, 2207, 2209, 2211, 2213, 2215, 2217, 2219, 2221, 2223, 2225, 2226, 2228, 2229, 2231, 2233, 2235, 2236, 2237, 2238, 2239, 2240, 2241, 2243, 2244, 2246, 2248, 2250, 2251, 2253, 2255, 2257, 2259, 2261, 2262, 2264, 2265, 2267, 2269, 2270, 2272, 2273, 2275, 2276, 2278, 2279, 2281, 2282, 2284, 2285, 2286, 2288, 2289, 2291, 2293, 2295, 2296, 2297, 2298, 2299, 2300, 2302, 2304, 2306, 2307, 2309, 2310, 2312, 2313, 2314, 2315, 2316, 2317, 2318, 2320, 2321, 2323, 2325, 2327, 2329, 2330, 2332, 2334, 2335, 2337, 2339, 2341, 2343, 2345, 2346, 2347, 2348, 2350, 2352, 2354, 2356, 2357, 2358, 2360, 2361, 2362, 2364, 2366, 2367, 2369, 2371, 2373, 2375, 2376, 2378, 2380, 2381, 2383, 2384, 2386, 2388, 2390, 2391, 2392, 2394, 2396, 2397, 2399, 2401, 2402, 2403, 2405, 2407, 2408, 2409, 2411, 2413, 2415, 2417, 2418, 2419, 2421, 2422, 2423, 2424, 2425, 2427, 2428, 2429, 2430, 2432, 2434, 2435, 2437, 2439, 2440, 2441, 2442, 2443, 2445, 2446, 2448, 2449, 2451, 2452, 2454, 2456, 2457, 2458, 2459, 2460, 2461, 2462, 2463, 2464, 2466, 2468, 2469, 2470, 2471, 2472, 2474, 2475, 2476, 2477, 2478, 2480, 2482, 2483, 2484, 2485, 2486, 2487, 2488, 2489, 2490, 2491, 2493, 2494, 2495, 2496, 2497, 2498, 2499, 2500, 2502, 2503, 2505, 2506, 2507, 2509, 2510, 2511, 2512, 2513, 2514, 2516, 2517, 2518, 2519, 2521, 2522, 2523, 2525, 2527, 2529, 2530, 2531, 2533, 2535, 2537, 2539, 2540, 2541, 2542, 2544, 2546, 2547, 2548, 2550, 2551, 2552, 2554, 2556, 2557, 2558, 2559, 2561, 2562, 2564, 2565, 2567, 2569, 2571, 2572, 2573, 2574, 2575, 2576, 2578, 2580, 2581, 2583, 2584, 2585, 2587, 2588, 2589, 2590, 2592, 2593, 2594, 2595, 2597, 2599, 2601, 2603, 2604, 2606, 2608, 2609, 2611, 2612, 2614, 2615, 2616, 2617, 2619, 2621, 2623, 2624, 2626, 2627, 2628, 2629, 2631, 2632, 2634, 2636, 2638, 2640, 2641, 2642, 2644, 2646, 2647, 2648, 2649, 2650, 2652, 2654, 2656, 2658, 2659, 2661, 2663, 2665, 2667, 2668, 2670, 2672, 2674, 2675, 2677, 2679, 2681, 2683, 2685, 2687, 2689, 2691, 2693, 2695, 2697, 2699, 2701, 2703, 2704, 2706, 2708, 2710, 2711, 2712, 2714, 2716, 2717, 2719, 2721, 2722, 2724, 2726, 2728, 2730, 2732, 2734, 2735, 2736, 2738, 2739, 2740, 2741, 2743, 2745, 2746, 2748, 2750, 2751, 2753, 2754, 2756, 2758, 2760, 2762, 2764, 2766, 2768, 2770, 2771, 2772, 2773, 2775, 2777, 2778, 2780, 2781, 2782, 2784, 2786, 2788, 2790, 2791, 2792, 2794, 2796, 2797, 2799, 2801, 2802, 2803, 2804, 2806, 2807, 2809, 2810, 2811, 2813, 2815, 2816, 2818, 2819, 2821, 2822, 2823, 2825, 2826, 2828, 2830, 2832, 2833, 2835, 2836, 2838, 2840, 2842, 2844, 2845, 2846, 2847, 2849, 2850, 2851, 2852, 2853, 2855, 2856, 2857, 2858, 2859, 2861, 2862, 2863, 2864, 2866, 2867, 2868, 2869, 2870, 2872, 2873, 2875, 2876, 2877, 2878, 2880, 2882, 2883, 2885, 2886, 2888, 2890, 2891, 2892, 2893, 2894, 2896, 2898, 2900, 2902, 2903, 2904, 2906, 2907, 2908, 2909, 2910, 2911, 2915, 2917, 2918, 2919, 2920, 2921, 2922, 2923, 2924, or 2926. Polypeptides having such a percent sequence identity often have a domain indicative of a biomass-modulating polypeptide and/or have an HMM bit score that is greater than 93, as discussed above. Amino acid sequences of biomass-modulating polypeptides having at least 80% sequence identity to one of the amino acid sequences set forth in SEQ ID NOs: 2, 4, 5, 6, 8, 10, 12, 13, 15, 17, 18, 20, 22, 24, 25, 26, 27, 29, 30, 32, 34, 35, 37, 38, 39, 41, 43, 45, 47, 49, 51, 53, 55, 56, 57, 59, 60, 62, 63, 64, 65, 67, 69, 70, 71, 73, 74, 75, 77, 79, 80, 81, 82, 83, 84, 85, 86, 88, 90, 91, 92, 93, 94, 95, 96, 97, 98, 99, 100, 101, 102, 100, 104, 105, 106, 107, 108, 109, 110, 111, 112, 113, 115, 117, 119, 120, 121, 122, 123, 124, 126, 128, 129, 131, 133, 135, 137, 139, 140, 141, 142, 144, 146, 147, 148, 149, 150, 152, 154, 155, 157, 158, 160, 162, 163, 165, 167, 169, 171, 173, 175, 176, 178, 180, 182, 183, 185, 187, 189, 191, 193, 194, 195, 196, 197, 198, 199, 200, 201, 203, 205, 207, 208, 209, 211, 213, 214, 215, 217, 218, 219, 220, 222, 223, 224, 226, 228, 229, 231, 232, 233, 234, 235, 236, 237, 238, 239, 240, 242, 244, 245, 246, 247, 248, 249, 250, 251, 252, 254, 255, 256, 257, 258, 259, 260, 261, 262, 263, 264, 265, 266, 267, 268, 269, 270, 271, 272, 273, 274, 275, 276, 277, 278, 279, 281, 282, 284, 286, 287, 288, 289, 291, 293, 294, 295, 297, 299, 300, 302, 304, 306, 307, 308, 310, 311, 313, 315, 316, 317, 318, 319, 320, 322, 324, 326, 328, 330, 331, 333, 335, 337, 338, 340, 342, 343, 345, 346, 347, 349, 350, 351, 353, 354, 355, 357, 358, 360, 362, 363, 364, 365, 367, 369, 370, 371, 372, 373, 374, 375, 377, 378, 379, 380, 382, 383, 384, 385, 386, 387, 389, 390, 391, 393, 395, 396, 398, 400, 401, 403, 404, 406, 408, 409, 410, 411, 412, 414, 415, 417, 419, 420, 421, 422, 423, 424, 425, 426, 427, 428, 429, 430, 431, 432, 433, 434, 435, 436, 437, 438, 439, 440, 441, 442, 443, 444, 445, 446, 447, 448, 449, 450, 451, 452, 453, 454, 456, 457, 459, 461, 462, 464, 466, 467, 468, 469, 470, 472, 474, 475, 477, 479, 480, 482, 483, 484, 485, 487, 488, 489, 490, 491, 492, 493, 494, 495, 497, 499, 501, 502, 503, 504, 506, 507, 509, 510, 511, 512, 514, 515, 516, 517, 518, 520, 522, 524, 526, 528, 530, 531, 532, 533, 534, 535, 536, 537, 538, 539, 540, 542, 543, 545, 546, 547, 548, 550, 551, 553, 554, 555, 557, 559, 560, 562, 563, 565, 566, 568, 570, 572, 573, 575, 576, 577, 579, 580, 581, 582, 583, 584, 585, 586, 587, 589, 590, 591, 592, 593, 595, 596, 597, 598, 599, 601, 602, 604, 605, 607, 609, 610, 611, 612, 613, 614, 615, 616, 617, 618, 619, 620, 621, 622, 623, 624, 625, 626, 627, 629, 631, 633, 634, 635, 36, 637, 638, 640, 642, 644, 646, 648, 650, 651, 653, 654, 655, 656, 657, 658, 659, 660, 662, 663, 664, 665, 666, 667, 669, 671, 672, 674, 676, 677, 679, 680, 682, 684, 685, 687, 689, 690, 691, 693, 694, 696, 697, 698, 00, 702, 704, 705, 706, 707, 709, 710, 712, 714, 715, 717, 718, 719, 720, 721, 722, 723, 725, 726, 727, 728, 730, 731, 732, 733, 734, 735, 737, 739, 741, 743, 744, 745, 746, 747, 749, 751, 752, 753, 755, 757, 759, 760, 762, 764, 766, 768, 770, 772, 773, 775, 776, 778, 780, 782, 784, 786, 788, 789, 791, 793, 794, 795, 796, 798, 800, 801, 802, 804, 805, 807, 809, 811, 813, 815, 817, 819, 820, 822, 823, 824, 825, 827, 828, 830, 832, 834, 836, 838, 840, 842, 843, 844, 846, 848, 849, 850, 851, 853, 855, 856, 857, 858, 860, 861, 863, 864, 866, 868, 870, 871, 873, 874, 876, 878, 880, 882, 883, 885, 887, 889, 890, 892, 893, 895, 896, 897, 899, 901, 902, 903, 905, 907, 908, 909, 910, 912, 914, 915, 916, 917, 919, 921, 923, 925, 926, 928, 930, 932, 934, 935, 936, 937, 939, 941, 943, 945, 947, 949, 950, 952, 953, 955, 957, 959, 960, 962, 964, 965, 967, 968, 970, 972, 974, 976, 978, 980, 981, 983, 985, 86, 87, 989, 991, 993, 995, 997, 998, 1000, 1002, 1003, 1005, 1007, 1008, 1009, 1011, 1013, 1014, 1016, 1018, 1020, 1022, 1023, 1024, 1025, 1026, 1027, 1029, 1001, 1003, 1004, 1006, 1008, 1009, 1041, 1042, 1043, 1044, 1045, 1046, 1048, 1049, 1050, 1051, 1052, 1054, 1056, 1058, 1060, 1061, 1062, 1064, 1066, 1067, 1069, 1070, 1071, 1072, 1074, 1076, 1077, 1078, 1079, 1081, 1083, 1085, 1087, 1088, 1090, 1092, 1093, 1095, 1096, 1097, 1099, 1101, 1102, 1104, 1105, 1107, 1108, 1110, 1111, 1112, 1113, 1114, 1115, 1117, 1119, 1120, 1121, 1122, 1124, 1126, 1128, 1130, 1132, 1133, 1135, 1137, 1139, 1141, 1142, 1144, 1146, 1148, 1150, 1152, 1154, 1156, 1157, 1158, 1160, 1162, 1164, 1166, 1168, 1169, 1171, 1173, 1175, 1176, 1177, 1179, 1180, 1181, 1183, 1185, 1187, 1188, 1190, 1192, 1193, 1194, 1196, 1198, 1200, 1201, 1203, 1205, 1207, 1209, 1210, 1212, 1214, 1216, 1218, 1219, 1221, 1222, 1224, 1226, 1228, 1230, 1232, 1234, 1235, 1236, 1238, 1240, 1241, 1243, 1245, 1247, 1249, 1251, 1252, 1253, 1255, 1257, 1259, 1261, 1263, 1265, 1266, 1268, 1270, 1272, 1274, 1276, 1278, 1279, 1281, 1283, 1285, 1287, 1289, 1291, 1293, 1294, 1296, 1297, 1299, 1300, 1302, 1304, 1306, 1308, 1309, 1310, 1312, 1313, 1314, 1316, 1318, 1320, 1322, 1324, 1325, 1326, 1328, 1329, 1330, 1332, 1333, 1334, 1336, 1338, 1339, 1340, 1341, 1342, 1343, 1344, 1345, 1347, 1349, 1350, 1352, 1353, 1355, 1357, 1358, 1359, 1360, 1361, 1363, 1364, 1366, 1367, 1369, 1370, 1371, 1372, 1373, 1375, 1376, 1377, 1379, 1380, 1381, 1382, 1384, 1386, 1388, 1389, 1391, 1393, 1395, 1397, 1399, 1401, 1402, 1403, 1405, 1407, 1409, 1410, 1412, 1414, 1416, 1418, 1420, 1421, 1422, 1424, 1426, 1428, 1429, 1431, 1433, 1435, 1437, 1439, 1440, 1441, 1443, 1445, 1446, 1448, 1450, 1452, 1454, 1456, 1457, 1459, 1461, 1463, 1465, 1467, 1469, 1471, 1473, 1475, 1477, 1479, 1481, 1482, 1483, 1485, 1486, 1488, 1489, 1490, 1492, 1493, 1495, 1497, 1498, 1500, 1502, 1503, 1505, 1506, 1507, 1508, 1509, 1511, 1512, 1514, 1515, 1516, 1518, 1520, 1522, 1523, 1524, 1525, 1526, 1528, 1529, 1531, 1533, 1534, 1535, 1537, 1538, 1540, 1542, 1544, 1546, 1547, 1549, 1550, 1552, 1554, 1555, 1557, 1558, 1560, 1562, 1563, 1564, 1565, 1568, 1569, 1571, 1572, 1574, 1575, 1577, 1578, 1580, 1581, 1583, 1584, 1586, 1588, 1589, 1591, 1593, 1594, 1595, 1596, 1598, 1599, 1600, 1602, 1603, 1604, 1605, 1607, 1609, 1611, 1612, 1613, 1615, 1616, 1618, 1619, 1621, 1622, 1624, 1626, 1628, 1629, 1630, 1632, 1634, 1636, 1637, 1639, 1640, 1642, 1644, 1646, 1647, 1648, 1649, 1650, 1652, 1654, 1656, 1657, 1658, 1660, 1661, 1662, 1664, 1666, 1668, 1669, 1670, 1671, 1672, 1674, 1676, 1677, 1679, 1680, 1681, 1682, 1683, 1684, 1686, 1688, 1689, 1691, 1693, 1695, 1697, 1699, 1700, 1701, 1702, 1704, 1705, 1706, 1707, 1708, 1710, 1711, 1712, 1713, 1714, 1715, 1717, 1719, 1721, 1723, 1724, 1725, 1727, 1729, 1731, 1732, 1734, 1735, 1737, 1739, 1741, 1743, 1745, 1746, 1747, 1749, 1751, 1753, 1755, 1757, 1758, 1759, 1761, 1762, 1764, 1765, 1766, 1767, 1769, 1770, 1772, 1773, 1774, 1776, 1777, 1779, 1781, 1783, 1784, 1786, 1788, 1790, 1792, 1794, 1795, 1797, 798, 1799, 1801, 1803, 1804, 1805, 1806, 1807, 1808, 1809, 1810, 1811, 1812, 1813, 1815, 1816, 1817, 1819, 1821, 1822, 1823, 1825, 1826, 1827, 1828, 1829, 1831, 1833, 1834, 1835, 1837, 1839, 1841, 1842, 1844, 1845, 1847, 1849, 1850, 1852, 1853, 1854, 1855, 1856, 1857, 1858, 1859, 1861, 1863, 1865, 1866, 1867, 1869, 1871, 1872, 1874, 1876, 1877, 1879, 1881, 1882, 1883, 1885, 1887, 1889, 1891, 1893, 1894, 1895, 1897, 1898, 1900, 1902, 1903, 1904, 1906, 1908, 1910, 1912, 1913, 1915, 1917, 1918, 1919, 1920, 1922, 1924, 1926, 1928, 1929, 1931, 1933, 1935, 1936, 1938, 1940, 1942, 1944, 1946, 1948, 1949, 1951, 1953, 1955, 1957, 1959, 1961, 1963, 1965, 1967, 1969, 1971, 1972, 1973, 1974, 1975, 1976, 1978, 1979, 1980, 1982, 1983, 1985, 1986, 1987, 1989, 1990, 1992, 1994, 1996, 1997, 1999, 2000, 2002, 2003, 2005, 2007, 2008, 2009, 2010, 2011, 2013, 2015, 2016, 2017, 2018, 2019, 2021, 2022, 2023, 2024, 2026, 2028, 2030, 2031, 2032, 2034, 2036, 2037, 2038, 2040, 2041, 2042, 2043, 2044, 2046, 2047, 2048, 2049, 2051, 2053, 2055, 2056, 2058, 2060, 2062, 2064, 2066, 2067, 2069, 2070, 2072, 2073, 2074, 2075, 2076, 2077, 2078, 2079, 2081, 2083, 2085, 2087, 2088, 2090, 2091, 2092, 2093, 2095, 2097, 2098, 2100, 2102, 2104, 2105, 2106, 2108, 2110, 2112, 2113, 2115, 2117, 2118, 2119, 2120, 2121, 2122, 2124, 2126, 2128, 2129, 2130, 2132, 2133, 2135, 2136, 2137, 2138, 2140, 2141, 2142, 2143, 2144, 2146, 2148, 2149, 2150, 2151, 2152, 2153, 2154, 2156, 2158, 2159, 2160, 2161, 2162, 2163, 2165, 2167, 2169, 2170, 2171, 2172, 2173, 2174, 2175, 2176, 2177, 2178, 2179, 2181, 2183, 2184, 2186, 2187, 2188, 2190, 2192, 2194, 2195, 2196, 2197, 2198, 2199, 2200, 2201, 2202, 2203, 2205, 2207, 2209, 2211, 2213, 2215, 2217, 2219, 2221, 2223, 2225, 2226, 2228, 2229, 2231, 2233, 2235, 2236, 2237, 2238, 2239, 2240, 2241, 2243, 2244, 2246, 2248, 2250, 2251, 2253, 2255, 2257, 2259, 2261, 2262, 2264, 2265, 2267, 2269, 2270, 2272, 2273, 2275, 2276, 2278, 2279, 2281, 2282, 2284, 2285, 2286, 2288, 2289, 2291, 2293, 2295, 2296, 2297, 2298, 2299, 2300, 2302, 2304, 2306, 2307, 2309, 2310, 2312, 2313, 2314, 2315, 2316, 2317, 2318, 2320, 2321, 2323, 2325, 2327, 2329, 2330, 2332, 2334, 2335, 2337, 2339, 2341, 2343, 2345, 2346, 2347, 2348, 2350, 2352, 2354, 2356, 2357, 2358, 2360, 2361, 2362, 2364, 2366, 2367, 2369, 2371, 2373, 2375, 2376, 2378, 2380, 2381, 2383, 2384, 2386, 2388, 2390, 2391, 2392, 2394, 2396, 2397, 2399, 2401, 2402, 2403, 2405, 2407, 2408, 2409, 2411, 2413, 2415, 2417, 2418, 2419, 2421, 2422, 2423, 2424, 2425, 2427, 2428, 2429, 2430, 2432, 2434, 2435, 2437, 2439, 2440, 2441, 2442, 2443, 2445, 2446, 2448, 2449, 2451, 2452, 2454, 2456, 2457, 2458, 2459, 2460, 2461, 2462, 2463, 2464, 2466, 2468, 2469, 2470, 2471, 2472, 2474, 2475, 2476, 2477, 2478, 2480, 2482, 2483, 2484, 2485, 2486, 2487, 2488, 2489, 2490, 2491, 2493, 2494, 2495, 2496, 2497, 2498, 2499, 2500, 2502, 2503, 2505, 2506, 2507, 2509, 2510, 2511, 2512, 2513, 2514, 2516, 2517, 2518, 2519, 2521, 2522, 2523, 2525, 2527, 2529, 2530, 2531, 2533, 2535, 2537, 2539, 2540, 2541, 2542, 2544, 2546, 2547, 2548, 2550, 2551, 2552, 2554, 2556, 2557, 2558, 2559, 2561, 2562, 2564, 2565, 2567, 2569, 2571, 2572, 2573, 2574, 2575, 2576, 2578, 2580, 2581, 2583, 2584, 2585, 2587, 2588, 2589, 2590, 2592, 2593, 2594, 2595, 2597, 2599, 2601, 2603, 2604, 2606, 2608, 2609, 2611, 2612, 2614, 2615, 2616, 2617, 2619, 2621, 2623, 2624, 2626, 2627, 2628, 2629, 2631, 2632, 2634, 2636, 2638, 2640, 2641, 2642, 2644, 2646, 2647, 2648, 2649, 2650, 2652, 2654, 2656, 2658, 2659, 2661, 2663, 2665, 2667, 2668, 2670, 2672, 2674, 2675, 2677, 2679, 2681, 2683, 2685, 2687, 2689, 2691, 2693, 2695, 2697, 2699, 2701, 2703, 2704, 2706, 2708, 2710, 2711, 2712, 2714, 2716, 2717, 2719, 2721, 2722, 2724, 2726, 2728, 2730, 2732, 2734, 2735, 2736, 2738, 2739, 2740, 2741, 2743, 2745, 2746, 2748, 2750, 2751, 2753, 2754, 2756, 2758, 2760, 2762, 2764, 2766, 2768, 2770, 2771, 2772, 2773, 2775, 2777, 2778, 2780, 2781, 2782, 2784, 2786, 2788, 2790, 2791, 2792, 2794, 2796, 2797, 2799, 2801, 2802, 2803, 2804, 2806, 2807, 2809, 2810, 2811, 2813, 2815, 2816, 2818, 2819, 2821, 2822, 2823, 2825, 2826, 2828, 2830, 2832, 2833, 2835, 2836, 2838, 2840, 2842, 2844, 2845, 2846, 2847, 2849, 2850, 2851, 2852, 2853, 2855, 2856, 2857, 2858, 2859, 2861, 2862, 2863, 2864, 2866, 2867, 2868, 2869, 2870, 2872, 2873, 2875, 2876, 2877, 2878, 2880, 2882, 2883, 2885, 2886, 2888, 2890, 2891, 2892, 2893, 2894, 2896, 2898, 2900, 2902, 2903, 2904, 2906, 2907, 2908, 2909, 2910, 2911, 2915, 2917, 2918, 2919, 2920, 2921, 2922, 2923, 2924, or 2926 are provided in FIGS. 1-50 and in the Sequence Listing.

[0318] “Percent sequence identity” refers to the degree of sequence identity between any given reference sequence, e.g., SEQ ID NO: 1, and a candidate biomass-modulating sequence. A candidate sequence typically has a length that is from 80 percent to 200 percent of the length of the reference sequence, e.g., 82, 85, 87, 89, 90, 93, 95, 97, 99, 100, 105, 110, 115, 120, 130, 140, 150, 160, 170, 180, 190, or 200 percent of the length of the reference sequence. A percent identity for any candidate nucleic acid or polypeptide relative to a reference nucleic acid or polypeptide can be determined as follows. A reference sequence (e.g., a nucleic acid sequence or an amino acid sequence) is aligned to one or more candidate sequences using the computer program ClustalW (version 1.83, default parameters), which allows alignments of nucleic acid or polypeptide sequences to be carried out across their entire length (global alignment). Chenna et al., Nucleic Acids Res., 31(13):3497-500 (2003).

[0319] ClustalW calculates the best match between a reference and one or more candidate sequences, and aligns them so that identities, similarities and differences can be determined. Gaps of one or more residues can be inserted into a reference sequence, a candidate sequence, or both, to maximize sequence alignments. For fast pairwise alignment of nucleic acid sequences, the following default parameters are used: word size: 2; window size: 4; scoring method: percentage; number of top diagonals: 4; and gap penalty: 5. For multiple alignment of nucleic acid sequences, the following parameters are used: gap opening penalty: 10.0; gap extension penalty: 5.0; and weight transitions: yes. For fast pairwise alignment of protein sequences, the following parameters are used: word size: 1; window size: 5; scoring method: percentage; number of top diagonals: 5; gap penalty: 3. For multiple alignment of protein sequences, the following parameters are used: weight matrix: blosum; gap opening penalty: 10.0; gap extension penalty: 0.05; hydrophilic gaps: on; hydrophilic residues: Gly, Pro, Ser, Asn, Asp, Gln, Glu, Arg, and Lys; residue-specific gap penalties: on. The ClustalW output is a sequence alignment that reflects the relationship between sequences. ClustalW can be run, for example, at the Baylor College of Medicine Search Launcher site on the World Wide Web (searchlauncher.bcm.tmc.edu/multi-align/multi-align.html) and at the European Bioinformatics Institute site on the World Wide Web (ebi.ac.uk/clustalw).

[0320] To determine percent identity of a candidate nucleic acid or amino acid sequence to a reference sequence, the sequences are aligned using ClustalW, the number of identical matches in the alignment is divided by the length of the reference sequence, and the result is multiplied by 100. It is noted that the percent identity value can be rounded to the nearest tenth. For example, 78.11, 78.12, 78.13, and 78.14 are rounded down to 78.1, while 78.15, 78.16, 78.17, 78.18, and 78.19 are rounded up to 78.2.

[0321] In some cases, a biomass-modulating polypeptide has an amino acid sequence with at least 45% sequence identity, e.g., 50%, 52%, 56%, 59%, 61%, 65%, 70%, 75%, 80%, 85%, 90%, 95%, 97%, 98%, or 99% sequence identity, to the amino acid sequence set forth in SEQ ID NO:2880 Amino acid sequences of polypeptides having greater than 45% sequence identity to the polypeptide set forth in SEQ ID NO:2880 are provided in FIG. 1 and in the Sequence Listing.

[0322] In some cases, a biomass-modulating polypeptide has an amino acid sequence with at least 45% sequence identity, e.g., 50%, 52%, 56%, 59%, 61%, 65%, 70%, 75%, 80%, 85%, 90%, 95%, 97%, 98%, or 99% sequence identity, to the amino acid sequence set forth in SEQ ID NO:310 Amino acid sequences of polypeptides having greater than 45% sequence identity to the polypeptide set forth in SEQ ID NO:310 are provided in FIG. 2 and in the Sequence Listing.

[0323] In some cases, a biomass-modulating polypeptide has an amino acid sequence with at least 45% sequence identity, e.g., 50%, 52%, 56%, 59%, 61%, 65%, 70%, 75%, 80%, 85%, 90%, 95%, 97%, 98%, or 99% sequence identity, to the amino acid sequence set forth in SEQ ID NO:403 Amino acid sequences of polypeptides having greater than 45% sequence identity to the polypeptide set forth in SEQ ID NO:403 are provided in FIG. 3 and in the Sequence Listing.

[0324] In some cases, a biomass-modulating polypeptide has an amino acid sequence with at least 45% sequence identity, e.g., 50%, 52%, 56%, 59%, 61%, 65%, 70%, 75%, 80%, 85%, 90%, 95%, 97%, 98%, or 99% sequence identity, to the amino acid sequence set forth in SEQ ID NO:669 Amino acid sequences of polypeptides having greater than 45% sequence identity to the polypeptide set forth in SEQ ID NO:669 are provided in FIG. 4 and in the Sequence Listing.

[0325] In some cases, a biomass-modulating polypeptide has an amino acid sequence with at least 45% sequence identity, e.g., 50%, 52%, 56%, 59%, 61%, 65%, 70%, 75%, 80%, 85%, 90%, 95%, 97%, 98%, or 99% sequence identity, to the amino acid sequence set forth in SEQ ID NO:1797 Amino acid sequences of polypeptides having greater than 45% sequence identity to the polypeptide set forth in SEQ ID NO:1797 are provided in FIG. 5 and in the Sequence Listing.

[0326] In some cases, a biomass-modulating polypeptide has an amino acid sequence with at least 45% sequence identity, e.g., 50%, 52%, 56%, 59%, 61%, 65%, 70%, 75%, 80%, 85%, 90%, 95%, 97%, 98%, or 99% sequence identity, to the amino acid sequence set forth in SEQ ID NO:717 Amino acid sequences of polypeptides having greater than 45% sequence identity to the polypeptide set forth in SEQ ID NO:717 are provided in FIG. 6 and in the Sequence Listing.

[0327] In some cases, a biomass-modulating polypeptide has an amino acid sequence with at least 45% sequence identity, e.g., 50%, 52%, 56%, 59%, 61%, 65%, 70%, 75%, 80%, 85%, 90%, 95%, 97%, 98%, or 99% sequence identity, to the amino acid sequence set forth in SEQ ID NO:693 Amino acid sequences of polypeptides having greater than 45% sequence identity to the polypeptide set forth in SEQ ID NO:693 are provided in FIG. 7 and in the Sequence Listing.

[0328] In some cases, a biomass-modulating polypeptide has an amino acid sequence with at least 45% sequence identity, e.g., 50%, 52%, 56%, 59%, 61%, 65%, 70%, 75%, 80%, 85%, 90%, 95%, 97%, 98%, or 99% sequence identity, to the amino acid sequence set forth in SEQ ID NO:1518 Amino acid sequences of polypeptides having greater than 45% sequence identity to the polypeptide set forth in SEQ ID NO:1518 are provided in FIG. 8 and in the Sequence Listing.

[0329] In some cases, a biomass-modulating polypeptide has an amino acid sequence with at least 45% sequence identity, e.g., 50%, 52%, 56%, 59%, 61%, 65%, 70%, 75%, 80%, 85%, 90%, 95%, 97%, 98%, or 99% sequence identity, to the amino acid sequence set forth in SEQ ID NO:1624 Amino acid sequences of polypeptides having greater than 45% sequence identity to the polypeptide set forth in SEQ ID NO:1624 are provided in FIG. 9 and in the Sequence Listing.

[0330] In some cases, a biomass-modulating polypeptide has an amino acid sequence with at least 45% sequence identity, e.g., 50%, 52%, 56%, 59%, 61%, 65%, 70%, 75%, 80%, 85%, 90%, 95%, 97%, 98%, or 99% sequence identity, to the amino acid sequence set forth in SEQ ID NO:1887 Amino acid sequences of polypeptides having greater than 45% sequence identity to the polypeptide set forth in SEQ ID NO:1887 are provided in FIG. 10 and in the Sequence Listing.

[0331] In some cases, a biomass-modulating polypeptide has an amino acid sequence with at least 45% sequence identity, e.g., 50%, 52%, 56%, 59%, 61%, 65%, 70%, 75%, 80%, 85%, 90%, 95%, 97%, 98%, or 99% sequence identity, to the amino acid sequence set forth in SEQ ID NO:834 Amino acid sequences of polypeptides having greater than 45% sequence identity to the polypeptide set forth in SEQ ID NO:834 are provided in FIG. 11 and in the Sequence Listing.

[0332] In some cases, a biomass-modulating polypeptide has an amino acid sequence with at least 45% sequence identity, e.g., 50%, 52%, 56%, 59%, 61%, 65%, 70%, 75%, 80%, 85%, 90%, 95%, 97%, 98%, or 99% sequence identity, to the amino acid sequence set forth in SEQ ID NO:1318 Amino acid sequences of polypeptides having greater than 45% sequence identity to the polypeptide set forth in SEQ ID NO:1318 are provided in FIG. 12 and in the Sequence Listing.

[0333] In some cases, a biomass-modulating polypeptide has an amino acid sequence with at least 45% sequence identity, e.g., 50%, 52%, 56%, 59%, 61%, 65%, 70%, 75%, 80%, 85%, 90%, 95%, 97%, 98%, or 99% sequence identity, to the amino acid sequence set forth in SEQ ID NO:459 Amino acid sequences of polypeptides having greater than 45% sequence identity to the polypeptide set forth in SEQ ID NO:459 are provided in FIG. 13 and in the Sequence Listing.

[0334] In some cases, a biomass-modulating polypeptide has an amino acid sequence with at least 45% sequence identity, e.g., 50%, 52%, 56%, 59%, 61%, 65%, 70%, 75%, 80%, 85%, 90%, 95%, 97%, 98%, or 99% sequence identity, to the amino acid sequence set forth in SEQ ID NO:335 Amino acid sequences of polypeptides having greater than 45% sequence identity to the polypeptide set forth in SEQ ID NO:335 are provided in FIG. 14 and in the Sequence Listing.

[0335] In some cases, a biomass-modulating polypeptide has an amino acid sequence with at least 45% sequence identity, e.g., 50%, 52%, 56%, 59%, 61%, 65%, 70%, 75%, 80%, 85%, 90%, 95%, 97%, 98%, or 99% sequence identity, to the amino acid sequence set forth in SEQ ID NO:846 Amino acid sequences of polypeptides having greater than 45% sequence identity to the polypeptide set forth in SEQ ID NO:846 are provided in FIG. 15 and in the Sequence Listing.

[0336] In some cases, a biomass-modulating polypeptide has an amino acid sequence with at least 45% sequence identity, e.g., 50%, 52%, 56%, 59%, 61%, 65%, 70%, 75%, 80%, 85%, 90%, 95%, 97%, 98%, or 99% sequence identity, to the amino acid sequence set forth in SEQ ID NO:1426 Amino acid sequences of polypeptides having greater than 45% sequence identity to the polypeptide set forth in SEQ ID NO: 1426 are provided in FIG. 16 and in the Sequence Listing.

[0337] In some cases, a biomass-modulating polypeptide has an amino acid sequence with at least 45% sequence identity, e.g., 50%, 52%, 56%, 59%, 61%, 65%, 70%, 75%, 80%, 85%, 90%, 95%, 97%, 98%, or 99% sequence identity, to the amino acid sequence set forth in SEQ ID NO:2525 Amino acid sequences of polypeptides having greater than 45% sequence identity to the polypeptide set forth in SEQ ID NO:2525 are provided in FIG. 17 and in the Sequence Listing.

[0338] In some cases, a biomass-modulating polypeptide has an amino acid sequence with at least 45% sequence identity, e.g., 50%, 52%, 56%, 59%, 61%, 65%, 70%, 75%, 80%, 85%, 90%, 95%, 97%, 98%, or 99% sequence identity, to the amino acid sequence set forth in SEQ ID NO:1272 Amino acid sequences of polypeptides having greater than 45% sequence identity to the polypeptide set forth in SEQ ID NO:1272 are provided in FIG. 18 and in the Sequence Listing.

[0339] In some cases, a biomass-modulating polypeptide has an amino acid sequence with at least 45% sequence identity, e.g., 50%, 52%, 56%, 59%, 61%, 65%, 70%, 75%, 80%, 85%, 90%, 95%, 97%, 98%, or 99% sequence identity, to the amino acid sequence set forth in SEQ ID NO:878 Amino acid sequences of polypeptides having greater than 45% sequence identity to the polypeptide set forth in SEQ ID NO:878 are provided in FIG. 19 and in the Sequence Listing.

[0340] In some cases, a biomass-modulating polypeptide has an amino acid sequence with at least 45% sequence identity, e.g., 50%, 52%, 56%, 59%, 61%, 65%, 70%, 75%, 80%, 85%, 90%, 95%, 97%, 98%, or 99% sequence identity, to the amino acid sequence set forth in SEQ ID NO:1660 Amino acid sequences of polypeptides having greater than 45% sequence identity to the polypeptide set forth in SEQ ID NO:1660 are provided in FIG. 20 and in the Sequence Listing.

[0341] In some cases, a biomass-modulating polypeptide has an amino acid sequence with at least 45% sequence identity, e.g., 50%, 52%, 56%, 59%, 61%, 65%, 70%, 75%, 80%, 85%, 90%, 95%, 97%, 98%, or 99% sequence identity, to the amino acid sequence set forth in SEQ ID NO:2654 Amino acid sequences of polypeptides having greater than 45% sequence identity to the polypeptide set forth in SEQ ID NO:2654 are provided in FIG. 21 and in the Sequence Listing.

[0342] In some cases, a biomass-modulating polypeptide has an amino acid sequence with at least 45% sequence identity, e.g., 50%, 52%, 56%, 59%, 61%, 65%, 70%, 75%, 80%, 85%, 90%, 95%, 97%, 98%, or 99% sequence identity, to the amino acid sequence set forth in SEQ ID NO:1137 Amino acid sequences of polypeptides having greater than 45% sequence identity to the polypeptide set forth in SEQ ID NO:1137 are provided in FIG. 22 and in the Sequence Listing.

[0343] In some cases, a biomass-modulating polypeptide has an amino acid sequence with at least 45% sequence identity, e.g., 50%, 52%, 56%, 59%, 61%, 65%, 70%, 75%, 80%, 85%, 90%, 95%, 97%, 98%, or 99% sequence identity, to the amino acid sequence set forth in SEQ ID NO:2466 Amino acid sequences of polypeptides having greater than 45% sequence identity to the polypeptide set forth in SEQ ID NO:2466 are provided in FIG. 23 and in the Sequence Listing.

[0344] In some cases, a biomass-modulating polypeptide has an amino acid sequence with at least 45% sequence identity, e.g., 50%, 52%, 56%, 59%, 61%, 65%, 70%, 75%, 80%, 85%, 90%, 95%, 97%, 98%, or 99% sequence identity, to the amino acid sequence set forth in SEQ ID NO:1107 Amino acid sequences of polypeptides having greater than 45% sequence identity to the polypeptide set forth in SEQ ID NO:1107 are provided in FIG. 24 and in the Sequence Listing.

[0345] In some cases, a biomass-modulating polypeptide has an amino acid sequence with at least 45% sequence identity, e.g., 50%, 52%, 56%, 59%, 61%, 65%, 70%, 75%, 80%, 85%, 90%, 95%, 97%, 98%, or 99% sequence identity, to the amino acid sequence set forth in SEQ ID NO:1946 Amino acid sequences of polypeptides having greater than 45% sequence identity to the polypeptide set forth in SEQ ID NO:1946 are provided in FIG. 25 and in the Sequence Listing.

[0346] In some cases, a biomass-modulating polypeptide has an amino acid sequence with at least 45% sequence identity, e.g., 50%, 52%, 56%, 59%, 61%, 65%, 70%, 75%, 80%, 85%, 90%, 95%, 97%, 98%, or 99% sequence identity, to the amino acid sequence set forth in SEQ ID NO:1054 Amino acid sequences of polypeptides having greater than 45% sequence identity to the polypeptide set forth in SEQ ID NO:1054 are provided in FIG. 26 and in the Sequence Listing.

[0347] In some cases, a biomass-modulating polypeptide has an amino acid sequence with at least 45% sequence identity, e.g., 50%, 52%, 56%, 59%, 61%, 65%, 70%, 75%, 80%, 85%, 90%, 95%, 97%, 98%, or 99% sequence identity, to the amino acid sequence set forth in SEQ ID NO:115 Amino acid sequences of polypeptides having greater than 45% sequence identity to the polypeptide set forth in SEQ ID NO:115 are provided in FIG. 27 and in the Sequence Listing.

[0348] In some cases, a biomass-modulating polypeptide has an amino acid sequence with at least 45% sequence identity, e.g., 50%, 52%, 56%, 59%, 61%, 65%, 70%, 75%, 80%, 85%, 90%, 95%, 97%, 98%, or 99% sequence identity, to the amino acid sequence set forth in SEQ ID NO:2708 Amino acid sequences of polypeptides having greater than 45% sequence identity to the polypeptide set forth in SEQ ID NO:2708 are provided in FIG. 28 and in the Sequence Listing.

[0349] In some cases, a biomass-modulating polypeptide has an amino acid sequence with at least 45% sequence identity, e.g., 50%, 52%, 56%, 59%, 61%, 65%, 70%, 75%, 80%, 85%, 90%, 95%, 97%, 98%, or 99% sequence identity, to the amino acid sequence set forth in SEQ ID NO:1481 Amino acid sequences of polypeptides having greater than 45% sequence identity to the polypeptide set forth in SEQ ID NO:1481 are provided in FIG. 29 and in the Sequence Listing.

[0350] In some cases, a biomass-modulating polypeptide has an amino acid sequence with at least 45% sequence identity, e.g., 50%, 52%, 56%, 59%, 61%, 65%, 70%, 75%, 80%, 85%, 90%, 95%, 97%, 98%, or 99% sequence identity, to the amino acid sequence set forth in SEQ ID NO:2748 Amino acid sequences of polypeptides having greater than 45% sequence identity to the polypeptide set forth in SEQ ID NO:2748 are provided in FIG. 30 and in the Sequence Listing.

[0351] In some cases, a biomass-modulating polypeptide has an amino acid sequence with at least 45% sequence identity, e.g., 50%, 52%, 56%, 59%, 61%, 65%, 70%, 75%, 80%, 85%, 90%, 95%, 97%, 98%, or 99% sequence identity, to the amino acid sequence set forth in SEQ ID NO:947 Amino acid sequences of polypeptides having greater than 45% sequence identity to the polypeptide set forth in SEQ ID NO:947 are provided in FIG. 31 and in the Sequence Listing.

[0352] In some cases, a biomass-modulating polypeptide has an amino acid sequence with at least 45% sequence identity, e.g., 50%, 52%, 56%, 59%, 61%, 65%, 70%, 75%, 80%, 85%, 90%, 95%, 97%, 98%, or 99% sequence identity, to the amino acid sequence set forth in SEQ ID NO:1727 Amino acid sequences of polypeptides having greater than 45% sequence identity to the polypeptide set forth in SEQ ID NO:1727 are provided in FIG. 32 and in the Sequence Listing.

[0353] In some cases, a biomass-modulating polypeptide has an amino acid sequence with at least 45% sequence identity, e.g., 50%, 52%, 56%, 59%, 61%, 65%, 70%, 75%, 80%, 85%, 90%, 95%, 97%, 98%, or 99% sequence identity, to the amino acid sequence set forth in SEQ ID NO:2146 Amino acid sequences of polypeptides having greater than 45% sequence identity to the polypeptide set forth in SEQ ID NO:2146 are provided in FIG. 33 and in the Sequence Listing.

[0354] In some cases, a biomass-modulating polypeptide has an amino acid sequence with at least 45% sequence identity, e.g., 50%, 52%, 56%, 59%, 61%, 65%, 70%, 75%, 80%, 85%, 90%, 95%, 97%, 98%, or 99% sequence identity, to the amino acid sequence set forth in SEQ ID NO:2619 Amino acid sequences of polypeptides having greater than 45% sequence identity to the polypeptide set forth in SEQ ID NO:2619 are provided in FIG. 34 and in the Sequence Listing.

[0355] In some cases, a biomass-modulating polypeptide has an amino acid sequence with at least 45% sequence identity, e.g., 50%, 52%, 56%, 59%, 61%, 65%, 70%, 75%, 80%, 85%, 90%, 95%, 97%, 98%, or 99% sequence identity, to the amino acid sequence set forth in SEQ ID NO:211 Amino acid sequences of polypeptides having greater than 45% sequence identity to the polypeptide set forth in SEQ ID NO:211 are provided in FIG. 35 and in the Sequence Listing.

[0356] In some cases, a biomass-modulating polypeptide has an amino acid sequence with at least 45% sequence identity, e.g., 50%, 52%, 56%, 59%, 61%, 65%, 70%, 75%, 80%, 85%, 90%, 95%, 97%, 98%, or 99% sequence identity, to the amino acid sequence set forth in SEQ ID NO:629 Amino acid sequences of polypeptides having greater than 45% sequence identity to the polypeptide set forth in SEQ ID NO:629 are provided in FIG. 36 and in the Sequence Listing.

[0357] In some cases, a biomass-modulating polypeptide has an amino acid sequence with at least 45% sequence identity, e.g., 50%, 52%, 56%, 59%, 61%, 65%, 70%, 75%, 80%, 85%, 90%, 95%, 97%, 98%, or 99% sequence identity, to the amino acid sequence set forth in SEQ ID NO:2544 Amino acid sequences of polypeptides having greater than 45% sequence identity to the polypeptide set forth in SEQ ID NO:2544 are provided in FIG. 37 and in the Sequence Listing.

[0358] In some cases, a biomass-modulating polypeptide has an amino acid sequence with at least 45% sequence identity, e.g., 50%, 52%, 56%, 59%, 61%, 65%, 70%, 75%, 80%, 85%, 90%, 95%, 97%, 98%, or 99% sequence identity, to the amino acid sequence set forth in SEQ ID NO:2599 Amino acid sequences of polypeptides having greater than 45% sequence identity to the polypeptide set forth in SEQ ID NO:2599 are provided in FIG. 38 and in the Sequence Listing.

[0359] In some cases, a biomass-modulating polypeptide has an amino acid sequence with at least 45% sequence identity, e.g., 50%, 52%, 56%, 59%, 61%, 65%, 70%, 75%, 80%, 85%, 90%, 95%, 97%, 98%, or 99% sequence identity, to the amino acid sequence set forth in SEQ ID NO:2437 Amino acid sequences of polypeptides having greater than 45% sequence identity to the polypeptide set forth in SEQ ID NO:2437 are provided in FIG. 39 and in the Sequence Listing.

[0360] In some cases, a biomass-modulating polypeptide has an amino acid sequence with at least 45% sequence identity, e.g., 50%, 52%, 56%, 59%, 61%, 65%, 70%, 75%, 80%, 85%, 90%, 95%, 97%, 98%, or 99% sequence identity, to the amino acid sequence set forth in SEQ ID NO:2090 Amino acid sequences of polypeptides having greater than 45% sequence identity to the polypeptide set forth in SEQ ID NO:2090 are provided in FIG. 40 and in the Sequence Listing.

[0361] In some cases, a biomass-modulating polypeptide has an amino acid sequence with at least 45% sequence identity, e.g., 50%, 52%, 56%, 59%, 61%, 65%, 70%, 75%, 80%, 85%, 90%, 95%, 97%, 98%, or 99% sequence identity, to the amino acid sequence set forth in SEQ ID NO:2323 Amino acid sequences of polypeptides having greater than 45% sequence identity to the polypeptide set forth in SEQ ID NO:2323 are provided in FIG. 41 and in the Sequence Listing.

[0362] In some cases, a biomass-modulating polypeptide has an amino acid sequence with at least 45% sequence identity, e.g., 50%, 52%, 56%, 59%, 61%, 65%, 70%, 75%, 80%, 85%, 90%, 95%, 97%, 98%, or 99% sequence identity, to the amino acid sequence set forth in SEQ ID NO:2. Amino acid sequences of polypeptides having greater than 45% sequence identity to the polypeptide set forth in SEQ ID NO:2 are provided in FIG. 42 and in the Sequence Listing.

[0363] In some cases, a biomass-modulating polypeptide has an amino acid sequence with at least 45% sequence identity, e.g., 50%, 52%, 56%, 59%, 61%, 65%, 70%, 75%, 80%, 85%, 90%, 95%, 97%, 98%, or 99% sequence identity, to the amino acid sequence set forth in SEQ ID NO:2028 Amino acid sequences of polypeptides having greater than 45% sequence identity to the polypeptide set forth in SEQ ID NO:2028 are provided in FIG. 43 and in the Sequence Listing.

[0364] In some cases, a biomass-modulating polypeptide has an amino acid sequence with at least 45% sequence identity, e.g., 50%, 52%, 56%, 59%, 61%, 65%, 70%, 75%, 80%, 85%, 90%, 95%, 97%, 98%, or 99% sequence identity, to the amino acid sequence set forth in SEQ ID NO:1569 Amino acid sequences of polypeptides having greater than 45% sequence identity to the polypeptide set forth in SEQ ID NO:1569 are provided in FIG. 44 and in the Sequence Listing.

[0365] In some cases, a biomass-modulating polypeptide has an amino acid sequence with at least 45% sequence identity, e.g., 50%, 52%, 56%, 59%, 61%, 65%, 70%, 75%, 80%, 85%, 90%, 95%, 97%, 98%, or 99% sequence identity, to the amino acid sequence set forth in SEQ ID NO:501 Amino acid sequences of polypeptides having greater than 45% sequence identity to the polypeptide set forth in SEQ ID NO:501 are provided in FIG. 45 and in the Sequence Listing.

[0366] In some cases, a biomass-modulating polypeptide has an amino acid sequence with at least 45% sequence identity, e.g., 50%, 52%, 56%, 59%, 61%, 65%, 70%, 75%, 80%, 85%, 90%, 95%, 97%, 98%, or 99% sequence identity, to the amino acid sequence set forth in SEQ ID NO:2190 Amino acid sequences of polypeptides having greater than 45% sequence identity to the polypeptide set forth in SEQ ID NO:2190 are provided in FIG. 46 and in the Sequence Listing.

[0367] In some cases, a biomass-modulating polypeptide has an amino acid sequence with at least 45% sequence identity, e.g., 50%, 52%, 56%, 59%, 61%, 65%, 70%, 75%, 80%, 85%, 90%, 95%, 97%, 98%, or 99% sequence identity, to the amino acid sequence set forth in SEQ ID NO:749 Amino acid sequences of polypeptides having greater than 45% sequence identity to the polypeptide set forth in SEQ ID NO:749 are provided in FIG. 47 and in the Sequence Listing.

[0368] In some cases, a biomass-modulating polypeptide has an amino acid sequence with at least 45% sequence identity, e.g., 50%, 52%, 56%, 59%, 61%, 65%, 70%, 75%, 80%, 85%, 90%, 95%, 97%, 98%, or 99% sequence identity, to the amino acid sequence set forth in SEQ ID NO:79 Amino acid sequences of polypeptides having greater than 45% sequence identity to the polypeptide set forth in SEQ ID NO:79 are provided in FIG. 48 and in the Sequence Listing.

[0369] In some cases, a biomass-modulating polypeptide has an amino acid sequence with at least 45% sequence identity, e.g., 50%, 52%, 56%, 59%, 61%, 65%, 70%, 75%, 80%, 85%, 90%, 95%, 97%, 98%, or 99% sequence identity, to the amino acid sequence set forth in SEQ ID NO:284 Amino acid sequences of polypeptides having greater than 45% sequence identity to the polypeptide set forth in SEQ ID NO:284 are provided in FIG. 49 and in the Sequence Listing.

[0370] E. Other Sequences

[0371] It should be appreciated that a biomass-modulating polypeptide can include additional amino acids that are not involved in biomass modulation, and thus such a polypeptide can be longer than would otherwise be the case. For example, a biomass-modulating polypeptide can include a purification tag, a chloroplast transit peptide, a mitochondrial transit peptide, an amyloplast peptide, or a leader sequence added to the amino or carboxy terminus In some embodiments, a biomass-modulating polypeptide includes an amino acid sequence that functions as a reporter, e.g., a green fluorescent protein or yellow fluorescent protein.

### III. Nucleic Acids

[0372] Nucleic acids described herein include nucleic acids that are effective to modulate biomass levels when transcribed in a plant or plant cell. Such nucleic acids include, without limitation, those that encode a biomass-modulating polypeptide and those that can be used to inhibit expression of a biomass-modulating polypeptide via a nucleic acid based method.

[0373] A. Nucleic Acids Encoding Biomass-Modulating Polypeptides

[0374] Nucleic acids encoding biomass-modulating polypeptides are described herein. Examples of such nucleic acids include SEQ ID NOs: 1, 3, 7, 9, 11, 14, 16, 19, 21, 23, 28, 31, 33, 36, 40, 42, 44, 46, 48, 50, 52, 54, 58, 61, 66, 68, 72, 76, 78, 87, 89, 114, 116, 118, 125, 127, 130, 132, 134, 136, 138, 143, 145, 151, 153, 156, 159, 161, 164, 166, 168, 170, 172, 174, 177, 179, 181, 184, 186, 188, 190, 192, 202, 204, 206, 210, 212, 216, 221, 225, 227, 230, 241, 243, 253, 280, 283, 285, 290, 292, 296, 298, 301, 303, 305, 309, 312, 314, 321, 323, 325, 327, 329, 332, 334, 336, 339, 341, 344, 348, 352, 356, 359, 361, 366, 368, 376, 381, 388, 392, 394, 397, 399, 402, 405, 407, 413, 416, 418, 455, 458, 460, 463, 465, 471, 473, 476, 478, 481, 486, 496, 498, 500, 505, 508, 513, 519, 521, 523, 525, 527, 529, 541, 544, 549, 552, 556, 558, 561, 564, 567, 569, 571, 574, 578, 588, 594, 600, 603, 606, 608, 628, 630, 632, 639, 641, 643, 645, 647, 649, 652, 661, 668, 670, 673, 675, 678, 681, 683, 686, 688, 692, 695, 699, 701, 703, 708, 711, 713, 716, 724, 729, 736, 738, 740, 742, 748, 750, 754, 756, 758, 761, 763, 765, 767, 769, 771, 774, 777, 779, 781, 783, 785, 787, 790, 792, 797, 799, 803, 806, 808, 810, 812, 814, 816, 818, 821, 826, 829, 831, 833, 835, 837, 839, 841, 845, 847, 852, 854, 859, 862, 865, 867, 869, 872, 875, 877, 879, 881, 884, 886, 888, 891, 894, 898, 900, 904, 906, 911, 913, 918, 920, 922, 924, 927, 929, 931, 933, 938, 940, 942, 944, 946, 948, 951, 954, 956, 958, 961, 963, 966, 969, 971, 973, 975, 977, 979, 982, 984, 988, 990, 992, 994, 996, 999, 1001, 1004, 1006, 1010, 1012, 1015, 1017, 1019, 1021, 1028, 1000, 1002, 1005, 1007, 1040, 1047, 1053, 1055, 1057, 1059, 1063, 1065, 1068, 1073, 1075, 1080, 1082, 1084, 1086, 1089, 1091, 1094, 1098, 1100, 1100, 1106, 1109, 1116, 1118, 1123, 1125, 1127, 1129, 1131, 1134, 1136, 1138, 1140, 1143, 1145, 1147, 1149, 1151, 1153, 1155, 1159, 1161, 1163, 1165, 1167, 1170, 1172, 1174, 1178, 1182, 1184, 1186, 1189, 1191, 1195, 1197, 1199, 1202, 1204, 1206, 1208, 1211, 1213, 1215, 1217, 1220, 1223, 1225, 1227, 1229, 1231, 1233, 1237, 1239, 1242, 1244, 1246, 1248, 1250, 1254, 1256, 1258, 1260, 1262, 1264, 1267, 1269, 1271, 1273, 1275, 1277, 1280, 1282, 1284, 1286, 1288, 1290, 1292, 1295, 1298, 1301, 1303, 1305, 1307, 1311, 1315, 1317, 1319, 1321, 1323, 1327, 1331, 1335, 1337, 1346, 1348, 1351, 1354, 1356, 1362, 1365, 1368, 1374, 1378, 1383, 1385, 1387, 1390, 1392, 1394, 1396, 1398, 1400, 1404, 1406, 1408, 1411, 1413, 1415, 1417, 1419, 1423, 1425, 1427, 1430, 1432, 1434, 1436, 1438, 1442, 1444, 1447, 1449, 1451, 1453, 1455, 1458, 1460, 1462, 1464, 1466, 1468, 1470, 1472, 1474, 1476, 1478, 1480, 1484, 1487, 1491, 1494, 1496, 1499, 1501, 1504, 1510, 1513, 1517, 1519, 1521, 1527, 1530, 1532, 1536, 1539, 1541, 1543, 1545, 1548, 1551, 1553, 1556, 1559, 1561, 1566, 1568, 1570, 1573, 1576, 1579, 1582, 1585, 1587, 1590, 1592, 1597, 1601, 1606, 1608, 1610, 1614, 1617, 1620, 1623, 1625, 1627, 1631, 1633, 1635, 1638, 1641, 1643, 1645, 1651, 1653, 1655, 1659, 1663, 1665, 1667, 1673, 1675, 1678, 1685, 1687, 1690, 1692, 1694, 1696, 1698, 1703, 1709, 1716, 1718, 1720, 1722, 1726, 1728, 1730, 1733, 1736, 1738, 1740, 1742, 1744, 1748, 1750, 1752, 1754, 1756, 1760, 1763, 1768, 1771, 1775, 1778, 1780, 1782, 1785, 1787, 1789, 1791, 1793, 1796, 1800, 1802, 1814, 1818, 1820, 1824, 1830, 1832, 1836, 1838, 1840, 1843, 1846, 1848, 1851, 1860, 1862, 1864, 1868, 1870, 1873, 1875, 1878, 1880, 1884, 1886, 1888, 1890, 1892, 1896, 1899, 1901, 1905, 1907, 1909, 1911, 1914, 1916, 1921, 1923, 1925, 1927, 1930, 1932, 1934, 1937, 1939, 1941, 1943, 1945, 1947, 1950, 1952, 1954, 1956, 1958, 1960, 1962, 1964, 1966, 1968, 1970, 1977, 1981, 1984, 1988, 1991, 1993, 1995, 1998, 2001, 2004, 2006, 2012, 2014, 2020, 2025, 2027, 2029, 2033, 2035, 2039, 2045, 2050, 2052, 2054, 2057, 2059, 2061, 2063, 2065, 2068, 2071, 2080, 2082, 2084, 2086, 2089, 2094, 2096, 2099, 2101, 2100, 2107, 2109, 2111, 2114, 2116, 2123, 2125, 2127, 2131, 2134, 2139, 2145, 2147, 2155, 2157, 2164, 2166, 2168, 2180, 2182, 2185, 2189, 2191, 2193, 2204, 2206, 2208, 2210, 2212, 2214, 2216, 2218, 2220, 2222, 2224, 2227, 2230, 2232, 2234, 2242, 2245, 2247, 2249, 2252, 2254, 2256, 2258, 2260, 2263, 2266, 2268, 2271, 2274, 2277, 2280, 2283, 2287, 2290, 2292, 2294, 2301, 2303, 2305, 2308, 2311, 2319, 2322, 2324, 2326, 2328, 2331, 2333, 2336, 2338, 2340, 2342, 2344, 2349, 2351, 2353, 2355, 2359, 2363, 2365, 2368, 2370, 2372, 2374, 2377, 2379, 2382, 2385, 2387, 2389, 2393, 2395, 2398, 2400, 2404, 2406, 2410, 2412, 2414, 2416, 2420, 2426, 2431, 2433, 2436, 2438, 2444, 2447, 2450, 2453, 2455, 2465, 2467, 2473, 2479, 2481, 2492, 2501, 2504, 2508, 2515, 2520, 2524, 2526, 2528, 2532, 2534, 2536, 2538, 2543, 2545, 2549, 2553, 2555, 2560, 2563, 2566, 2568, 2570, 2577, 2579, 2582, 2586, 2591, 2596, 2598, 2600, 2602, 2605, 2607, 2610, 2613, 2618, 2620, 2622, 2625, 2630, 2633, 2635, 2637, 2639, 2643, 2645, 2651, 2653, 2655, 2657, 2660, 2662, 2664, 2666, 2669, 2671, 2673, 2676, 2678, 2680, 2682, 2684, 2686, 2688, 2690, 2692, 2694, 2696, 2698, 2700, 2702, 2705, 2707, 2709, 2713, 2715, 2718, 2720, 2723, 2725, 2727, 2729, 2731, 2733, 2737, 2742, 2744, 2747, 2749, 2752, 2755, 2757, 2759, 2761, 2763, 2765, 2767, 2769, 2774, 2776, 2779, 2783, 2785, 2787, 2789, 2793, 2795, 2798, 2800, 2805, 2808, 2812, 2814, 2817, 2820, 2824, 2827, 2829, 2831, 2834, 2837, 2839, 2841, 2843, 2848, 2854, 2860, 2865, 2871, 2874, 2879, 2881, 2884, 2887, 2889, 2895, 2897, 2899, 2901, 2905, 2912, 2914, 2916, or 2925 as described in more detail below. A nucleic acid also can be a fragment that is at least 40% (e.g., at least 45, 50, 55, 60, 65, 70, 75, 80, 85, 90, 95, or 99%) of the length of the full-length nucleic acid set forth in SEQ ID NOs: 1, 3, 7, 9, 11, 14, 16, 19, 21, 23, 28, 31, 33, 36, 40, 42, 44, 46, 48, 50, 52, 54, 58, 61, 66, 68, 72, 76, 78, 87, 89, 114, 116, 118, 125, 127, 130, 132, 134, 136, 138, 143, 145, 151, 153, 156, 159, 161, 164, 166, 168, 170, 172, 174, 177, 179, 181, 184, 186, 188, 190, 192, 202, 204, 206, 210, 212, 216, 221, 225, 227, 230, 241, 243, 253, 280, 283, 285, 290, 292, 296, 298, 301, 303, 305, 309, 312, 314, 321, 323, 325, 327, 329, 332, 334, 336, 339, 341, 344, 348, 352, 356, 359, 361, 366, 368, 376, 381, 388, 392, 394, 397, 399, 402, 405, 407, 413, 416, 418, 455, 458, 460, 463, 465, 471, 473, 476, 478, 481, 486, 496, 498, 500, 505, 508, 513, 519, 521, 523, 525, 527, 529, 541, 544, 549, 552, 556, 558, 561, 564, 567, 569, 571, 574, 578, 588, 594, 600, 603, 606, 608, 628, 630, 632, 639, 641, 643, 645, 647, 649, 652, 661, 668, 670, 673, 675, 678, 681, 683, 686, 688, 692, 695, 699, 701, 703, 708, 711, 713, 716, 724, 729, 736, 738, 740, 742, 748, 750, 754, 756, 758, 761, 763, 765, 767, 769, 771, 774, 777, 779, 781, 783, 785, 787, 790, 792, 797, 799, 803, 806, 808, 810, 812, 814, 816, 818, 821, 826, 829, 831, 833, 835, 837, 839, 841, 845, 847, 852, 854, 859, 862, 865, 867, 869, 872, 875, 877, 879, 881, 884, 886, 888, 891, 894, 898, 900, 904, 906, 911, 913, 918, 920, 922, 924, 927, 929, 931, 933, 938, 940, 942, 944, 946, 948, 951, 954, 956, 958, 961, 963, 966, 969, 971, 973, 975, 977, 979, 982, 984, 988, 990, 992, 994, 996, 999, 1001, 1004, 1006, 1010, 1012, 1015, 1017, 1019, 1021, 1028, 1000, 1002, 1005, 1007, 1040, 1047, 1053, 1055, 1057, 1059, 1063, 1065, 1068, 1073, 1075, 1080, 1082, 1084, 1086, 1089, 1091, 1094, 1098, 1100, 1100, 1106, 1109, 1116, 1118, 1123, 1125, 1127, 1129, 1131, 1134, 1136, 1138, 1140, 1143, 1145, 1147, 1149, 1151, 1153, 1155, 1159, 1161, 1163, 1165, 1167, 1170, 1172, 1174, 1178, 1182, 1184, 1186, 1189, 1191, 1195, 1197, 1199, 1202, 1204, 1206, 1208, 1211, 1213, 1215, 1217, 1220, 1223, 1225, 1227, 1229, 1231, 1233, 1237, 1239, 1242, 1244, 1246, 1248, 1250, 1254, 1256, 1258, 1260, 1262, 1264, 1267, 1269, 1271, 1273, 1275, 1277, 1280, 1282, 1284, 1286, 1288, 1290, 1292, 1295, 1298, 1301, 1303, 1305, 1307, 1311, 1315, 1317, 1319, 1321, 1323, 1327, 1331, 1335, 1337, 1346, 1348, 1351, 1354, 1356, 1362, 1365, 1368, 1374, 1378, 1383, 1385, 1387, 1390, 1392, 1394, 1396, 1398, 1400, 1404, 1406, 1408, 1411, 1413, 1415, 1417, 1419, 1423, 1425, 1427, 1430, 1432, 1434, 1436, 1438, 1442, 1444, 1447, 1449, 1451, 1453, 1455, 1458, 1460, 1462, 1464, 1466, 1468, 1470, 1472, 1474, 1476, 1478, 1480, 1484, 1487, 1491, 1494, 1496, 1499, 1501, 1504, 1510, 1513, 1517, 1519, 1521, 1527, 1530, 1532, 1536, 1539, 1541, 1543, 1545, 1548, 1551, 1553, 1556, 1559, 1561, 1566, 1568, 1570, 1573, 1576, 1579, 1582, 1585, 1587, 1590, 1592, 1597, 1601, 1606, 1608, 1610, 1614, 1617, 1620, 1623, 1625, 1627, 1631, 1633, 1635, 1638, 1641, 1643, 1645, 1651, 1653, 1655, 1659, 1663, 1665, 1667, 1673, 1675, 1678, 1685, 1687, 1690, 1692, 1694, 1696, 1698, 1703, 1709, 1716, 1718, 1720, 1722, 1726, 1728, 1730, 1733, 1736, 1738, 1740, 1742, 1744, 1748, 1750, 1752, 1754, 1756, 1760, 1763, 1768, 1771, 1775, 1778, 1780, 1782, 1785, 1787, 1789, 1791, 1793, 1796, 1800, 1802, 1814, 1818, 1820, 1824, 1830, 1832, 1836, 1838, 1840, 1843, 1846, 1848, 1851, 1860, 1862, 1864, 1868, 1870, 1873, 1875, 1878, 1880, 1884, 1886, 1888, 1890, 1892, 1896, 1899, 1901, 1905, 1907, 1909, 1911, 1914, 1916, 1921, 1923, 1925, 1927, 1930, 1932, 1934, 1937, 1939, 1941, 1943, 1945, 1947, 1950, 1952, 1954, 1956, 1958, 1960, 1962, 1964, 1966, 1968, 1970, 1977, 1981, 1984, 1988, 1991, 1993, 1995, 1998, 2001, 2004, 2006, 2012, 2014, 2020, 2025, 2027, 2029, 2033, 2035, 2039, 2045, 2050, 2052, 2054, 2057, 2059, 2061, 2063, 2065, 2068, 2071, 2080, 2082, 2084, 2086, 2089, 2094, 2096, 2099, 2101, 2100, 2107, 2109, 2111, 2114, 2116, 2123, 2125, 2127, 2131, 2134, 2139, 2145, 2147, 2155, 2157, 2164, 2166, 2168, 2180, 2182, 2185, 2189, 2191, 2193, 2204, 2206, 2208, 2210, 2212, 2214, 2216, 2218, 2220, 2222, 2224, 2227, 2230, 2232, 2234, 2242, 2245, 2247, 2249, 2252, 2254, 2256, 2258, 2260, 2263, 2266, 2268, 2271, 2274, 2277, 2280, 2283, 2287, 2290, 2292, 2294, 2301, 2303, 2305, 2308, 2311, 2319, 2322, 2324, 2326, 2328, 2331, 2333, 2336, 2338, 2340, 2342, 2344, 2349, 2351, 2353, 2355, 2359, 2363, 2365, 2368, 2370, 2372, 2374, 2377, 2379, 2382, 2385, 2387, 2389, 2393, 2395, 2398, 2400, 2404, 2406, 2410, 2412, 2414, 2416, 2420, 2426, 2431, 2433, 2436, 2438, 2444, 2447, 2450, 2453, 2455, 2465, 2467, 2473, 2479, 2481, 2492, 2501, 2504, 2508, 2515, 2520, 2524, 2526, 2528, 2532, 2534, 2536, 2538, 2543, 2545, 2549, 2553, 2555, 2560, 2563, 2566, 2568, 2570, 2577, 2579, 2582, 2586, 2591, 2596, 2598, 2600, 2602, 2605, 2607, 2610, 2613, 2618, 2620, 2622, 2625, 2630, 2633, 2635, 2637, 2639, 2643, 2645, 2651, 2653, 2655, 2657, 2660, 2662, 2664, 2666, 2669, 2671, 2673, 2676, 2678, 2680, 2682, 2684, 2686, 2688, 2690, 2692, 2694, 2696, 2698, 2700, 2702, 2705, 2707, 2709, 2713, 2715, 2718, 2720, 2723, 2725, 2727, 2729, 2731, 2733, 2737, 2742, 2744, 2747, 2749, 2752, 2755, 2757, 2759, 2761, 2763, 2765, 2767, 2769, 2774, 2776, 2779, 2783, 2785, 2787, 2789, 2793, 2795, 2798, 2800, 2805, 2808, 2812, 2814, 2817, 2820, 2824, 2827, 2829, 2831, 2834, 2837, 2839, 2841, 2843, 2848, 2854, 2860, 2865, 2871, 2874, 2879, 2881, 2884, 2887, 2889, 2895, 2897, 2899, 2901, 2905, 2912, 2914, 2916, or 2925.

[0375] A biomass-modulating nucleic acid can comprise the nucleotide sequence set forth in SEQ ID NO:2879. Alternatively, a biomass-modulating nucleic acid can be a variant of the nucleic acid having the nucleotide sequence set forth in SEQ ID NO:2879. For example, a biomass-modulating nucleic acid can have a nucleotide sequence with at least 80% sequence identity, e.g., 81%, 85%, 90%, 95%, 97%, 98%, or 99% sequence identity, to the nucleotide sequence set forth in SEQ ID NO:2879.

[0376] A biomass-modulating nucleic acid can comprise the nucleotide sequence set forth in SEQ ID NO:309. Alternatively, a biomass-modulating nucleic acid can be a variant of the nucleic acid having the nucleotide sequence set forth in SEQ ID NO:309. For example, a biomass-modulating nucleic acid can have a nucleotide sequence with at least 80% sequence identity, e.g., 81%, 85%, 90%, 95%, 97%, 98%, or 99% sequence identity, to the nucleotide sequence set forth in SEQ ID NO: 309.

[0377] A biomass-modulating nucleic acid can comprise the nucleotide sequence set forth in SEQ ID NO:402. Alternatively, a biomass-modulating nucleic acid can be a variant of the nucleic acid having the nucleotide sequence set forth in SEQ ID NO:402. For example, a biomass-modulating nucleic acid can have a nucleotide sequence with at least 80% sequence identity, e.g., 81%, 85%, 90%, 95%, 97%, 98%, or 99% sequence identity, to the nucleotide sequence set forth in SEQ ID NO:402.

[0378] A biomass-modulating nucleic acid can comprise the nucleotide sequence set forth in SEQ ID NO:668. Alternatively, a biomass-modulating nucleic acid can be a variant of the nucleic acid having the nucleotide sequence set forth in SEQ ID NO:668. For example, a biomass-modulating nucleic acid can have a nucleotide sequence with at least 80% sequence identity, e.g., 81%, 85%, 90%, 95%, 97%, 98%, or 99% sequence identity, to the nucleotide sequence set forth in SEQ ID NO:668.

[0379] A biomass-modulating nucleic acid can comprise the nucleotide sequence set forth in SEQ ID NO:1796. Alternatively, a biomass-modulating nucleic acid can be a variant of the nucleic acid having the nucleotide sequence set forth in SEQ ID NO:1796. For example, a biomass-modulating nucleic acid can have a nucleotide sequence with at least 80% sequence identity, e.g., 81%, 85%, 90%, 95%, 97%, 98%, or 99% sequence identity, to the nucleotide sequence set forth in SEQ ID NO:1796.

[0380] A biomass-modulating nucleic acid can comprise the nucleotide sequence set forth in SEQ ID NO:716. Alternatively, a biomass-modulating nucleic acid can be a variant of the nucleic acid having the nucleotide sequence set forth in SEQ ID NO:716. For example, a biomass-modulating nucleic acid can have a nucleotide sequence with at least 80% sequence identity, e.g., 81%, 85%, 90%, 95%, 97%, 98%, or 99% sequence identity, to the nucleotide sequence set forth in SEQ ID NO:716.

[0381] A biomass-modulating nucleic acid can comprise the nucleotide sequence set forth in SEQ ID NO:692. Alternatively, a biomass-modulating nucleic acid can be a variant of the nucleic acid having the nucleotide sequence set forth in SEQ ID NO:692. For example, a biomass-modulating nucleic acid can have a nucleotide sequence with at least 80% sequence identity, e.g., 81%, 85%, 90%, 95%, 97%, 98%, or 99% sequence identity, to the nucleotide sequence set forth in SEQ ID NO:692.

[0382] A biomass-modulating nucleic acid can comprise the nucleotide sequence set forth in SEQ ID NO:1517. Alternatively, a biomass-modulating nucleic acid can be a variant of the nucleic acid having the nucleotide sequence set forth in SEQ ID NO:1517. For example, a biomass-modulating nucleic acid can have a nucleotide sequence with at least 80% sequence identity, e.g., 81%, 85%, 90%, 95%, 97%, 98%, or 99% sequence identity, to the nucleotide sequence set forth in SEQ ID NO:1517.

[0383] A biomass-modulating nucleic acid can comprise the nucleotide sequence set forth in SEQ ID NO:1623. Alternatively, a biomass-modulating nucleic acid can be a variant of the nucleic acid having the nucleotide sequence set forth in SEQ ID NO:1623. For example, a biomass-modulating nucleic acid can have a nucleotide sequence with at least 80% sequence identity, e.g., 81%, 85%, 90%, 95%, 97%, 98%, or 99% sequence identity, to the nucleotide sequence set forth in SEQ ID NO:1623.

[0384] A biomass-modulating nucleic acid can comprise the nucleotide sequence set forth in SEQ ID NO:1886. Alternatively, a biomass-modulating nucleic acid can be a variant of the nucleic acid having the nucleotide sequence set forth in SEQ ID NO:1886. For example, a biomass-modulating nucleic acid can have a nucleotide sequence with at least 80% sequence identity, e.g., 81%, 85%, 90%, 95%, 97%, 98%, or 99% sequence identity, to the nucleotide sequence set forth in SEQ ID NO:1886.

[0385] A biomass-modulating nucleic acid can comprise the nucleotide sequence set forth in SEQ ID NO:833. Alternatively, a biomass-modulating nucleic acid can be a variant of the nucleic acid having the nucleotide sequence set forth in SEQ ID NO:833. For example, a biomass-modulating nucleic acid can have a nucleotide sequence with at least 80% sequence identity, e.g., 81%, 85%, 90%, 95%, 97%, 98%, or 99% sequence identity, to the nucleotide sequence set forth in SEQ ID NO:833.

[0386] A biomass-modulating nucleic acid can comprise the nucleotide sequence set forth in SEQ ID NO:1317. Alternatively, a biomass-modulating nucleic acid can be a variant of the nucleic acid having the nucleotide sequence set forth in SEQ ID NO:1317. For example, a biomass-modulating nucleic acid can have a nucleotide sequence with at least 80% sequence identity, e.g., 81%, 85%, 90%, 95%, 97%, 98%, or 99% sequence identity, to the nucleotide sequence set forth in SEQ ID NO:1317.

[0387] A biomass-modulating nucleic acid can comprise the nucleotide sequence set forth in SEQ ID NO:458. Alternatively, a biomass-modulating nucleic acid can be a variant of the nucleic acid having the nucleotide sequence set forth in SEQ ID NO:458. For example, a biomass-modulating nucleic acid can have a nucleotide sequence with at least 80% sequence identity, e.g., 81%, 85%, 90%, 95%, 97%, 98%, or 99% sequence identity, to the nucleotide sequence set forth in SEQ ID NO:458.

[0388] A biomass-modulating nucleic acid can comprise the nucleotide sequence set forth in SEQ ID NO:334. Alternatively, a biomass-modulating nucleic acid can be a variant of the nucleic acid having the nucleotide sequence set forth in SEQ ID NO:334. For example, a biomass-modulating nucleic acid can have a nucleotide sequence with at least 80% sequence identity, e.g., 81%, 85%, 90%, 95%, 97%, 98%, or 99% sequence identity, to the nucleotide sequence set forth in SEQ ID NO:334.

[0389] A biomass-modulating nucleic acid can comprise the nucleotide sequence set forth in SEQ ID NO:845. Alternatively, a biomass-modulating nucleic acid can be a variant of the nucleic acid having the nucleotide sequence set forth in SEQ ID NO:845. For example, a biomass-modulating nucleic acid can have a nucleotide sequence with at least 80% sequence identity, e.g., 81%, 85%, 90%, 95%, 97%, 98%, or 99% sequence identity, to the nucleotide sequence set forth in SEQ ID NO:845.

[0390] A biomass-modulating nucleic acid can comprise the nucleotide sequence set forth in SEQ ID NO:1425. Alternatively, a biomass-modulating nucleic acid can be a variant of the nucleic acid having the nucleotide sequence set forth in SEQ ID NO:1425. For example, a biomass-modulating nucleic acid can have a nucleotide sequence with at least 80% sequence identity, e.g., 81%, 85%, 90%, 95%, 97%, 98%, or 99% sequence identity, to the nucleotide sequence set forth in SEQ ID NO:1425.

[0391] A biomass-modulating nucleic acid can comprise the nucleotide sequence set forth in SEQ ID NO:2524. Alternatively, a biomass-modulating nucleic acid can be a variant of the nucleic acid having the nucleotide sequence set forth in SEQ ID NO:2524. For example, a biomass-modulating nucleic acid can have a nucleotide sequence with at least 80% sequence identity, e.g., 81%, 85%, 90%, 95%, 97%, 98%, or 99% sequence identity, to the nucleotide sequence set forth in SEQ ID NO:2524.

[0392] A biomass-modulating nucleic acid can comprise the nucleotide sequence set forth in SEQ ID NO:1271. Alternatively, a biomass-modulating nucleic acid can be a variant of the nucleic acid having the nucleotide sequence set forth in SEQ ID NO:1271. For example, a biomass-modulating nucleic acid can have a nucleotide sequence with at least 80% sequence identity, e.g., 81%, 85%, 90%, 95%, 97%, 98%, or 99% sequence identity, to the nucleotide sequence set forth in SEQ ID NO:1271.

[0393] A biomass-modulating nucleic acid can comprise the nucleotide sequence set forth in SEQ ID NO:877. Alternatively, a biomass-modulating nucleic acid can be a variant of the nucleic acid having the nucleotide sequence set forth in SEQ ID NO:877. For example, a biomass-modulating nucleic acid can have a nucleotide sequence with at least 80% sequence identity, e.g., 81%, 85%, 90%, 95%, 97%, 98%, or 99% sequence identity, to the nucleotide sequence set forth in SEQ ID NO:877.

[0394] A biomass-modulating nucleic acid can comprise the nucleotide sequence set forth in SEQ ID NO:1659. Alternatively, a biomass-modulating nucleic acid can be a variant of the nucleic acid having the nucleotide sequence set forth in SEQ ID NO:1659. For example, a biomass-modulating nucleic acid can have a nucleotide sequence with at least 80% sequence identity, e.g., 81%, 85%, 90%, 95%, 97%, 98%, or 99% sequence identity, to the nucleotide sequence set forth in SEQ ID NO:1659.

[0395] A biomass-modulating nucleic acid can comprise the nucleotide sequence set forth in SEQ ID NO:2653. Alternatively, a biomass-modulating nucleic acid can be a variant of the nucleic acid having the nucleotide sequence set forth in SEQ ID NO:2653. For example, a biomass-modulating nucleic acid can have a nucleotide sequence with at least 80% sequence identity, e.g., 81%, 85%, 90%, 95%, 97%, 98%, or 99% sequence identity, to the nucleotide sequence set forth in SEQ ID NO:2653.

[0396] A biomass-modulating nucleic acid can comprise the nucleotide sequence set forth in SEQ ID NO:1138. Alternatively, a biomass-modulating nucleic acid can be a variant of the nucleic acid having the nucleotide sequence set forth in SEQ ID NO:1136. For example, a biomass-modulating nucleic acid can have a nucleotide sequence with at least 80% sequence identity, e.g., 81%, 85%, 90%, 95%, 97%, 98%, or 99% sequence identity, to the nucleotide sequence set forth in SEQ ID NO:1136.

[0397] A biomass-modulating nucleic acid can comprise the nucleotide sequence set forth in SEQ ID NO:2665. Alternatively, a biomass-modulating nucleic acid can be a variant of the nucleic acid having the nucleotide sequence set forth in SEQ ID NO:2665. For example, a biomass-modulating nucleic acid can have a nucleotide sequence with at least 80% sequence identity, e.g., 81%, 85%, 90%, 95%, 97%, 98%, or 99% sequence identity, to the nucleotide sequence set forth in SEQ ID NO:2665.

[0398] A biomass-modulating nucleic acid can comprise the nucleotide sequence set forth in SEQ ID NO:1106. Alternatively, a biomass-modulating nucleic acid can be a variant of the nucleic acid having the nucleotide sequence set forth in SEQ ID NO:1106. For example, a biomass-modulating nucleic acid can have a nucleotide sequence with at least 80% sequence identity, e.g., 81%, 85%, 90%, 95%, 97%, 98%, or 99% sequence identity, to the nucleotide sequence set forth in SEQ ID NO:1106.

[0399] A biomass-modulating nucleic acid can comprise the nucleotide sequence set forth in SEQ ID NO:1945. Alternatively, a biomass-modulating nucleic acid can be a variant of the nucleic acid having the nucleotide sequence set forth in SEQ ID NO:1945. For example, a biomass-modulating nucleic acid can have a nucleotide sequence with at least 80% sequence identity, e.g., 81%, 85%, 90%, 95%, 97%, 98%, or 99% sequence identity, to the nucleotide sequence set forth in SEQ ID NO:1945.

[0400] A biomass-modulating nucleic acid can comprise the nucleotide sequence set forth in SEQ ID NO:1053. Alternatively, a biomass-modulating nucleic acid can be a variant of the nucleic acid having the nucleotide sequence set forth in SEQ ID NO:1053. For example, a biomass-modulating nucleic acid can have a nucleotide sequence with at least 80% sequence identity, e.g., 81%, 85%, 90%, 95%, 97%, 98%, or 99% sequence identity, to the nucleotide sequence set forth in SEQ ID NO:1053.

[0401] A biomass-modulating nucleic acid can comprise the nucleotide sequence set forth in SEQ ID NO:114. Alternatively, a biomass-modulating nucleic acid can be a variant of the nucleic acid having the nucleotide sequence set forth in SEQ ID NO:114. For example, a biomass-modulating nucleic acid can have a nucleotide sequence with at least 80% sequence identity, e.g., 81%, 85%, 90%, 95%, 97%, 98%, or 99% sequence identity, to the nucleotide sequence set forth in SEQ ID NO:114.

[0402] A biomass-modulating nucleic acid can comprise the nucleotide sequence set forth in SEQ ID NO:2707. Alternatively, a biomass-modulating nucleic acid can be a variant of the nucleic acid having the nucleotide sequence set forth in SEQ ID NO:2707. For example, a biomass-modulating nucleic acid can have a nucleotide sequence with at least 80% sequence identity, e.g., 81%, 85%, 90%, 95%, 97%, 98%, or 99% sequence identity, to the nucleotide sequence set forth in SEQ ID NO:2707.

[0403] A biomass-modulating nucleic acid can comprise the nucleotide sequence set forth in SEQ ID NO:1480. Alternatively, a biomass-modulating nucleic acid can be a variant of the nucleic acid having the nucleotide sequence set forth in SEQ ID NO:1480. For example, a biomass-modulating nucleic acid can have a nucleotide sequence with at least 80% sequence identity, e.g., 81%, 85%, 90%, 95%, 97%, 98%, or 99% sequence identity, to the nucleotide sequence set forth in SEQ ID NO:1480.

[0404] A biomass-modulating nucleic acid can comprise the nucleotide sequence set forth in SEQ ID NO:2747. Alternatively, a biomass-modulating nucleic acid can be a variant of the nucleic acid having the nucleotide sequence set forth in SEQ ID NO:2747. For example, a biomass-modulating nucleic acid can have a nucleotide sequence with at least 80% sequence identity, e.g., 81%, 85%, 90%, 95%, 97%, 98%, or 99% sequence identity, to the nucleotide sequence set forth in SEQ ID NO:2747.

[0405] A biomass-modulating nucleic acid can comprise the nucleotide sequence set forth in SEQ ID NO:946. Alternatively, a biomass-modulating nucleic acid can be a variant of the nucleic acid having the nucleotide sequence set forth in SEQ ID NO:946. For example, a biomass-modulating nucleic acid can have a nucleotide sequence with at least 80% sequence identity, e.g., 81%, 85%, 90%, 95%, 97%, 98%, or 99% sequence identity, to the nucleotide sequence set forth in SEQ ID NO:946.

[0406] A biomass-modulating nucleic acid can comprise the nucleotide sequence set forth in SEQ ID NO:1726. Alternatively, a biomass-modulating nucleic acid can be a variant of the nucleic acid having the nucleotide sequence set forth in SEQ ID NO:1726. For example, a biomass-modulating nucleic acid can have a nucleotide sequence with at least 80% sequence identity, e.g., 81%, 85%, 90%, 95%, 97%, 98%, or 99% sequence identity, to the nucleotide sequence set forth in SEQ ID NO:1726.

[0407] A biomass-modulating nucleic acid can comprise the nucleotide sequence set forth in SEQ ID NO:2145. Alternatively, a biomass-modulating nucleic acid can be a variant of the nucleic acid having the nucleotide sequence set forth in SEQ ID NO:2145. For example, a biomass-modulating nucleic acid can have a nucleotide sequence with at least 80% sequence identity, e.g., 81%, 85%, 90%, 95%, 97%, 98%, or 99% sequence identity, to the nucleotide sequence set forth in SEQ ID NO:2145.

[0408] A biomass-modulating nucleic acid can comprise the nucleotide sequence set forth in SEQ ID NO:2618. Alternatively, a biomass-modulating nucleic acid can be a variant of the nucleic acid having the nucleotide sequence set forth in SEQ ID NO:2618. For example, a biomass-modulating nucleic acid can have a nucleotide sequence with at least 80% sequence identity, e.g., 81%, 85%, 90%, 95%, 97%, 98%, or 99% sequence identity, to the nucleotide sequence set forth in SEQ ID NO:2618.

[0409] A biomass-modulating nucleic acid can comprise the nucleotide sequence set forth in SEQ ID NO:210. Alternatively, a biomass-modulating nucleic acid can be a variant of the nucleic acid having the nucleotide sequence set forth in SEQ ID NO:210. For example, a biomass-modulating nucleic acid can have a nucleotide sequence with at least 80% sequence identity, e.g., 81%, 85%, 90%, 95%, 97%, 98%, or 99% sequence identity, to the nucleotide sequence set forth in SEQ ID NO:210.

[0410] A biomass-modulating nucleic acid can comprise the nucleotide sequence set forth in SEQ ID NO:628. Alternatively, a biomass-modulating nucleic acid can be a variant of the nucleic acid having the nucleotide sequence set forth in SEQ ID NO:628. For example, a biomass-modulating nucleic acid can have a nucleotide sequence with at least 80% sequence identity, e.g., 81%, 85%, 90%, 95%, 97%, 98%, or 99% sequence identity, to the nucleotide sequence set forth in SEQ ID NO:628.

[0411] A biomass-modulating nucleic acid can comprise the nucleotide sequence set forth in SEQ ID NO:2543. Alternatively, a biomass-modulating nucleic acid can be a variant of the nucleic acid having the nucleotide sequence set forth in SEQ ID NO:2543. For example, a biomass-modulating nucleic acid can have a nucleotide sequence with at least 80% sequence identity, e.g., 81%, 85%, 90%, 95%, 97%, 98%, or 99% sequence identity, to the nucleotide sequence set forth in SEQ ID NO:2543.

[0412] A biomass-modulating nucleic acid can comprise the nucleotide sequence set forth in SEQ ID NO:2598. Alternatively, a biomass-modulating nucleic acid can be a variant of the nucleic acid having the nucleotide sequence set forth in SEQ ID NO:2598. For example, a biomass-modulating nucleic acid can have a nucleotide sequence with at least 80% sequence identity, e.g., 81%, 85%, 90%, 95%, 97%, 98%, or 99% sequence identity, to the nucleotide sequence set forth in SEQ ID NO:2598.

[0413] A biomass-modulating nucleic acid can comprise the nucleotide sequence set forth in SEQ ID NO:2436. Alternatively, a biomass-modulating nucleic acid can be a variant of the nucleic acid having the nucleotide sequence set forth in SEQ ID NO:2436. For example, a biomass-modulating nucleic acid can have a nucleotide sequence with at least 80% sequence identity, e.g., 81%, 85%, 90%, 95%, 97%, 98%, or 99% sequence identity, to the nucleotide sequence set forth in SEQ ID NO:2436.

[0414] A biomass-modulating nucleic acid can comprise the nucleotide sequence set forth in SEQ ID NO:2089. Alternatively, a biomass-modulating nucleic acid can be a variant of the nucleic acid having the nucleotide sequence set forth in SEQ ID NO:2089. For example, a biomass-modulating nucleic acid can have a nucleotide sequence with at least 80% sequence identity, e.g., 81%, 85%, 90%, 95%, 97%, 98%, or 99% sequence identity, to the nucleotide sequence set forth in SEQ ID NO:2089.

[0415] A biomass-modulating nucleic acid can comprise the nucleotide sequence set forth in SEQ ID NO:2322. Alternatively, a biomass-modulating nucleic acid can be a variant of the nucleic acid having the nucleotide sequence set forth in SEQ ID NO:2322. For example, a biomass-modulating nucleic acid can have a nucleotide sequence with at least 80% sequence identity, e.g., 81%, 85%, 90%, 95%, 97%, 98%, or 99% sequence identity, to the nucleotide sequence set forth in SEQ ID NO:2322.

[0416] A biomass-modulating nucleic acid can comprise the nucleotide sequence set forth in SEQ ID NO:1. Alternatively, a biomass-modulating nucleic acid can be a variant of the nucleic acid having the nucleotide sequence set forth in SEQ ID NO:1. For example, a biomass-modulating nucleic acid can have a nucleotide sequence with at least 80% sequence identity, e.g., 81%, 85%, 90%, 95%, 97%, 98%, or 99% sequence identity, to the nucleotide sequence set forth in SEQ ID NO:1.

[0417] A biomass-modulating nucleic acid can comprise the nucleotide sequence set forth in SEQ ID NO:2027. Alternatively, a biomass-modulating nucleic acid can be a variant of the nucleic acid having the nucleotide sequence set forth in SEQ ID NO:2027. For example, a biomass-modulating nucleic acid can have a nucleotide sequence with at least 80% sequence identity, e.g., 81%, 85%, 90%, 95%, 97%, 98%, or 99% sequence identity, to the nucleotide sequence set forth in SEQ ID NO:2027.

[0418] A biomass-modulating nucleic acid can comprise the nucleotide sequence set forth in SEQ ID NO:1568. Alternatively, a biomass-modulating nucleic acid can be a variant of the nucleic acid having the nucleotide sequence set forth in SEQ ID NO:1568. For example, a biomass-modulating nucleic acid can have a nucleotide sequence with at least 80% sequence identity, e.g., 81%, 85%, 90%, 95%, 97%, 98%, or 99% sequence identity, to the nucleotide sequence set forth in SEQ ID NO:1568.

[0419] A biomass-modulating nucleic acid can comprise the nucleotide sequence set forth in SEQ ID NO:500. Alternatively, a biomass-modulating nucleic acid can be a variant of the nucleic acid having the nucleotide sequence set forth in SEQ ID NO:500. For example, a biomass-modulating nucleic acid can have a nucleotide sequence with at least 80% sequence identity, e.g., 81%, 85%, 90%, 95%, 97%, 98%, or 99% sequence identity, to the nucleotide sequence set forth in SEQ ID NO:500.

[0420] A biomass-modulating nucleic acid can comprise the nucleotide sequence set forth in SEQ ID NO:2189. Alternatively, a biomass-modulating nucleic acid can be a variant of the nucleic acid having the nucleotide sequence set forth in SEQ ID NO:2189. For example, a biomass-modulating nucleic acid can have a nucleotide sequence with at least 80% sequence identity, e.g., 81%, 85%, 90%, 95%, 97%, 98%, or 99% sequence identity, to the nucleotide sequence set forth in SEQ ID NO:2189.

[0421] A biomass-modulating nucleic acid can comprise the nucleotide sequence set forth in SEQ ID NO:748. Alternatively, a biomass-modulating nucleic acid can be a variant of the nucleic acid having the nucleotide sequence set forth in SEQ ID NO:748. For example, a biomass-modulating nucleic acid can have a nucleotide sequence with at least 80% sequence identity, e.g., 81%, 85%, 90%, 95%, 97%, 98%, or 99% sequence identity, to the nucleotide sequence set forth in SEQ ID NO:748.

[0422] A biomass-modulating nucleic acid can comprise the nucleotide sequence set forth in SEQ ID NO:78. Alternatively, a biomass-modulating nucleic acid can be a variant of the nucleic acid having the nucleotide sequence set forth in SEQ ID NO:78. For example, a biomass-modulating nucleic acid can have a nucleotide sequence with at least 80% sequence identity, e.g., 81%, 85%, 90%, 95%, 97%, 98%, or 99% sequence identity, to the nucleotide sequence set forth in SEQ ID NO:78.

[0423] A biomass-modulating nucleic acid can comprise the nucleotide sequence set forth in SEQ ID NO:283. Alternatively, a biomass-modulating nucleic acid can be a variant of the nucleic acid having the nucleotide sequence set forth in SEQ ID NO:283. For example, a biomass-modulating nucleic acid can have a nucleotide sequence with at least 80% sequence identity, e.g., 81%, 85%, 90%, 95%, 97%, 98%, or 99% sequence identity, to the nucleotide sequence set forth in SEQ ID NO:283.

[0424] Isolated nucleic acid molecules can be produced by standard techniques. For example, polymerase chain reaction (PCR) techniques can be used to obtain an isolated nucleic acid containing a nucleotide sequence described herein. PCR can be used to amplify specific sequences from DNA as well as RNA, including sequences from total genomic DNA or total cellular RNA. Various PCR methods are described, for example, in PCR Primer: A Laboratory Manual, Dieffenbach and Dveksler, eds., Cold Spring Harbor Laboratory Press, 1995. Generally, sequence information from the ends of the region of interest or beyond is employed to design oligonucleotide primers that are identical or similar in sequence to opposite strands of the template to be amplified. Various PCR strategies also are available by which site-specific nucleotide sequence modifications can be introduced into a template nucleic acid. Isolated nucleic acids also can be chemically synthesized, either as a single nucleic acid molecule (e.g., using automated DNA synthesis in the 3′ to 5′ direction using phosphoramidite technology) or as a series of oligonucleotides. For example, one or more pairs of long oligonucleotides (e.g., >100 nucleotides) can be synthesized that contain the desired sequence, with each pair containing a short segment of complementarity (e.g., about 15 nucleotides) such that a duplex is formed when the oligonucleotide pair is annealed. DNA polymerase is used to extend the oligonucleotides, resulting in a single, double-stranded nucleic acid molecule per oligonucleotide pair, which then can be ligated into a vector. Isolated nucleic acids of the invention also can be obtained by mutagenesis of, e.g., a naturally occurring DNA.

[0425] B. Use of Nucleic Acids to Modulate Expression of Polypeptides

[0426] i. Expression of a Biomass-Modulating Polypeptide

[0427] A nucleic acid encoding one of the biomass-modulating polypeptides described herein can be used to express the polypeptide in a plant species of interest, typically by transforming a plant cell with a nucleic acid having the coding sequence for the polypeptide operably linked in sense orientation to one or more regulatory regions. It will be appreciated that because of the degeneracy of the genetic code, a number of nucleic acids can encode a particular biomass-modulating polypeptide; i.e., for many amino acids, there is more than one nucleotide triplet that serves as the codon for the amino acid. Thus, codons in the coding sequence for a given biomass-modulating polypeptide can be modified such that optimal expression in a particular plant species is obtained, using appropriate codon bias tables for that species.

[0428] In some cases, expression of a biomass-modulating polypeptide inhibits one or more functions of an endogenous polypeptide. For example, a nucleic acid that encodes a dominant negative polypeptide can be used to inhibit protein function. A dominant negative polypeptide typically is mutated or truncated relative to an endogenous wild type polypeptide, and its presence in a cell inhibits one or more functions of the wild type polypeptide in that cell, i.e., the dominant negative polypeptide is genetically dominant and confers a loss of function. The mechanism by which a dominant negative polypeptide confers such a phenotype can vary but often involves a protein-protein interaction or a protein-DNA interaction. For example, a dominant negative polypeptide can be an enzyme that is truncated relative to a native wild type enzyme, such that the truncated polypeptide retains domains involved in binding a first protein but lacks domains involved in binding a second protein. The truncated polypeptide is thus unable to properly modulate the activity of the second protein. See, e.g., US 2007/0056058. As another example, a point mutation that results in a non-conservative amino acid substitution in a catalytic domain can result in a dominant negative polypeptide. See, e.g., US 2005/032221. As another example, a dominant negative polypeptide can be a transcription factor that is truncated relative to a native wild type transcription factor, such that the truncated polypeptide retains the DNA binding domain(s) but lacks the activation domain(s). Such a truncated polypeptide can inhibit the wild type transcription factor from binding DNA, thereby inhibiting transcription activation.

[0429] ii. Inhibition of Expression of a Biomass-Modulating Polypeptide

[0430] Polynucleotides and recombinant constructs described herein can be used to inhibit expression of a biomass-modulating polypeptide in a plant species of interest. See, e.g., Matzke and Birchler, Nature Reviews Genetics 6:24-35 (2005); Akashi et al., Nature Reviews Mol. Cell. Biology 6:413-422 (2005); Mittal, Nature Reviews Genetics 5:355-365 (2004); and Nature Reviews RNA interference collection, Oct. 2005 on the World Wide Web at nature.com/reviews/focus/mai. A number of nucleic acid based methods, including antisense RNA, ribozyme directed RNA cleavage, post-transcriptional gene silencing (PTGS), e.g., RNA interference (RNAi), and transcriptional gene silencing (TGS) are known to inhibit gene expression in plants. Suitable polynucleotides include full-length nucleic acids encoding biomass-modulating polypeptides or fragments of such full-length nucleic acids. In some embodiments, a complement of the full-length nucleic acid or a fragment thereof can be used. Typically, a fragment is at least 10 nucleotides, e.g., at least 12, 13, 14, 15, 16, 17, 18, 19, 20, 21, 22, 23, 24, 25, 26, 27, 30, 35, 40, 50, 80, 100, 200, 500 nucleotides or more. Generally, higher homology can be used to compensate for the use of a shorter sequence.

[0431] Antisense technology is one well-known method. In this method, a nucleic acid of a gene to be repressed is cloned and operably linked to a regulatory region and a transcription termination sequence so that the antisense strand of RNA is transcribed. The recombinant construct is then transformed into plants, as described herein, and the antisense strand of RNA is produced. The nucleic acid need not be the entire sequence of the gene to be repressed, but typically will be substantially complementary to at least a portion of the sense strand of the gene to be repressed.

[0432] In another method, a nucleic acid can be transcribed into a ribozyme, or catalytic RNA, that affects expression of an mRNA. See, U.S. Pat. No. 6,423,885. Ribozymes can be designed to specifically pair with virtually any target RNA and cleave the phosphodiester backbone at a specific location, thereby functionally inactivating the target RNA. Heterologous nucleic acids can encode ribozymes designed to cleave particular mRNA transcripts, thus preventing expression of a polypeptide. Hammerhead ribozymes are useful for destroying particular mRNAs, although various ribozymes that cleave mRNA at site-specific recognition sequences can be used. Hammerhead ribozymes cleave mRNAs at locations dictated by flanking regions that form complementary base pairs with the target mRNA. The sole requirement is that the target RNA contains a 5′-UG-3′ nucleotide sequence. The construction and production of hammerhead ribozymes is known in the art. See, for example, U.S. Pat. No. 5,254,678 and WO 02/46449 and references cited therein. Hammerhead ribozyme sequences can be embedded in a stable RNA such as a transfer RNA (tRNA) to increase cleavage efficiency in vivo. Perriman et al., Proc. Natl. Acad. Sci. USA, 92(13):6175-6179 (1995); de Feyter and Gaudron, Methods in Molecular Biology, Vol. 74, Chapter 43, “Expressing Ribozymes in Plants”, Edited by Turner, P.C., Humana Press Inc., Totowa, N.J. RNA endoribonucleases which have been described, such as the one that occurs naturally in Tetrahymena thermophila, can be useful. See, for example, U.S. Pat. Nos. 4,987,071 and 6,423,885.

[0433] PTGS, e.g., RNAi, can also be used to inhibit the expression of a gene. For example, a construct can be prepared that includes a sequence that is transcribed into an RNA that can anneal to itself, e.g., a double stranded RNA having a stem-loop structure. In some embodiments, one strand of the stem portion of a double stranded RNA comprises a sequence that is similar or identical to the sense coding sequence or a fragment thereof of a biomass-modulating polypeptide, and that is from about 10 nucleotides to about 2,500 nucleotides in length. The length of the sequence that is similar or identical to the sense coding sequence can be from 10 nucleotides to 500 nucleotides, from 15 nucleotides to 300 nucleotides, from 20 nucleotides to 100 nucleotides, or from 25 nucleotides to 100 nucleotides. The other strand of the stem portion of a double stranded RNA comprises a sequence that is similar or identical to the antisense strand or a fragment thereof of the coding sequence of the biomass-modulating polypeptide, and can have a length that is shorter, the same as, or longer than the corresponding length of the sense sequence. In some cases, one strand of the stem portion of a double stranded RNA comprises a sequence that is similar or identical to the 3′ or 5′ untranslated region, or a fragment thereof, of an mRNA encoding a biomass-modulating polypeptide, and the other strand of the stem portion of the double stranded RNA comprises a sequence that is similar or identical to the sequence that is complementary to the 3′ or 5′ untranslated region, respectively, or a fragment thereof, of the mRNA encoding the biomass-modulating polypeptide. In other embodiments, one strand of the stem portion of a double stranded RNA comprises a sequence that is similar or identical to the sequence of an intron, or a fragment thereof, in the pre-mRNA encoding a biomass-modulating polypeptide, and the other strand of the stem portion comprises a sequence that is similar or identical to the sequence that is complementary to the sequence of the intron, or a fragment thereof, in the pre-mRNA.

[0434] The loop portion of a double stranded RNA can be from 3 nucleotides to 5,000 nucleotides, e.g., from 3 nucleotides to 25 nucleotides, from 15 nucleotides to 1,000 nucleotides, from 20 nucleotides to 500 nucleotides, or from 25 nucleotides to 200 nucleotides. The loop portion of the RNA can include an intron or a fragment thereof. A double stranded RNA can have zero, one, two, three, four, five, six, seven, eight, nine, ten, or more stem-loop structures.

[0435] A construct including a sequence that is operably linked to a regulatory region and a transcription termination sequence, and that is transcribed into an RNA that can form a double stranded RNA, is transformed into plants as described herein. Methods for using RNAi to inhibit the expression of a gene are known to those of skill in the art. See, e.g., U.S. Pat. Nos. 5,034,323; 6,326,527; 6,452,067; 6,573,099; 6,753,139; and 6,777,588. See also WO 97/01952; WO 98/53083; WO 99/32619; WO 98/36083; and U.S. Patent Publications 20030175965, 20030175783, 20040214330, and 20030180945.

[0436] Constructs containing regulatory regions operably linked to nucleic acid molecules in sense orientation can also be used to inhibit the expression of a gene. The transcription product can be similar or identical to the sense coding sequence, or a fragment thereof, of a biomass-modulating polypeptide. The transcription product also can be unpolyadenylated, lack a 5′ cap structure, or contain an unspliceable intron. Methods of inhibiting gene expression using a full-length cDNA as well as a partial cDNA sequence are known in the art. See, e.g., U.S. Pat. No. 5,231,020.

[0437] In some embodiments, a construct containing a nucleic acid having at least one strand that is a template for both sense and antisense sequences that are complementary to each other is used to inhibit the expression of a gene. The sense and antisense sequences can be part of a larger nucleic acid molecule or can be part of separate nucleic acid molecules having sequences that are not complementary. The sense or antisense sequence can be a sequence that is identical or complementary to the sequence of an mRNA, the 3′ or 5′ untranslated region of an mRNA, or an intron in a pre-mRNA encoding a biomass-modulating polypeptide, or a fragment of such sequences. In some embodiments, the sense or antisense sequence is identical or complementary to a sequence of the regulatory region that drives transcription of the gene encoding a biomass-modulating polypeptide. In each case, the sense sequence is the sequence that is complementary to the antisense sequence.

[0438] The sense and antisense sequences can be a length greater than about 10 nucleotides (e.g., 12, 13, 14, 15, 16, 17, 18, 19, 20, 21, 22, 23, 24, 25, 26, 27, 28, 29, 30, or more nucleotides). For example, an antisense sequence can be 21 or 22 nucleotides in length. Typically, the sense and antisense sequences range in length from about 15 nucleotides to about 30 nucleotides, e.g., from about 18 nucleotides to about 28 nucleotides, or from about 21 nucleotides to about 25 nucleotides.

[0439] In some embodiments, an antisense sequence is a sequence complementary to an mRNA sequence, or a fragment thereof, encoding a biomass-modulating polypeptide described herein. The sense sequence complementary to the antisense sequence can be a sequence present within the mRNA of the biomass-modulating polypeptide. Typically, sense and antisense sequences are designed to correspond to a 15-30 nucleotide sequence of a target mRNA such that the level of that target mRNA is reduced.

[0440] In some embodiments, a construct containing a nucleic acid having at least one strand that is a template for more than one sense sequence (e.g., 2, 3, 4, 5, 6, 7, 8, 9, 10 or more sense sequences) can be used to inhibit the expression of a gene. Likewise, a construct containing a nucleic acid having at least one strand that is a template for more than one antisense sequence (e.g., 2, 3, 4, 5, 6, 7, 8, 9, 10 or more antisense sequences) can be used to inhibit the expression of a gene. For example, a construct can contain a nucleic acid having at least one strand that is a template for two sense sequences and two antisense sequences. The multiple sense sequences can be identical or different, and the multiple antisense sequences can be identical or different. For example, a construct can have a nucleic acid having one strand that is a template for two identical sense sequences and two identical antisense sequences that are complementary to the two identical sense sequences. Alternatively, an isolated nucleic acid can have one strand that is a template for (1) two identical sense sequences 20 nucleotides in length, (2) one antisense sequence that is complementary to the two identical sense sequences 20 nucleotides in length, (3) a sense sequence 30 nucleotides in length, and (4) three identical antisense sequences that are complementary to the sense sequence 30 nucleotides in length. The constructs provided herein can be designed to have a suitable arrangement of sense and antisense sequences. For example, two identical sense sequences can be followed by two identical antisense sequences or can be positioned between two identical antisense sequences.

[0441] A nucleic acid having at least one strand that is a template for one or more sense and/or antisense sequences can be operably linked to a regulatory region to drive transcription of an RNA molecule containing the sense and/or antisense sequence(s). In addition, such a nucleic acid can be operably linked to a transcription terminator sequence, such as the terminator of the nopaline synthase (nos) gene. In some cases, two regulatory regions can direct transcription of two transcripts: one from the top strand, and one from the bottom strand. See, for example, Yan et al., Plant Physiol., 141:1508-1518 (2006). The two regulatory regions can be the same or different. The two transcripts can form double-stranded RNA molecules that induce degradation of the target RNA. In some cases, a nucleic acid can be positioned within a T-DNA or plant-derived transfer DNA (P-DNA) such that the left and right T-DNA border sequences or the left and right border-like sequences of the P-DNA flank, or are on either side of, the nucleic acid. See, US 2006/0265788. The nucleic acid sequence between the two regulatory regions can be from about 15 to about 300 nucleotides in length. In some embodiments, the nucleic acid sequence between the two regulatory regions is from about 15 to about 200 nucleotides in length, from about 15 to about 100 nucleotides in length, from about 15 to about 50 nucleotides in length, from about 18 to about 50 nucleotides in length, from about 18 to about 40 nucleotides in length, from about 18 to about 30 nucleotides in length, or from about 18 to about 25 nucleotides in length.

[0442] In some nucleic-acid based methods for inhibition of gene expression in plants, a suitable nucleic acid can be a nucleic acid analog. Nucleic acid analogs can be modified at the base moiety, sugar moiety, or phosphate backbone to improve, for example, stability, hybridization, or solubility of the nucleic acid. Modifications at the base moiety include deoxyuridine for deoxythymidine, and 5-methyl-2′-deoxycytidine and 5-bromo-2′-deoxycytidine for deoxycytidine. Modifications of the sugar moiety include modification of the 2′ hydroxyl of the ribose sugar to form 2′-O-methyl or 2′-O-allyl sugars. The deoxyribose phosphate backbone can be modified to produce morpholino nucleic acids, in which each base moiety is linked to a six-membered morpholino ring, or peptide nucleic acids, in which the deoxyphosphate backbone is replaced by a pseudopeptide backbone and the four bases are retained. See, for example, Summerton and Weller, Antisense Nucleic Acid Drug Dev., 7:187-195 (1997); Hyrup et al., Bioorgan. Med. Chem., 4:5-23 (1996). In addition, the deoxyphosphate backbone can be replaced with, for example, a phosphorothioate or phosphorodithioate backbone, a phosphoroamidite, or an alkyl phosphotriester backbone.

[0443] C. Constructs/Vectors

[0444] Recombinant constructs provided herein can be used to transform plants or plant cells in order to modulate biomass levels. A recombinant nucleic acid construct can comprise a nucleic acid encoding a biomass-modulating polypeptide as described herein, operably linked to a regulatory region suitable for expressing the biomass-modulating polypeptide in the plant or cell. Thus, a nucleic acid can comprise a coding sequence that encodes a biomass-modulating polypeptides as set forth in SEQ ID NOs: 2, 4, 5, 6, 8, 10, 12, 13, 15, 17, 18, 20, 22, 24, 25, 26, 27, 29, 30, 32, 34, 35, 37, 38, 39, 41, 43, 45, 47, 49, 51, 53, 55, 56, 57, 59, 60, 62, 63, 64, 65, 67, 69, 70, 71, 73, 74, 75, 77, 79, 80, 81, 82, 83, 84, 85, 86, 88, 90, 91, 92, 93, 94, 95, 96, 97, 98, 99, 100, 101, 102, 100, 104, 105, 106, 107, 108, 109, 110, 111, 112, 113, 115, 117, 119, 120, 121, 122, 123, 124, 126, 128, 129, 131, 133, 135, 137, 139, 140, 141, 142, 144, 146, 147, 148, 149, 150, 152, 154, 155, 157, 158, 160, 162, 163, 165, 167, 169, 171, 173, 175, 176, 178, 180, 182, 183, 185, 187, 189, 191, 193, 194, 195, 196, 197, 198, 199, 200, 201, 203, 205, 207, 208, 209, 211, 213, 214, 215, 217, 218, 219, 220, 222, 223, 224, 226, 228, 229, 231, 232, 233, 234, 235, 236, 237, 238, 239, 240, 242, 244, 245, 246, 247, 248, 249, 250, 251, 252, 254, 255, 256, 257, 258, 259, 260, 261, 262, 263, 264, 265, 266, 267, 268, 269, 270, 271, 272, 273, 274, 275, 276, 277, 278, 279, 281, 282, 284, 286, 287, 288, 289, 291, 293, 294, 295, 297, 299, 300, 302, 304, 306, 307, 308, 310, 311, 313, 315, 316, 317, 318, 319, 320, 322, 324, 326, 328, 330, 331, 333, 335, 337, 338, 340, 342, 343, 345, 346, 347, 349, 350, 351, 353, 354, 355, 357, 358, 360, 362, 363, 364, 365, 367, 369, 370, 371, 372, 373, 374, 375, 377, 378, 379, 380, 382, 383, 384, 385, 386, 387, 389, 390, 391, 393, 395, 396, 398, 400, 401, 403, 404, 406, 408, 409, 410, 411, 412, 414, 415, 417, 419, 420, 421, 422, 423, 424, 425, 426, 427, 428, 429, 430, 431, 432, 433, 434, 435, 436, 437, 438, 439, 440, 441, 442, 443, 444, 445, 446, 447, 448, 449, 450, 451, 452, 453, 454, 456, 457, 459, 461, 462, 464, 466, 467, 468, 469, 470, 472, 474, 475, 477, 479, 480, 482, 483, 484, 485, 487, 488, 489, 490, 491, 492, 493, 494, 495, 497, 499, 501, 502, 503, 504, 506, 507, 509, 510, 511, 512, 514, 515, 516, 517, 518, 520, 522, 524, 526, 528, 530, 531, 532, 533, 534, 535, 536, 537, 538, 539, 540, 542, 543, 545, 546, 547, 548, 550, 551, 553, 554, 555, 557, 559, 560, 562, 563, 565, 566, 568, 570, 572, 573, 575, 576, 577, 579, 580, 581, 582, 583, 584, 585, 586, 587, 589, 590, 591, 592, 593, 595, 596, 597, 598, 599, 601, 602, 604, 605, 607, 609, 610, 611, 612, 613, 614, 615, 616, 617, 618, 619, 620, 621, 622, 623, 624, 625, 626, 627, 629, 631, 633, 634, 635, 36, 637, 638, 640, 642, 644, 646, 648, 650, 651, 653, 654, 655, 656, 657, 658, 659, 660, 662, 663, 664, 665, 666, 667, 669, 671, 672, 674, 676, 677, 679, 680, 682, 684, 685, 687, 689, 690, 691, 693, 694, 696, 697, 698, 00, 702, 704, 705, 706, 707, 709, 710, 712, 714, 715, 717, 718, 719, 720, 721, 722, 723, 725, 726, 727, 728, 730, 731, 732, 733, 734, 735, 737, 739, 741, 743, 744, 745, 746, 747, 749, 751, 752, 753, 755, 757, 759, 760, 762, 764, 766, 768, 770, 772, 773, 775, 776, 778, 780, 782, 784, 786, 788, 789, 791, 793, 794, 795, 796, 798, 800, 801, 802, 804, 805, 807, 809, 811, 813, 815, 817, 819, 820, 822, 823, 824, 825, 827, 828, 830, 832, 834, 836, 838, 840, 842, 843, 844, 846, 848, 849, 850, 851, 853, 855, 856, 857, 858, 860, 861, 863, 864, 866, 868, 870, 871, 873, 874, 876, 878, 880, 882, 883, 885, 887, 889, 890, 892, 893, 895, 896, 897, 899, 901, 902, 903, 905, 907, 908, 909, 910, 912, 914, 915, 916, 917, 919, 921, 923, 925, 926, 928, 930, 932, 934, 935, 936, 937, 939, 941, 943, 945, 947, 949, 950, 952, 953, 955, 957, 959, 960, 962, 964, 965, 967, 968, 970, 972, 974, 976, 978, 980, 981, 983, 985, 86, 87, 989, 991, 993, 995, 997, 998, 1000, 1002, 1003, 1005, 1007, 1008, 1009, 1011, 1013, 1014, 1016, 1018, 1020, 1022, 1023, 1024, 1025, 1026, 1027, 1029, 1001, 1033, 1034, 1036, 1038, 1039, 1041, 1042, 1043, 1044, 1045, 1046, 1048, 1049, 1050, 1051, 1052, 1054, 1056, 1058, 1060, 1061, 1062, 1064, 1066, 1067, 1069, 1070, 1071, 1072, 1074, 1076, 1077, 1078, 1079, 1081, 1083, 1085, 1087, 1088, 1090, 1092, 1093, 1095, 1096, 1097, 1099, 1101, 1102, 1104, 1105, 1107, 1108, 1110, 1111, 1112, 1113, 1114, 1115, 1117, 1119, 1120, 1121, 1122, 1124, 1126, 1128, 1130, 1132, 1133, 1135, 1137, 1139, 1141, 1142, 1144, 1146, 1148, 1150, 1152, 1154, 1156, 1157, 1158, 1160, 1162, 1164, 1166, 1168, 1169, 1171, 1173, 1175, 1176, 1177, 1179, 1180, 1181, 1183, 1185, 1187, 1188, 1190, 1192, 1193, 1194, 1196, 1198, 1200, 1201, 1203, 1205, 1207, 1209, 1210, 1212, 1214, 1216, 1218, 1219, 1221, 1222, 1224, 1226, 1228, 1230, 1232, 1234, 1235, 1236, 1238, 1240, 1241, 1243, 1245, 1247, 1249, 1251, 1252, 1253, 1255, 1257, 1259, 1261, 1263, 1265, 1266, 1268, 1270, 1272, 1274, 1276, 1278, 1279, 1281, 1283, 1285, 1287, 1289, 1291, 1293, 1294, 1296, 1297, 1299, 1300, 1302, 1304, 1306, 1308, 1309, 1310, 1312, 1313, 1314, 1316, 1318, 1320, 1322, 1324, 1325, 1326, 1328, 1329, 1330, 1332, 1333, 1334, 1336, 1338, 1339, 1340, 1341, 1342, 1343, 1344, 1345, 1347, 1349, 1350, 1352, 1353, 1355, 1357, 1358, 1359, 1360, 1361, 1363, 1364, 1366, 1367, 1369, 1370, 1371, 1372, 1373, 1375, 1376, 1377, 1379, 1380, 1381, 1382, 1384, 1386, 1388, 1389, 1391, 1393, 1395, 1397, 1399, 1401, 1402, 1403, 1405, 1407, 1409, 1410, 1412, 1414, 1416, 1418, 1420, 1421, 1422, 1424, 1426, 1428, 1429, 1431, 1433, 1435, 1437, 1439, 1440, 1441, 1443, 1445, 1446, 1448, 1450, 1452, 1454, 1456, 1457, 1459, 1461, 1463, 1465, 1467, 1469, 1471, 1473, 1475, 1477, 1479, 1481, 1482, 1483, 1485, 1486, 1488, 1489, 1490, 1492, 1493, 1495, 1497, 1498, 1500, 1502, 1503, 1505, 1506, 1507, 1508, 1509, 1511, 1512, 1514, 1515, 1516, 1518, 1520, 1522, 1523, 1524, 1525, 1526, 1528, 1529, 1531, 1533, 1534, 1535, 1537, 1538, 1540, 1542, 1544, 1546, 1547, 1549, 1550, 1552, 1554, 1555, 1557, 1558, 1560, 1562, 1563, 1564, 1565, 1568, 1569, 1571, 1572, 1574, 1575, 1577, 1578, 1580, 1581, 1583, 1584, 1586, 1588, 1589, 1591, 1593, 1594, 1595, 1596, 1598, 1599, 1600, 1602, 1603, 1604, 1605, 1607, 1609, 1611, 1612, 1613, 1615, 1616, 1618, 1619, 1621, 1622, 1624, 1626, 1628, 1629, 1630, 1632, 1634, 1636, 1637, 1639, 1640, 1642, 1644, 1646, 1647, 1648, 1649, 1650, 1652, 1654, 1656, 1657, 1658, 1660, 1661, 1662, 1664, 1666, 1668, 1669, 1670, 1671, 1672, 1674, 1676, 1677, 1679, 1680, 1681, 1682, 1683, 1684, 1686, 1688, 1689, 1691, 1693, 1695, 1697, 1699, 1700, 1701, 1702, 1704, 1705, 1706, 1707, 1708, 1710, 1711, 1712, 1713, 1714, 1715, 1717, 1719, 1721, 1723, 1724, 1725, 1727, 1729, 1731, 1732, 1734, 1735, 1737, 1739, 1741, 1743, 1745, 1746, 1747, 1749, 1751, 1753, 1755, 1757, 1758, 1759, 1761, 1762, 1764, 1765, 1766, 1767, 1769, 1770, 1772, 1773, 1774, 1776, 1777, 1779, 1781, 1783, 1784, 1786, 1788, 1790, 1792, 1794, 1795, 1797, 798, 1799, 1801, 1803, 1804, 1805, 1806, 1807, 1808, 1809, 1810, 1811, 1812, 1813, 1815, 1816, 1817, 1819, 1821, 1822, 1823, 1825, 1826, 1827, 1828, 1829, 1831, 1833, 1834, 1835, 1837, 1839, 1841, 1842, 1844, 1845, 1847, 1849, 1850, 1852, 1853, 1854, 1855, 1856, 1857, 1858, 1859, 1861, 1863, 1865, 1866, 1867, 1869, 1871, 1872, 1874, 1876, 1877, 1879, 1881, 1882, 1883, 1885, 1887, 1889, 1891, 1893, 1894, 1895, 1897, 1898, 1900, 1902, 1903, 1904, 1906, 1908, 1910, 1912, 1913, 1915, 1917, 1918, 1919, 1920, 1922, 1924, 1926, 1928, 1929, 1931, 1933, 1935, 1936, 1938, 1940, 1942, 1944, 1946, 1948, 1949, 1951, 1953, 1955, 1957, 1959, 1961, 1963, 1965, 1967, 1969, 1971, 1972, 1973, 1974, 1975, 1976, 1978, 1979, 1980, 1982, 1983, 1985, 1986, 1987, 1989, 1990, 1992, 1994, 1996, 1997, 1999, 2000, 2002, 2003, 2005, 2007, 2008, 2009, 2010, 2011, 2013, 2015, 2016, 2017, 2018, 2019, 2021, 2022, 2023, 2024, 2026, 2028, 2030, 2031, 2032, 2034, 2036, 2037, 2038, 2040, 2041, 2042, 2043, 2044, 2046, 2047, 2048, 2049, 2051, 2053, 2055, 2056, 2058, 2060, 2062, 2064, 2066, 2067, 2069, 2070, 2072, 2073, 2074, 2075, 2076, 2077, 2078, 2079, 2081, 2083, 2085, 2087, 2088, 2090, 2091, 2092, 2093, 2095, 2097, 2098, 2100, 2102, 2104, 2105, 2106, 2108, 2110, 2112, 2113, 2115, 2117, 2118, 2119, 2120, 2121, 2122, 2124, 2126, 2128, 2129, 2130, 2132, 2133, 2135, 2136, 2137, 2138, 2140, 2141, 2142, 2143, 2144, 2146, 2148, 2149, 2150, 2151, 2152, 2153, 2154, 2156, 2158, 2159, 2160, 2161, 2162, 2163, 2165, 2167, 2169, 2170, 2171, 2172, 2173, 2174, 2175, 2176, 2177, 2178, 2179, 2181, 2183, 2184, 2186, 2187, 2188, 2190, 2192, 2194, 2195, 2196, 2197, 2198, 2199, 2200, 2201, 2202, 2203, 2205, 2207, 2209, 2211, 2213, 2215, 2217, 2219, 2221, 2223, 2225, 2226, 2228, 2229, 2231, 2233, 2235, 2236, 2237, 2238, 2239, 2240, 2241, 2243, 2244, 2246, 2248, 2250, 2251, 2253, 2255, 2257, 2259, 2261, 2262, 2264, 2265, 2267, 2269, 2270, 2272, 2273, 2275, 2276, 2278, 2279, 2281, 2282, 2284, 2285, 2286, 2288, 2289, 2291, 2293, 2295, 2296, 2297, 2298, 2299, 2300, 2302, 2304, 2306, 2307, 2309, 2310, 2312, 2313, 2314, 2315, 2316, 2317, 2318, 2320, 2321, 2323, 2325, 2327, 2329, 2330, 2332, 2334, 2335, 2337, 2339, 2341, 2343, 2345, 2346, 2347, 2348, 2350, 2352, 2354, 2356, 2357, 2358, 2360, 2361, 2362, 2364, 2366, 2367, 2369, 2371, 2373, 2375, 2376, 2378, 2380, 2381, 2383, 2384, 2386, 2388, 2390, 2391, 2392, 2394, 2396, 2397, 2399, 2401, 2402, 2403, 2405, 2407, 2408, 2409, 2411, 2413, 2415, 2417, 2418, 2419, 2421, 2422, 2423, 2424, 2425, 2427, 2428, 2429, 2430, 2432, 2434, 2435, 2437, 2439, 2440, 2441, 2442, 2443, 2445, 2446, 2448, 2449, 2451, 2452, 2454, 2456, 2457, 2458, 2459, 2460, 2461, 2462, 2463, 2464, 2466, 2468, 2469, 2470, 2471, 2472, 2474, 2475, 2476, 2477, 2478, 2480, 2482, 2483, 2484, 2485, 2486, 2487, 2488, 2489, 2490, 2491, 2493, 2494, 2495, 2496, 2497, 2498, 2499, 2500, 2502, 2503, 2505, 2506, 2507, 2509, 2510, 2511, 2512, 2513, 2514, 2516, 2517, 2518, 2519, 2521, 2522, 2523, 2525, 2527, 2529, 2530, 2531, 2533, 2535, 2537, 2539, 2540, 2541, 2542, 2544, 2546, 2547, 2548, 2550, 2551, 2552, 2554, 2556, 2557, 2558, 2559, 2561, 2562, 2564, 2565, 2567, 2569, 2571, 2572, 2573, 2574, 2575, 2576, 2578, 2580, 2581, 2583, 2584, 2585, 2587, 2588, 2589, 2590, 2592, 2593, 2594, 2595, 2597, 2599, 2601, 2603, 2604, 2606, 2608, 2609, 2611, 2612, 2614, 2615, 2616, 2617, 2619, 2621, 2623, 2624, 2626, 2627, 2628, 2629, 2631, 2632, 2634, 2636, 2638, 2640, 2641, 2642, 2644, 2646, 2647, 2648, 2649, 2650, 2652, 2654, 2656, 2658, 2659, 2661, 2663, 2665, 2667, 2668, 2670, 2672, 2674, 2675, 2677, 2679, 2681, 2683, 2685, 2687, 2689, 2691, 2693, 2695, 2697, 2699, 2701, 2703, 2704, 2706, 2708, 2710, 2711, 2712, 2714, 2716, 2717, 2719, 2721, 2722, 2724, 2726, 2728, 2730, 2732, 2734, 2735, 2736, 2738, 2739, 2740, 2741, 2743, 2745, 2746, 2748, 2750, 2751, 2753, 2754, 2756, 2758, 2760, 2762, 2764, 2766, 2768, 2770, 2771, 2772, 2773, 2775, 2777, 2778, 2780, 2781, 2782, 2784, 2786, 2788, 2790, 2791, 2792, 2794, 2796, 2797, 2799, 2801, 2802, 2803, 2804, 2806, 2807, 2809, 2810, 2811, 2813, 2815, 2816, 2818, 2819, 2821, 2822, 2823, 2825, 2826, 2828, 2830, 2832, 2833, 2835, 2836, 2838, 2840, 2842, 2844, 2845, 2846, 2847, 2849, 2850, 2851, 2852, 2853, 2855, 2856, 2857, 2858, 2859, 2861, 2862, 2863, 2864, 2866, 2867, 2868, 2869, 2870, 2872, 2873, 2875, 2876, 2877, 2878, 2880, 2882, 2883, 2885, 2886, 2888, 2890, 2891, 2892, 2893, 2894, 2896, 2898, 2900, 2902, 2903, 2904, 2906, 2907, 2908, 2909, 2910, 2911, 2915, 2917, 2918, 2919, 2920, 2921, 2922, 2923, 2924, or 2926. Examples of nucleic acids encoding biomass-modulating polypeptides are set forth in SEQ ID NO: 1, 3, 7, 9, 11, 14, 16, 19, 21, 23, 28, 31, 33, 36, 40, 42, 44, 46, 48, 50, 52, 54, 58, 61, 66, 68, 72, 76, 78, 87, 89, 114, 116, 118, 125, 127, 130, 132, 134, 136, 138, 143, 145, 151, 153, 156, 159, 161, 164, 166, 168, 170, 172, 174, 177, 179, 181, 184, 186, 188, 190, 192, 202, 204, 206, 210, 212, 216, 221, 225, 227, 230, 241, 243, 253, 280, 283, 285, 290, 292, 296, 298, 301, 303, 305, 309, 312, 314, 321, 323, 325, 327, 329, 332, 334, 336, 339, 341, 344, 348, 352, 356, 359, 361, 366, 368, 376, 381, 388, 392, 394, 397, 399, 402, 405, 407, 413, 416, 418, 455, 458, 460, 463, 465, 471, 473, 476, 478, 481, 486, 496, 498, 500, 505, 508, 513, 519, 521, 523, 525, 527, 529, 541, 544, 549, 552, 556, 558, 561, 564, 567, 569, 571, 574, 578, 588, 594, 600, 603, 606, 608, 628, 630, 632, 639, 641, 643, 645, 647, 649, 652, 661, 668, 670, 673, 675, 678, 681, 683, 686, 688, 692, 695, 699, 701, 703, 708, 711, 713, 716, 724, 729, 736, 738, 740, 742, 748, 750, 754, 756, 758, 761, 763, 765, 767, 769, 771, 774, 777, 779, 781, 783, 785, 787, 790, 792, 797, 799, 803, 806, 808, 810, 812, 814, 816, 818, 821, 826, 829, 831, 833, 835, 837, 839, 841, 845, 847, 852, 854, 859, 862, 865, 867, 869, 872, 875, 877, 879, 881, 884, 886, 888, 891, 894, 898, 900, 904, 906, 911, 913, 918, 920, 922, 924, 927, 929, 931, 933, 938, 940, 942, 944, 946, 948, 951, 954, 956, 958, 961, 963, 966, 969, 971, 973, 975, 977, 979, 982, 984, 988, 990, 992, 994, 996, 999, 1001, 1004, 1006, 1010, 1012, 1015, 1017, 1019, 1021, 1028, 1030, 1032, 1035, 1037, 1040, 1047, 1053, 1055, 1057, 1059, 1063, 1065, 1068, 1073, 1075, 1080, 1082, 1084, 1086, 1089, 1091, 1094, 1098, 1100, 1103, 1106, 1109, 1116, 1118, 1123, 1125, 1127, 1129, 1131, 1134, 1136, 1138, 1140, 1143, 1145, 1147, 1149, 1151, 1153, 1155, 1159, 1161, 1163, 1165, 1167, 1170, 1172, 1174, 1178, 1182, 1184, 1186, 1189, 1191, 1195, 1197, 1199, 1202, 1204, 1206, 1208, 1211, 1213, 1215, 1217, 1220, 1223, 1225, 1227, 1229, 1231, 1233, 1237, 1239, 1242, 1244, 1246, 1248, 1250, 1254, 1256, 1258, 1260, 1262, 1264, 1267, 1269, 1271, 1273, 1275, 1277, 1280, 1282, 1284, 1286, 1288, 1290, 1292, 1295, 1298, 1301, 1303, 1305, 1307, 1311, 1315, 1317, 1319, 1321, 1323, 1327, 1331, 1335, 1337, 1346, 1348, 1351, 1354, 1356, 1362, 1365, 1368, 1374, 1378, 1383, 1385, 1387, 1390, 1392, 1394, 1396, 1398, 1400, 1404, 1406, 1408, 1411, 1413, 1415, 1417, 1419, 1423, 1425, 1427, 1430, 1432, 1434, 1436, 1438, 1442, 1444, 1447, 1449, 1451, 1453, 1455, 1458, 1460, 1462, 1464, 1466, 1468, 1470, 1472, 1474, 1476, 1478, 1480, 1484, 1487, 1491, 1494, 1496, 1499, 1501, 1504, 1510, 1513, 1517, 1519, 1521, 1527, 1530, 1532, 1536, 1539, 1541, 1543, 1545, 1548, 1551, 1553, 1556, 1559, 1561, 1566, 1568, 1570, 1573, 1576, 1579, 1582, 1585, 1587, 1590, 1592, 1597, 1601, 1606, 1608, 1610, 1614, 1617, 1620, 1623, 1625, 1627, 1631, 1633, 1635, 1638, 1641, 1643, 1645, 1651, 1653, 1655, 1659, 1663, 1665, 1667, 1673, 1675, 1678, 1685, 1687, 1690, 1692, 1694, 1696, 1698, 1703, 1709, 1716, 1718, 1720, 1722, 1726, 1728, 1730, 1733, 1736, 1738, 1740, 1742, 1744, 1748, 1750, 1752, 1754, 1756, 1760, 1763, 1768, 1771, 1775, 1778, 1780, 1782, 1785, 1787, 1789, 1791, 1793, 1796, 1800, 1802, 1814, 1818, 1820, 1824, 1830, 1832, 1836, 1838, 1840, 1843, 1846, 1848, 1851, 1860, 1862, 1864, 1868, 1870, 1873, 1875, 1878, 1880, 1884, 1886, 1888, 1890, 1892, 1896, 1899, 1901, 1905, 1907, 1909, 1911, 1914, 1916, 1921, 1923, 1925, 1927, 1930, 1932, 1934, 1937, 1939, 1941, 1943, 1945, 1947, 1950, 1952, 1954, 1956, 1958, 1960, 1962, 1964, 1966, 1968, 1970, 1977, 1981, 1984, 1988, 1991, 1993, 1995, 1998, 2001, 2004, 2006, 2012, 2014, 2020, 2025, 2027, 2029, 2033, 2035, 2039, 2045, 2050, 2052, 2054, 2057, 2059, 2061, 2063, 2065, 2068, 2071, 2080, 2082, 2084, 2086, 2089, 2094, 2096, 2099, 2101, 2103, 2107, 2109, 2111, 2114, 2116, 2123, 2125, 2127, 2131, 2134, 2139, 2145, 2147, 2155, 2157, 2164, 2166, 2168, 2180, 2182, 2185, 2189, 2191, 2193, 2204, 2206, 2208, 2210, 2212, 2214, 2216, 2218, 2220, 2222, 2224, 2227, 2230, 2232, 2234, 2242, 2245, 2247, 2249, 2252, 2254, 2256, 2258, 2260, 2263, 2266, 2268, 2271, 2274, 2277, 2280, 2283, 2287, 2290, 2292, 2294, 2301, 2303, 2305, 2308, 2311, 2319, 2322, 2324, 2326, 2328, 2331, 2333, 2336, 2338, 2340, 2342, 2344, 2349, 2351, 2353, 2355, 2359, 2363, 2365, 2368, 2370, 2372, 2374, 2377, 2379, 2382, 2385, 2387, 2389, 2393, 2395, 2398, 2400, 2404, 2406, 2410, 2412, 2414, 2416, 2420, 2426, 2431, 2433, 2436, 2438, 2444, 2447, 2450, 2453, 2455, 2465, 2467, 2473, 2479, 2481, 2492, 2501, 2504, 2508, 2515, 2520, 2524, 2526, 2528, 2532, 2534, 2536, 2538, 2543, 2545, 2549, 2553, 2555, 2560, 2563, 2566, 2568, 2570, 2577, 2579, 2582, 2586, 2591, 2596, 2598, 2600, 2602, 2605, 2607, 2610, 2613, 2618, 2620, 2622, 2625, 2630, 2633, 2635, 2637, 2639, 2643, 2645, 2651, 2653, 2655, 2657, 2660, 2662, 2664, 2666, 2669, 2671, 2673, 2676, 2678, 2680, 2682, 2684, 2686, 2688, 2690, 2692, 2694, 2696, 2698, 2700, 2702, 2705, 2707, 2709, 2713, 2715, 2718, 2720, 2723, 2725, 2727, 2729, 2731, 2733, 2737, 2742, 2744, 2747, 2749, 2752, 2755, 2757, 2759, 2761, 2763, 2765, 2767, 2769, 2774, 2776, 2779, 2783, 2785, 2787, 2789, 2793, 2795, 2798, 2800, 2805, 2808, 2812, 2814, 2817, 2820, 2824, 2827, 2829, 2831, 2834, 2837, 2839, 2841, 2843, 2848, 2854, 2860, 2865, 2871, 2874, 2879, 2881, 2884, 2887, 2889, 2895, 2897, 2899, 2901, 2905, 2912, 2914, 2916, or 2925, or in the Sequence Listing. The biomass-modulating polypeptide encoded by a recombinant nucleic acid can be a native biomass-modulating polypeptide, or can be heterologous to the cell. In some cases, the recombinant construct contains a nucleic acid that inhibits expression of a biomass-modulating polypeptide, operably linked to a regulatory region. Examples of suitable regulatory regions are described in the section entitled “Regulatory Regions.”

[0445] Vectors containing recombinant nucleic acid constructs such as those described herein also are provided. Suitable vector backbones include, for example, those routinely used in the art such as plasmids, viruses, artificial chromosomes, BACs, YACs, or PACs. Suitable expression vectors include, without limitation, plasmids and viral vectors derived from, for example, bacteriophage, baculoviruses, and retroviruses. Numerous vectors and expression systems are commercially available from such corporations as Novagen® (Madison, Wis.), Clontech® (Palo Alto, Calif.), Stratagene® (La Jolla, Calif.), and Invitrogen/Life Technologies® (Carlsbad, Calif.).

[0446] The vectors provided herein also can include, for example, origins of replication, scaffold attachment regions (SARs), and/or markers. A marker gene can confer a selectable phenotype on a plant cell. For example, a marker can confer biocide resistance, such as resistance to an antibiotic (e.g., kanamycin, G418, bleomycin, or hygromycin), or an herbicide (e.g., glyphosate, chlorsulfuron or phosphinothricin). In addition, an expression vector can include a tag sequence designed to facilitate manipulation or detection (e.g., purification or localization) of the expressed polypeptide. Tag sequences, such as luciferase, β-glucuronidase (GUS), green fluorescent protein (GFP), glutathione S-transferase (GST), polyhistidine, c-myc, hemagglutinin, or Flag™ tag (Kodak, New Haven, Conn.) sequences typically are expressed as a fusion with the encoded polypeptide. Such tags can be inserted anywhere within the polypeptide, including at either the carboxyl or amino terminus.

[0447] D. Regulatory Regions

[0448] The choice of regulatory regions to be included in a recombinant construct depends upon several factors, including, but not limited to, efficiency, selectability, inducibility, desired expression level, and cell- or tissue-preferential expression. It is a routine matter for one of skill in the art to modulate the expression of a coding sequence by appropriately selecting and positioning regulatory regions relative to the coding sequence. Transcription of a nucleic acid can be modulated in a similar manner.

[0449] Some suitable regulatory regions initiate transcription only, or predominantly, in certain cell types. Methods for identifying and characterizing regulatory regions in plant genomic DNA are known, including, for example, those described in the following references: Jordano et al., Plant Cell, 1:855-866 (1989); Bustos et al., Plant Cell, 1:839-854 (1989); Green et al., EMBO J., 7:4035-4044 (1988); Meier et al., Plant Cell, 3:309-316 (1991); and Zhang et al., Plant Physiology, 110:1069-1079 (1996).

[0450] Examples of various classes of regulatory regions are described below. Some of the regulatory regions indicated below as well as additional regulatory regions are described in more detail in U.S. patent application Ser. Nos. 60/505,689; 60/518,075; 60/544,771; 60/558,869; 60/583,691; 60/619,181; 60/637,140; 60/757,544; 60/776,307; 10/957,569; 11/058,689; 11/172,703; 11/208,308; 11/274,890; 60/583,609; 60/612,891; 11/097,589; 11/233,726; 11/408,791; 11/414,142; 10/950,321; 11/360,017; PCT/US05/011105; PCT/US05/23639; PCT/US05/034308; PCT/US05/034343; and PCT/US06/038236; PCT/US06/040572; and PCT/US07/62762.

[0451] For example, the sequences of regulatory regions p326, YP0144, YP0190, p13879, YP0050, p32449, 21876, YP0158, YP0214, YP0380, PT0848, PT0633, YP0128, YP0275, PT0660, PT0683, PT0758, PT0613, PT0672, PT0688, PT0837, YP0092, PT0676, PT0708, YP0396, YP0007, YP0111, YP0103, YP0028, YP0121, YP0008, YP0039, YP0115, YP0119, YP0120, YP0374, YP0101, YP0102, YP0110, YP0117, YP0137, YP0285, YP0212, YP0097, YP0107, YP0088, YP0143, YP0156, PT0650, PT0695, PT0723, PT0838, PT0879, PT0740, PT0535, PT0668, PT0886, PT0585, YP0381, YP0337, PT0710, YP0356, YP0385, YP0384, YP0286, YP0377, PD1367, PT0863, PT0829, PT0665, PT0678, YP0086, YP0188, YP0263, PT0743 and YP0096 are set forth in the sequence listing of PCT/US06/040572; the sequence of regulatory region PT0625 is set forth in the sequence listing of PCT/US05/034343; the sequences of regulatory regions PT0623, YP0388, YP0087, YP0093, YP0108, YP0022 and YP0080 are set forth in the sequence listing of U.S. patent application Ser. No. 11/172,703; the sequence of regulatory region PR0924 is set forth in the sequence listing of PCT/US07/62762; and the sequences of regulatory regions p530c10, pOsFIE2-2, pOsMEA, pOsYp102, and pOsYp285 are set forth in the sequence listing of PCT/US06/038236.

[0452] It will be appreciated that a regulatory region may meet criteria for one classification based on its activity in one plant species, and yet meet criteria for a different classification based on its activity in another plant species.

[0453] i. Broadly Expressing Promoters

[0454] A promoter can be “broadly expressing” when it promotes transcription in all or most tissues, in more than one, but not necessarily in all, cell types within all tissues. For example, a broadly expressing promoter can promote transcription of an operably linked sequence in one or more of the shoot, shoot tip (apex), and leaves, but weakly or not at all in tissues such as roots or stems. As another example, a broadly expressing promoter can promote transcription of an operably linked sequence in one or more of the stem, shoot, shoot tip (apex), and leaves, but can promote transcription weakly or not at all in tissues such as reproductive tissues of flowers and developing seeds. Non-limiting examples of broadly expressing promoters that can be included in the nucleic acid constructs provided herein include the p326, YP0144, YP0190, p13879, YP0050, p32449, 21876, YP0158, YP0214, YP0380, PT0848, and PT0633 promoters. Additional examples include the cauliflower mosaic virus (CaMV) 35S promoter, the mannopine synthase (MAS) promoter, the 1′ or 2′ promoters derived from T-DNA of Agrobacterium tumefaciens, the figwort mosaic virus 34S promoter, actin promoters such as the rice actin promoter, and ubiquitin promoters such as the maize ubiquitin-1 promoter. In some cases, the CaMV 35S promoter is excluded from the category of broadly expressing promoters.

[0455] ii. Root Promoters

[0456] Root-active promoters confer transcription in root tissue, e.g., root endodermis, root epidermis, or root vascular tissues. In some embodiments, root-active promoters are root-preferential promoters, i.e., confer transcription only or predominantly in root tissue. Root-preferential promoters include the YP0128, YP0275, PT0625, PT0660, PT0683, and PT0758 promoters. Other root-preferential promoters include the PT0613, PT0672, PT0688, and PT0837 promoters, which drive transcription primarily in root tissue and to a lesser extent in ovules and/or seeds. Other examples of root-preferential promoters include the root-specific subdomains of the CaMV 35S promoter (Lam et al., Proc. Natl. Acad. Sci. USA, 86:7890-7894 (1989)), root cell specific promoters reported by Conkling et al., Plant Physiol., 93:1203-1211 (1990), and the tobacco RD2 promoter.

[0457] iii. Maturing Endosperm Promoters

[0458] In some embodiments, promoters that drive transcription in maturing endosperm can be useful. Transcription from a maturing endosperm promoter typically begins after fertilization and occurs primarily in endosperm tissue during seed development and is typically highest during the cellularization phase. Most suitable are promoters that are active predominantly in maturing endosperm, although promoters that are also active in other tissues can sometimes be used. Non-limiting examples of maturing endosperm promoters that can be included in the nucleic acid constructs provided herein include the napin promoter, the Arcelin-5 promoter, the phaseolin promoter (Bustos et al., Plant Cell, 1(9):839-853 (1989)), the soybean trypsin inhibitor promoter (Riggs et al., Plant Cell, 1(6):609-621 (1989)), the ACP promoter (Baerson et al., Plant Mol. Biol., 22(2):255-267 (1993)), the stearoyl-ACP desaturase promoter (Slocombe et al., Plant Physiol., 104(4):167-176 (1994)), the soybean α′ subunit of β-conglycinin promoter (Chen et al., Proc. Natl. Acad. Sci. USA, 83:8560-8564 (1986)), the oleosin promoter (Hong et al., Plant Mol. Biol., 34(3):549-555 (1997)), and zein promoters, such as the 15 kD zein promoter, the 16 kD zein promoter, 19 kD zein promoter, 22 kD zein promoter and 27 kD zein promoter. Also suitable are the Osgt-1 promoter from the rice glutelin-1 gene (Zheng et al., Mol. Cell. Biol., 13:5829-5842 (1993)), the beta-amylase promoter, and the barley hordein promoter. Other maturing endosperm promoters include the YP0092, PT0676, and PT0708 promoters.

[0459] iv. Ovary Tissue Promoters

[0460] Promoters that are active in ovary tissues such as the ovule wall and mesocarp can also be useful, e.g., a polygalacturonidase promoter, the banana TRX promoter, the melon actin promoter, YP0396, and PT0623. Examples of promoters that are active primarily in ovules include YP0007, YP0111, YP0092, YP0103, YP0028, YP0121, YP0008, YP0039, YP0115, YP0119, YP0120, and YP0374.

[0461] v. Embryo Sac/Early Endosperm Promoters

[0462] To achieve expression in embryo sac/early endosperm, regulatory regions can be used that are active in polar nuclei and/or the central cell, or in precursors to polar nuclei, but not in egg cells or precursors to egg cells. Most suitable are promoters that drive expression only or predominantly in polar nuclei or precursors thereto and/or the central cell. A pattern of transcription that extends from polar nuclei into early endosperm development can also be found with embryo sac/early endosperm-preferential promoters, although transcription typically decreases significantly in later endosperm development during and after the cellularization phase. Expression in the zygote or developing embryo typically is not present with embryo sac/early endosperm promoters.

[0463] Promoters that may be suitable include those derived from the following genes: Arabidopsis viviparous-1 (see, GenBank No. U93215); Arabidopsis atmycl (see, Urao, Plant Mol. Biol., 32:571-57 (1996); Conceicao, Plant, 5:493-505 (1994)); Arabidopsis FIE (GenBank No. AF129516); Arabidopsis MEA; Arabidopsis FIS2 (GenBank No. AF096096); and FIE 1.1 (U.S. Pat. No. 6,906,244). Other promoters that may be suitable include those derived from the following genes: maize MAC1 (see, Sheridan, Genetics, 142:1009-1020 (1996)); maize Cat3 (see, GenBank No. L05934; Abler, Plant Mol. Biol., 22:10131-1038 (1993)). Other promoters include the following Arabidopsis promoters: YP0039, YP0101, YP0102, YP0110, YP0117, YP0119, YP0137, DME, YP0285, and YP0212. Other promoters that may be useful include the following rice promoters: p530c10, pOsFIE2-2, pOsMEA, pOsYp102, and pOsYp285.

[0464] vi. Embryo Promoters

[0465] Regulatory regions that preferentially drive transcription in zygotic cells following fertilization can provide embryo-preferential expression. Most suitable are promoters that preferentially drive transcription in early stage embryos prior to the heart stage, but expression in late stage and maturing embryos is also suitable. Embryo-preferential promoters include the barley lipid transfer protein (Ltp1) promoter (Plant Cell Rep 20:647-654 (2001)), YP0097, YP0107, YP0088, YP0143, YP0156, PT0650, PT0695, PT0723, PT0838, PT0879, and PT0740.

[0466] vii. Photosynthetic Tissue Promoters

[0467] Promoters active in photosynthetic tissue confer transcription in green tissues such as leaves and stems. Most suitable are promoters that drive expression only or predominantly in such tissues. Examples of such promoters include the ribulose-1,5-bisphosphate carboxylase (RbcS) promoters such as the RbcS promoter from eastern larch (Larix laricina), the pine cab6 promoter (Yamamoto et al., Plant Cell Physiol., 35:773-778 (1994)), the Cab-1 promoter from wheat (Fejes et al., Plant Mol. Biol., 15:921-932 (1990)), the CAB-1 promoter from spinach (Lubberstedt et al., Plant Physiol., 104:997-1006 (1994)), the cab1R promoter from rice (Luan et al., Plant Cell, 4:971-981 (1992)), the pyruvate orthophosphate dikinase (PPDK) promoter from corn (Matsuoka et al., Proc. Natl. Acad. Sci. USA, 90:9586-9590 (1993)), the tobacco Lhcb1*2 promoter (Cerdan et al., Plant Mol. Biol., 33:245-255 (1997)), the Arabidopsis thaliana SUC2 sucrose-H+ symporter promoter (Truernit et al., Planta, 196:564-570 (1995)), and thylakoid membrane protein promoters from spinach (psaD, psaF, psaE, PC, FNR, atpC, atpD, cab, rbcS). Other photosynthetic tissue promoters include PT0535, PT0668, PT0886, YP0144, YP0380 and PT0585.

[0468] viii. Vascular Tissue Promoters

[0469] Examples of promoters that have high or preferential activity in vascular bundles include YP0087, YP0093, YP0108, YP0022, and YP0080. Other vascular tissue-preferential promoters include the glycine-rich cell wall protein GRP 1.8 promoter (Keller and Baumgartner, Plant Cell, 3(10):1051-1061 (1991)), the Commelina yellow mottle virus (CoYMV) promoter (Medberry et al., Plant Cell, 4(2):185-192 (1992)), and the rice tungro bacilliform virus (RTBV) promoter (Dai et al., Proc. Natl. Acad. Sci. USA, 101(2):687-692 (2004)).

[0470] ix. Inducible Promoters

[0471] Inducible promoters confer transcription in response to external stimuli such as chemical agents or environmental stimuli. For example, inducible promoters can confer transcription in response to hormones such as giberellic acid or ethylene, or in response to light or drought. Examples of drought-inducible promoters include YP0380, PT0848, YP0381, YP0337, PT0633, YP0374, PT0710, YP0356, YP0385, YP0396, YP0388, YP0384, PT0688, YP0286, YP0377, PD1367, and PD0901. Examples of nitrogen-inducible promoters include PT0863, PT0829, PT0665, and PT0886. Examples of shade-inducible promoters include PR0924 and PT0678. An example of a promoter induced by salt is rd29A (Kasuga et al. (1999) Nature Biotech 17: 287-291).

[0472] x. Basal Promoters

[0473] A basal promoter is the minimal sequence necessary for assembly of a transcription complex required for transcription initiation. Basal promoters frequently include a “TATA box” element that may be located between about 15 and about 35 nucleotides upstream from the site of transcription initiation. Basal promoters also may include a “CCAAT box” element (typically the sequence CCAAT) and/or a GGGCG sequence, which can be located between about 40 and about 200 nucleotides, typically about 60 to about 120 nucleotides, upstream from the transcription start site.

[0474] xi. Stem Promoters

[0475] A stem promoter may be specific to one or more stem tissues or specific to stem and other plant parts. Stem promoters may have high or preferential activity in, for example, epidermis and cortex, vascular cambium, procambium, or xylem. Examples of stem promoters include YP0018 which is disclosed in US20060015970 and CryIA(b) and CryIA(c) (Braga et al. 2003, Journal of New Seeds 5:209-221).

[0476] xii. Reproductive Tissue Promoters

[0477] Reproductive tissue promoters are regulatory sequences that drive expression primarily in, but are not necessarily exclusive to, tissues that are required for plant sexual reproduction. These tissues include, but are not limited to, inflorescence meristem, floral meristem, floral organs, and cells of the gametophyte. Examples of promoters that express in reproductive tissues include PD3720 in PCT/US2009/038792.

[0478] xiii. Other Promoters

[0479] Other classes of promoters include, but are not limited to, shoot-preferential, callus-preferential, trichome cell-preferential, guard cell-preferential such as PT0678, tuber-preferential, parenchyma cell-preferential, and senescence-preferential promoters. Promoters designated YP0086, YP0188, YP0263, PT0758, PT0743, PT0829, YP0119, and YP0096, as described in the above-referenced patent applications, may also be useful.

[0480] xiv. Other Regulatory Regions

[0481] A 5′ untranslated region (UTR) can be included in nucleic acid constructs described herein. A 5′ UTR is transcribed, but is not translated, and lies between the start site of the transcript and the translation initiation codon and may include the +1 nucleotide. A 3′ UTR can be positioned between the translation termination codon and the end of the transcript. UTRs can have particular functions such as increasing mRNA stability or attenuating translation. Examples of 3′ UTRs include, but are not limited to, polyadenylation signals and transcription termination sequences, e.g., a nopaline synthase termination sequence.

[0482] It will be understood that more than one regulatory region may be present in a recombinant polynucleotide, e.g., introns, enhancers, upstream activation regions, transcription terminators, and inducible elements. Thus, for example, more than one regulatory region can be operably linked to the sequence of a polynucleotide encoding a biomass-modulating polypeptide.

[0483] Regulatory regions, such as promoters for endogenous genes, can be obtained by chemical synthesis or by subcloning from a genomic DNA that includes such a regulatory region. A nucleic acid comprising such a regulatory region can also include flanking sequences that contain restriction enzyme sites that facilitate subsequent manipulation.

### IV. Transgenic Plants and Plant Cells

[0484] A. Transformation

[0485] The invention also features transgenic plant cells and plants comprising at least one recombinant nucleic acid construct described herein. A plant or plant cell can be transformed by having a construct integrated into its genome, i.e., can be stably transformed. Stably transformed cells typically retain the introduced nucleic acid with each cell division. A plant or plant cell can also be transiently transformed such that the construct is not integrated into its genome. Transiently transformed cells typically lose all or some portion of the introduced nucleic acid construct with each cell division such that the introduced nucleic acid cannot be detected in daughter cells after a sufficient number of cell divisions. Both transiently transformed and stably transformed transgenic plants and plant cells can be useful in the methods described herein.

[0486] Transgenic plant cells used in methods described herein can constitute part or all of a whole plant. Such plants can be grown in a manner suitable for the species under consideration, either in a growth chamber, a greenhouse, or in a field. Transgenic plants can be bred as desired for a particular purpose, e.g., to introduce a recombinant nucleic acid into other lines, to transfer a recombinant nucleic acid to other species, or for further selection of other desirable traits. Alternatively, transgenic plants can be propagated vegetatively for those species amenable to such techniques. As used herein, a transgenic plant also refers to progeny of an initial transgenic plant provided the progeny inherits the transgene. Seeds produced by a transgenic plant can be grown and then selfed (or outcrossed and selfed) to obtain seeds homozygous for the nucleic acid construct.

[0487] Transgenic plants can be grown in suspension culture, or tissue or organ culture. For the purposes of this invention, solid and/or liquid tissue culture techniques can be used. When using solid medium, transgenic plant cells can be placed directly onto the medium or can be placed onto a filter that is then placed in contact with the medium. When using liquid medium, transgenic plant cells can be placed onto a flotation device, e.g., a porous membrane that contacts the liquid medium. A solid medium can be, for example, Murashige and Skoog (MS) medium containing agar and a suitable concentration of an auxin, e.g., 2,4-dichlorophenoxyacetic acid (2,4-D), and a suitable concentration of a cytokinin, e.g., kinetin.

[0488] When transiently transformed plant cells are used, a reporter sequence encoding a reporter polypeptide having a reporter activity can be included in the transformation procedure and an assay for reporter activity or expression can be performed at a suitable time after transformation. A suitable time for conducting the assay typically is about 1-21 days after transformation, e.g., about 1-14 days, about 1-7 days, or about 1-3 days. The use of transient assays is particularly convenient for rapid analysis in different species, or to confirm expression of a heterologous biomass-modulating polypeptide whose expression has not previously been confirmed in particular recipient cells.

[0489] Techniques for introducing nucleic acids into monocotyledonous and dicotyledonous plants are known in the art, and include, without limitation, Agrobacterium-mediated transformation, viral vector-mediated transformation, electroporation and particle gun transformation, e.g., U.S. Pat. Nos. 5,538,880; 5,204,253; 6,329,571 and 6,013,863. If a cell or cultured tissue is used as the recipient tissue for transformation, plants can be regenerated from transformed cultures if desired, by techniques known to those skilled in the art.

[0490] B. Screening/Selection

[0491] A population of transgenic plants can be screened and/or selected for those members of the population that have a trait or phenotype conferred by expression of the transgene. For example, a population of progeny of a single transformation event can be screened for those plants having a desired level of expression of a biomass-modulating polypeptide or nucleic acid. Physical and biochemical methods can be used to identify expression levels. These include Southern analysis or PCR amplification for detection of a polynucleotide; Northern blots, S1 RNase protection, primer-extension, or RT-PCR amplification for detecting RNA transcripts; enzymatic assays for detecting enzyme or ribozyme activity of polypeptides and polynucleotides; and protein gel electrophoresis, Western blots, immunoprecipitation, and enzyme-linked immunoassays to detect polypeptides. Other techniques such as in situ hybridization, enzyme staining, and immunostaining also can be used to detect the presence or expression of polypeptides and/or polynucleotides. Methods for performing all of the referenced techniques are known. As an alternative, a population of plants comprising independent transformation events can be screened for those plants having a desired trait, such as a modulated level of biomass. Selection and/or screening can be carried out over one or more generations, and/or in more than one geographic location. In some cases, transgenic plants can be grown and selected under conditions which induce a desired phenotype or are otherwise necessary to produce a desired phenotype in a transgenic plant. In addition, selection and/or screening can be applied during a particular developmental stage in which the phenotype is expected to be exhibited by the plant. Selection and/or screening can be carried out to choose those transgenic plants having a statistically significant difference in a biomass level relative to a control plant that lacks the transgene. Selected or screened transgenic plants have an altered phenotype as compared to a corresponding control plant, as described in the “Transgenic Plant Phenotypes” section herein.

[0492] C. Plant Species

[0493] The polynucleotides and vectors described herein can be used to transform a number of monocotyledonous and dicotyledonous plants and plant cell systems, including species from one of the following families: Acanthaceae, Alliaceae, Alstroemeriaceae, Amaryllidaceae, Apocynaceae, Arecaceae, Asteraceae, Berberidaceae, Bixaceae, Brassicaceae, Bromeliaceae, Cannabaceae, Caryophyllaceae, Cephalotaxaceae, Chenopodiaceae, Colchicaceae, Cucurbitaceae, Dioscoreaceae, Ephedraceae, Erythroxylaceae, Euphorbiaceae, Fabaceae, Lamiaceae, Linaceae, Lycopodiaceae, Malvaceae, Melanthiaceae, Musaceae, Myrtaceae, Nyssaceae, Papaveraceae, Pinaceae, Plantaginaceae, Poaceae, Rosaceae, Rubiaceae, Salicaceae, Sapindaceae, Solanaceae, Taxaceae, Theaceae, or Vitaceae.

[0494] Suitable species may include members of the genus Abelmoschus, Abies, Acer, Agrostis, Allium, Alstroemeria, Ananas, Andrographis, Andropogon, Artemisia, Arundo, Atropa, Berberis, Beta, Bixa, Brassica, Calendula, Camellia, Camptotheca, Cannabis, Capsicum, Carthamus, Catharanthus, Cephalotaxus, Chrysanthemum, Cinchona, Citrullus, Coffea, Colchicum, Coleus, Cucumis, Cucurbita, Cynodon, Datura, Dianthus, Digitalis, Dioscorea, Elaeis, Ephedra, Erianthus, Erythroxylum, Eucalyptus, Festuca, Fragaria, Galanthus, Glycine, Gossypium, Helianthus, Hevea, Hordeum, Hyoscyamus, Jatropha, Lactuca, Linum, Lolium, Lupinus, Lycopersicon, Lycopodium, Manihot, Medicago, Mentha, Miscanthus, Musa, Nicotiana, Oryza, Panicum, Papaver, Parthenium, Pennisetum, Petunia, Phalaris, Phleum, Pinus, Poa, Poinsettia, Populus, Rauwolfia, Ricinus, Rosa, Saccharum, Salix, Sanguinaria, Scopolia, Secale, Solanum, Sorghum, Spartina, Spinacea, Tanacetum, Taxus, Theobroma, Triticosecale, Triticum, Uniola, Veratrum, Vinca, Vitis, and Zea.

[0495] Suitable species include Panicum spp., Sorghum spp., Miscanthus spp., Saccharum spp., Erianthus spp., Populus spp., Andropogon gerardii (big bluestem), Pennisetum purpureum (elephant grass), Phalaris arundinacea (reed canarygrass), Cynodon dactylon (bermudagrass), Festuca arundinacea (tall fescue), Spartina pectinata (prairie cord-grass), Medicago sativa (alfalfa), Arundo donax (giant reed), Secale cereale (rye), Salix spp. (willow), Eucalyptus spp. (eucalyptus), Triticosecale (triticum—wheat×rye) and bamboo.

[0496] Suitable species also include Helianthus annuus (sunflower), Carthamus tinctorius (safflower), Jatropha curcas (jatropha), Ricinus communis (castor), Elaeis guineensis (palm), Linum usitatissimum (flax), and Brassica juncea.

[0497] Suitable species also include Beta vulgaris (sugarbeet), and Manihot esculenta (cassava)

[0498] Suitable species also include Lycopersicon esculentum (tomato), Lactuca sativa (lettuce), Musa paradisiaca (banana), Solanum tuberosum (potato), Brassica oleracea (broccoli, cauliflower, Brussels sprouts), Camellia sinensis (tea), Fragaria ananassa (strawberry), Theobroma cacao (cocoa), Coffea arabica (coffee), Vitis vinifera (grape), Ananas comosus (pineapple), Capsicum annum (hot & sweet pepper), Allium cepa (onion), Cucumis melo (melon), Cucumis sativus (cucumber), Cucurbita maxima (squash), Cucurbita moschata (squash), Spinacea oleracea (spinach), Citrullus lanatus (watermelon), Abelmoschus esculentus (okra), and Solanum melongena (eggplant).

[0499] Suitable species also include Papaver somniferum (opium poppy), Papaver orientale, Taxus baccata, Taxus brevifolia, Artemisia annua, Cannabis sativa, Camptotheca acuminate, Catharanthus roseus, Vinca rosea, Cinchona officinalis, Colchicum autumnale, Veratrum californica, Digitalis lanata, Digitalis purpurea, Dioscorea spp., Andrographis paniculata, Atropa belladonna, Datura stomonium, Berberis spp., Cephalotaxus spp., Ephedra sinica, Ephedra spp., Erythroxylum coca, Galanthus wornorii, Scopolia spp., Lycopodium serratum (Huperzia serrata), Lycopodium spp., Rauwolfia serpentina, Rauwolfia spp., Sanguinaria canadensis, Hyoscyamus spp., Calendula officinalis, Chrysanthemum parthenium, Coleus forskohlii, and Tanacetum parthenium.

[0500] Suitable species also include Parthenium argentatum (guayule), Hevea spp. (rubber), Mentha spicata (mint), Mentha piperita (mint), Bixa orellana, and Alstroemeria spp.

[0501] Suitable species also include Rosa spp. (rose), Dianthus caryophyllus (carnation), Petunia spp. (petunia) and Poinsettia pulcherrima (poinsettia).

[0502] Suitable species also include Nicotiana tabacum (tobacco), Lupinus albus (lupin), Uniola paniculata (oats), bentgrass (Agrostis spp.), Populus tremuloides (aspen), Pinus spp. (pine), Abies spp. (fir), Acer spp. (maple), Hordeum vulgare (barley), Poa pratensis (bluegrass), Lolium spp. (ryegrass) and Phleum pratense (timothy).

[0503] In some embodiments, a suitable species can be a wild, weedy, or cultivated Pennisetum species such as, but not limited to, Pennisetum alopecuroides, Pennisetum arnhemicum, Pennisetum caffrum, Pennisetum clandestinum, Pennisetum divisum, Pennisetum glaucum, Pennisetum latifolium, Pennisetum macrostachyum, Pennisetum macrourum, Pennisetum orientale, Pennisetum pedicellatum, Pennisetum polystachion, Pennisetum polystachion ssp. Setosum, Pennisetum purpureum, Pennisetum setaceum, Pennisetum subangustum, Pennisetum typhoides, Pennisetum villosum, or hybrids thereof (e.g., Pennisetum purpureum×Pennisetum typhoidum).

[0504] In some embodiments, a suitable species can be a wild, weedy, or cultivated Miscanthus species and/or variety such as, but not limited to, Miscanthus×giganteus, Miscanthus sinensis, Miscanthus×ogiformis, Miscanthus floridulus, Miscanthus transmorrisonensis, Miscanthus oligostachyus, Miscanthus nepalensis, Miscanthus sacchariflorus, Miscanthus×giganteus ‘Amuri’, Miscanthus×giganteus ‘Wagara’, Miscanthus×giganteus ‘Illinois’, Miscanthus sinensis var. ‘Goliath’, Miscanthus sinensis var. ‘Roland’, Miscanthus sinensis var. ‘Africa’, Miscanthus sinensis var. ‘Fern Osten’, Miscanthus sinensis var. gracillimus, Miscanthus sinensis var. variegates, Miscanthus sinensis var. purpurascens, Miscanthus sinensis var. ‘Malepartus’, Miscanthus sacchariflorus var. ‘Robusta’, Miscanthus sinensis var. ‘Silberfedher’ (aka. Silver Feather), Miscanthus transmorrisonensis, Miscanthus condensatus, Miscanthus yakushimanum, Miscanthus var. ‘Alexander’, Miscanthus var. ‘Adagio’, Miscanthus var. ‘Autumn Light’, Miscanthus var. ‘Cabaret’, Miscanthus var. ‘Condensatus’, Miscanthus var. ‘Cosmopolitan’, Miscanthus var. ‘Dixieland’, Miscanthus var. ‘Gilded Tower’ (U.S. Patent No. PP14,743), Miscanthus var. ‘Gold Bar’ (U.S. Patent No. PP15,193), Miscanthus var. ‘Gracillimus’, Miscanthus var. ‘Graziella’, Miscanthus var. ‘Grosse Fontaine’, Miscanthus var. ‘Hinjo aka Little Nicky’™, Miscanthus var. ‘Juli’, Miscanthus var. ‘Kaskade’, Miscanthus var. ‘Kirk Alexander’, Miscanthus var. ‘Kleine Fontaine’, Miscanthus var. ‘Kleine Silberspinne’ (aka. ‘Little Silver Spider’), Miscanthus var. ‘Little Kitten’, Miscanthus var. ‘Little Zebra’ (U.S. Patent No. PP13,008), Miscanthus var. ‘Lottum’, Miscanthus var. ‘Malepartus’, Miscanthus var. ‘Morning Light’, Miscanthus var. ‘Mysterious Maiden’ (U.S. Patent No. PP16,176), Miscanthus var. ‘Nippon’, Miscanthus var. ‘November Sunset’, Miscanthus var. ‘Parachute’, Miscanthus var. ‘Positano’, Miscanthus var. ‘Puenktchen’(aka ‘Little Dot’), Miscanthus var. Rigoletto', Miscanthus var. ‘Sarabande’, Miscanthus var. ‘Silberpfeil’ (aka. Silver Arrow), Miscanthus var. ‘Silverstripe’, Miscanthus var. ‘Super Stripe’ (U.S. Patent No. PP18,161), Miscanthus var. ‘Strictus’, or Miscanthus var. ‘Zebrinus’.

[0505] In some embodiments, a suitable species can be a wild, weedy, or cultivated sorghum species and/or variety such as, but not limited to, Sorghum almum, Sorghum amplum, Sorghum angustum, Sorghum arundinaceum, Sorghum bicolor (such as bicolor, guinea, caudatumi, kafir, and durra), Sorghum brachypodum, Sorghum bulbosum, Sorghum burmahicum, Sorghum controversum, Sorghum drummondii, Sorghum ecarinatum, Sorghum exstans, Sorghum grande, Sorghum halepense, Sorghum interjectum, Sorghum intrans, Sorghum laxiflorum, Sorghum leiocladum, Sorghum macrospermum, Sorghum matarankense, Sorghum miliaceum, Sorghum nigrum, Sorghum nitidum, Sorghum plumosum, Sorghum propinquum, Sorghum purpureosericeum, Sorghum stipoideum, Sorghum sudanensese, Sorghum timorense, Sorghum trichocladum, Sorghum versicolor, Sorghum virgatum, Sorghum vulgare, or hybrids such as Sorghum×almum, Sorghum×sudangrass or Sorghum×drummondii.

[0506] Thus, the methods and compositions can be used over a broad range of plant species, including species from the dicot genera Brassica, Carthamus, Glycine, Gossypium, Helianthus, Jatropha, Parthenium, Populus, and Ricinus; and the monocot genera Elaeis, Festuca, Hordeum, Lolium, Oryza, Panicum, Pennisetum, Phleum, Poa, Saccharum, Secale, Sorghum, Triticosecale, Triticum, and Zea. In some embodiments, a plant is a member of the species Panicum virgatum (switchgrass), Sorghum bicolor (sorghum, sudangrass), Miscanthus giganteus (miscanthus), Saccharum sp. (energycane), Populus balsamifera (poplar), Zea mays (corn), Glycine max (soybean), Brassica napus (canola), Triticum aestivum (wheat), Gossypium hirsutum (cotton), Oryza sativa (rice), Helianthus annuus (sunflower), Medicago sativa (alfalfa), Beta vulgaris (sugarbeet), or Pennisetum glaucum (pearl millet).

[0507] In certain embodiments, the polynucleotides and vectors described herein can be used to transform a number of monocotyledonous and dicotyledonous plants and plant cell systems, wherein such plants are hybrids of different species or varieties of a specific species (e.g., Saccharum sp.×Miscanthus sp., Sorghum sp.×Miscanthus sp., e.g., Panicum virgatum×Panicum amarum, Panicum virgatum×Panicum amarulum, and Pennisetum purpureum×Pennisetum typhoidum).

[0508] D. Transgenic Plant Phenotypes

[0509] In some embodiments, a plant in which expression of a biomass-modulating polypeptide is modulated can have increased levels of biomass in plants. For example, a biomass-modulating polypeptide described herein can be expressed in a transgenic plant, resulting in increased levels of vegetative tissue. The biomass level can be increased by at least 2 percent, e.g., 2, 3, 4, 5, 6, 7, 8, 9, 10, 11, 12, 13, 14, 15, 16, 17, 18, 19, 20, 25, 30, 35, 40, 45, 50, 55, 60, or more than 60 percent, as compared to the biomass level in a corresponding control plant that does not express the transgene. In some embodiments, a plant in which expression of a biomass-modulating polypeptide is modulated can have decreased levels of seed production. The level can be decreased by at least 2 percent, e.g., 2, 3, 4, 5, 10, 15, 20, 25, 30, 35, or more than 35 percent, as compared to the seed production level in a corresponding control plant that does not express the transgene. In some cases, an increase in the level of biomass is expressed as a fold change, e.g., the level of lignin in a transgenic plant described herein can be from about 0.20 fold to about 10-fold, about 0.50-fold to about 5-fold, or about 1-fold to about 2.3-fold higher than the level of biomass in corresponding control plants.

[0510] Increases in seed production in such plants can provide improved nutritional availability in geographic locales where intake of plant foods is often insufficient, or for biofuel production. In some embodiments, decreases in biomass in such plants can be useful in situations where vegetative tissues are not the primary plant part that is harvested for human or animal consumption (i.e., seeds are harvested).

[0511] In some embodiments, a plant in which expression of a biomass-modulating polypeptide is modulated can have increased or decreased levels of biomass in one or more plant tissues, e.g., vegetative tissues, reproductive tissues, or root tissues. For example, the biomass level can be increased by at least 2 percent, e.g., 2, 3, 4, 5, 6, 7, 8, 9, 10, 11, 12, 13, 14, 15, 16, 17, 18, 19, 20, 25, 30, 35, 40, 45, 50, 55, 60, or more than 60 percent, as compared to the biomass level in a corresponding control plant that does not express the transgene. In some embodiments, a plant in which expression of a biomass-modulating polypeptide is modulated can have decreased levels of biomass in one or more plant tissues. The biomass level can be decreased by at least 2 percent, e.g., 2, 3, 4, 5, 10, 15, 20, 25, 30, 35, or more than 35 percent, as compared to the biomass level in a corresponding control plant that does not express the transgene.

[0512] Increases in biomass in such plants can provide improved food quantity, or improved energy production. Decreases in biomass can provide more efficient partitioning of nutrients to plant part(s) that are harvested for human or animal consumption.

[0513] Typically, a difference in the amount of biomass or biomass component in a transgenic plant or cell relative to a control plant or cell is considered statistically significant at p≦0.05 with an appropriate parametric or non-parametric statistic, e.g., Chi-square test, Student's t-test, Mann-Whitney test, or F-test. In some embodiments, a difference in the amount of biomass is statistically significant at p<0.01, p<0.005, or p<0.001. A statistically significant difference in, for example, the amount of biomass in a transgenic plant compared to the amount of a control plant indicates that the recombinant nucleic acid present in the transgenic plant results in altered biomass levels or altered content of a biomass component.

[0514] The phenotype of a transgenic plant is evaluated relative to a control plant. A plant is said “not to express” a polypeptide when the plant exhibits less than 10%, e.g., less than 9%, 8%, 7%, 6%, 5%, 4%, 3%, 2%, 1%, 0.5%, 0.1%, 0.01%, or 0.001%, of the amount of polypeptide or mRNA encoding the polypeptide exhibited by the plant of interest. Expression can be evaluated using methods including, for example, RT-PCR, Northern blots, S1 RNase protection, primer extensions, Western blots, protein gel electrophoresis, immunoprecipitation, enzyme-linked immunoassays, chip assays, and mass spectrometry. It should be noted that if a polypeptide is expressed under the control of a tissue-preferential or broadly expressing promoter, expression can be evaluated in the entire plant or in a selected tissue. Similarly, if a polypeptide is expressed at a particular time, e.g., at a particular time in development or upon induction, expression can be evaluated selectively at a desired time period.

[0515] Biomass can include harvestable plant tissues such as leaves, stems, and reproductive structures, or all plant tissues such as leaves, stems, roots, and reproductive structures. In some embodiments, biomass encompasses only above ground plant parts. In some embodiments, biomass encompasses only stem plant parts. In some embodiments, biomass encompasses only above ground plant parts except inflorescence and seed parts of a plant. Biomass can be measured as described in the examples section. Biomass can be quantified as dry matter yield, which is the mass of biomass produced (usually reported in T/acre) if the contribution of water is subtracted from the fresh mater weight. Dry matter yield (DMY) yield is calculated using the fresh matter weight (FMW) and a measurement of weight percent moisture (M) in the following equation. DMY=((100−M)/100)*FMW. Biomass can be quantified as fresh matter yield, which is the mass of biomass produced (usually reported in T/acre) on an as-received basis, which includes the weight of moisture.

[0516] In some embodiments, a plant in which expression of a biomass-modulating polypeptide is modulated can have increased or decreased lignin content in one or more plant tissues, e.g., vegetative tissues, reproductive tissues, or root tissues. The lignin content can be increased by at least 2 percent, e.g., 2, 3, 4, 5, 6, 7, 8, 9, 10, 11, 12, 13, 14, 15, 16, 17, 18, 19, 20, 25, 30, 35, 40, 45, 50, 55, 60, or more than 60 percent, as compared to the lignin content in a corresponding control plant that does not express the transgene. In some embodiments, a transgenic plant can have a 5 to 100 percent, e.g., 13 to 50 percent, 11 to 100 percent, 10 to 35 percent, 5 to 25 percent, or 28 to 30 percent increase in lignin, as compared to the lignin content of a transgenic plant that does not express the transgene.

[0517] In some embodiments, a plant in which expression of a biomass-modulating polypeptide is modulated can have increased or decreased lignin content in one or more plant tissues, e.g., vegetative tissues, reproductive tissues, or root tissues. The lignin content can be increased by at least 2 percent, e.g., 2, 3, 4, 5, 6, 7, 8, 9, 10, 11, 12, 13, 14, 15, 16, 17, 18, 19, 20, 25, 30, 35, 40, 45, 50, 55, 60, or more than 60 percent, as compared to the lignin content in a corresponding control plant that does not express the transgene. In some embodiments, a transgenic plant can have a 5 to 100 percent, e.g., 13 to 50 percent, 11 to 100 percent, 10 to 35 percent, 5 to 25 percent, or 28 to 30 percent increase in lignin, as compared to the lignin content of a transgenic plant that does not express the transgene.

[0518] In some embodiments, a plant in which expression of a biomass-modulating polypeptide is modulated can have decreased lignin content. The lignin content can be decreased by at least 2 percent, e.g., 2, 3, 4, 5, 10, 15, 20, 25, 30, 35, or more than 35 percent, as compared to the seed production level in a corresponding control plant that does not express the transgene.

[0519] Provided herein also are methods for modulating (e.g., altering, increasing, or decreasing) the lignin content of a plant. Such a method can include growing a plant cell that includes a nucleic acid encoding a biomass-modulating polypeptide as described herein. In some cases, the nucleic acid can be a nucleotide sequence having 80% sequence identity to a nucleotide sequence set forth in SEQ ID NOs: 114, 283, 458, 628, 668, 692, 716, 845, 1053, 1106, 1271, 1480, 1568, 1623, 1726, 1796, 2189, 2620, or 2879. A plant cell can be from a plant capable of producing lignin.

[0520] A transgenic plant, tissue, or cell comprising a biomass-modulating sequence can have a modulated amount and/or rate of lignin biosynthesis. Plants, tissues, or cells containing a nucleic acid construct described herein typically have a difference in the amount and/or rate of synthesis of lignin, relative to a corresponding control plant, tissue, or cell that is not transformed with the nucleic acid construct.

[0521] A number of different types of lignin, based on chemical and structural features, can be produced by different species of plants, by different tissues of the same plant, or by different parts of the same plant cell. Such lignins include, without limitation, lignins comprising primarily or only coniferyl alcohols such as guaiacyl lignin, lignins comprising primarily or only sinapyl alcohols such as syringyl lignin, lignins comprising primarily or only p-coumaryl alcohols such as p-hydroxyphenyl lignin, and lignins comprising primarily or only coniferyl and sinapyl alcohols such as guaiacyl-syringyl lignin. In some cases, a transgenic plant can exhibit a difference in the ratio of syringyl lignin to guaiacyl lignin (S:G ratio). Plants with higher G content exhibit more highly condensed lignin with a preponderance of more stable, but also more recalcitrant bonds. Generally, S subunits in lignin can be chemically degraded more easily than linkages between G subunits. A transgenic plant described herein can exhibit an increase in the S:G ratio of at least about 4 percent, e.g., more than 3, 4, 5, 6, 7, 8, 9, 10, 20, 30, 40, 50, or 60 percent. In some cases, the S:G ratio of a transgenic plant is decreased relative to the S:G ratio of a wild-type control plant. For example, the S:G ratio can be decreased by at least 0.3 percent, e.g., more than 0.2, 0.3, 0.4, 0.5, 1, 5, 10, or 20 percent.

[0522] In addition, other compounds can be incorporated into lignins, including, without limitation, coniferyl/sinapyl p-coumarate, coniferyl/sinapyl p-hydroxybenzoate, coniferyl/sinapyl acetate, ferulate esters, 5-hydroxy-coniferyl alcohol, 3,4-dihydroxy-cinnamyl alcohol, feruloyl amides such as tyramine ferulate, coniferaldehyde/sinapaldehyde, vanillin/syringaldehyde, benzodioxanes, 5-hydroxyguaiacyl, and dihydroconiferyl/dihydro-p-coumaryl alcohol.

[0523] The amount and/or rate of synthesis of a type of lignin can be modulated, e.g., increased or decreased, in a transgenic plant, tissue, or cell relative to a control plant, tissue, or cell using the methods described herein. In some cases, the amounts of two or more types of lignin (e.g., two, three, four, five, six, seven, eight, nine, ten or even more types of lignin) can be independently modulated relative to a control plant, tissue, or cell.

[0524] In some embodiments, the amount of lignin is decreased in transgenic plants, tissues, or cells described herein (e.g., transgenic plants expressing a biomass-modulating polypeptide as described herein). A decrease ratio can be expressed as the ratio of the lignin in such a transgenic plant, tissue, or cell on a weight basis (e.g., fresh weight basis) as compared to the lignin in a corresponding control plant, tissue, or cell (e.g., a corresponding plant, tissue, or cell that lacks the nucleic acid encoding the biomass-modulating polypeptide). The decrease ratio can be from about 0.05 to about 0.90. In certain cases, the ratio can be from about 0.2 to about 0.6, or from about 0.4 to about 0.6, or from about 0.3 to about 0.5, or from about 0.2 to about 0.4.

[0525] In some cases, a decrease in the amount of lignin in a transgenic plant described herein can be calculated as a percent decrease in the weight of lignin extracted per weight of tissue of the transgenic plant relative to the weight of lignin extracted per weight of tissue of a corresponding control plant. For example, the amount of lignin in a tissue of a transgenic plant provided herein can be decreased by about 5% to about 100% relative to the amount of lignin in a tissue of a corresponding control plant.

[0526] In some embodiments, the amount of lignin in a transgenic plant as described herein can be decreased by about 0.45% to about 100%, or about 10% to about 70%, or about 20% to about 68%, or about 50% to about 66%, or about 53% to about 66%, or about 55% to about 65%, or about 57% to about 71%, or about 50% to about 70%, or about 55% to about 60%, or about 60% to about 65% relative to the amount of lignin in corresponding control plants.

[0527] The decrease in the amount of lignin can be restricted in some embodiments to particular tissues and/or organs, relative to other tissues and/or organs. For example, a transgenic plant can have a decreased amount of lignin in stem tissue relative to leaf tissue. The decreased amount of lignin can be in the cell wall of plant cells such as tracheids, xylem fibres, and sclereids.

[0528] An increase in the amount of lignin in a transgenic plant, tissue, or cell described herein can be from about 1.02-fold to about 10-fold, about 1.03-fold to about 1.7-fold, or about 1.04-fold to about 1.6-fold, or about 1.05-fold to about 1.7-fold, or about 1.06-fold to about 2.3-fold, or about 1.07-fold to about 2.5-fold, or about 1.08-fold to about 2-fold, or about 1.09-fold to about 2.4-fold, or about 1.1-fold to about 2-fold, or about 1.2-fold to about 3-fold, or about 1.3-fold to about 2.5-fold, or about 1.4-fold to about 3-fold, or about 1.5-fold to about 5-fold, or about 2-fold to about 6-fold, or about 2-fold to about 5-fold, or about 1.5-fold to 7-fold, or about 3-fold to about 4-fold, or about 3-fold to about 7.5-fold, or about 4-fold to about 8-fold, or about 5-fold to about 10-fold higher than the amount in corresponding control plants, tissues, or cells.

[0529] In some cases, an increase in the amount of lignin in a transgenic plant described herein can be calculated as a percent increase in the amount of lignin detected per weight of tissue of the transgenic plant relative to the weight of lignin extracted per weight of tissue of a corresponding control plant. For example, the amount of lignin in a tissue of a transgenic plant provided herein can be increased by about 0.10% to about 10%, or about 5% to about 15%, or about 20% to about 50%, or about 25% to about 40%, or about 30% to about 60%, or about 50% to about 75%, or about 75% to about 100%, or about 90% to about 150%, or about 50% to about 200%, or about 100% to about 300%, or about 150% to about 500%, or about 200 to about 600%, or about 300% to about 800% relative to the amount of lignin in a tissue of a corresponding control plant.

[0530] In some embodiments, the lignin that is increased in a tissue of a transgenic plant described herein is either not produced by or is not detectable in a corresponding tissue of a control plant. Thus, in such embodiments, the increase in lignin is infinitely high. For example, in certain cases, a biomass-modulating polypeptide described herein may activate a biosynthetic pathway in a plant tissue that is not normally activated or operational in a control plant tissue and one or more new types of lignin that were not previously produced in that plant tissue can be produced.

[0531] The increase in amount of lignin can be restricted in some embodiments to particular tissues and/or organs, relative to other tissues and/or organs. For example, a transgenic plant can have an increased amount of lignin in stem tissue relative to leaf tissue. The increased amount of lignin can be in the cell wall of plant cells such as tracheids, xylem fibers, and sclereids.

[0532] The amount of lignin in a plant can be determined by known techniques, e.g., the acid detergent, Klason, acetyl bromide, and permanganate lignin methods. See, for example, Hatfield and Fukushima, Crop Sci., 45:832-839 (2005); and Methods in Lignin Chemistry, Dence and Lin, eds., Springer-Verlag, Berlin, p. 33-61 (1992). Pyrolysis-gas chromatography-mass spectrometry, liquid chromatography-mass spectrometry (LC-MS), or a degradative method, e.g., the DFRC method or thioacidolysis, combined with mass spectrometry also can be used. If desired, the composition and structure of lignin can be characterized by GC-MS, LC-MS, nuclear magnetic resonance spectroscopy, Fourier-transform infrared spectroscopy, and/or other known techniques. In addition, histochemical analysis can be performed to determine the amount and distribution of lignin in a plant. For example, tissue sections can be stained with toluidine blue O (TBO), the Wiesner reagent, or the Mäule reagent. TBO is a metachromatic stain that imparts a turquoise color to lignified cell walls and stains non-lignified cell walls purple. Phloroglucinol stains lignified cells red upon reaction with hydroxycinnamaldehyde groups present in the polymer. The Mäule reagent is a histochemical stain that allows syringyl lignin to be distinguished chromogenically from guaiacyl lignin in situ. A pink or red color can indicate the presence of syringyl units, whereas a light to dark brown

[0533] Also provided are methods for modulating the glucan content of a plant. Such a method can include growing a plant cell that includes a nucleic acid encoding a biomass-modulating polypeptide as described herein. In some cases, a biomass-modulating peptide is selected from the group consisting of SEQ ID NOs: 668, 1053, 1116, 1271, 1426, 2653, or 2707, and functional homologs thereof. The glucan content of a transgenic plant can be decreased relative to a control plant. An decrease in the amount of glucan in a transgenic plant, tissue, or cell described herein can be from about 7 percent to about 20 percent, e.g., from more than 6, 7, 8, 9, 10, 11, 12, 13, 14, 15, 16, 17, 18, 19 or 20 percent, as compared to the amount of glucan present in a corresponding control plant, tissue or cell. In some cases, the glucan content of a transgenic plant can be increased relative to a control plant. An increase in the amount of glucan in a transgenic plant, tissue, or cell described herein can be from about 0.40 percent to about 55 percent, e.g., more than 0.35, 0.40, 0.50, 0.75, 1, 5, 10, 15, 20, 25, 30, 35, 40, 45, 50, or 55 percent, as compared to the amount of glucan present in a corresponding control plant, tissue or cell. Glucan content can be determined directly or indirectly. For example, a direct measurement of glucan content can be performed using ASTM methods E1758-01 Determination of Biomass Sugars by High Performance Liquid Chromatography. Glucan content can be predicted using an appropriate NIR model. See, e.g., WO 2009-059176.

[0534] Also provided are methods for decreasing the ash content of a plant. Such a method can include growing a plant cell that includes a nucleic acid encoding a biomass-modulating polypeptide as described herein. Ash content can be decreased by about 4 percent to about 25 percent, e.g., more than 4, 5, 8, 10, 12, 15, 18, or 23 percent. In some embodiments, a biomass modulating sequence is in an antisense orientation relative to the regulatory region. In some cases, a biomass-modulating sequence is transcribed into an interfering RNA. For example, the nucleotide sequence set forth in SEQ ID NO:2914 (corresponding to nucleic acid residues 22 to 325 of SEQ ID NO:877) or SEQ ID NO:2925 (corresponding to the DNA complement of nucleic acid residues 23 to 412 of SEQ ID NO:2916) comprise a suitable RNAi construct. Ash content can be determined using, for example, ASTM Method E1755-01 or a NIR composition model. See, e.g., WO 2009-059176. The ash content for samples that are selected using the NIR model can be confirmed directly using ASTM Method E1755-01. Typically, the amount of moisture present in the biomass sample is determined first using an appropriate moisture analyzer, e.g., Denver IR120 Moisture Analyzer. See ASTM E1756-08 “Standard Test Method for Determination of Total Solids in Biomass” ASTM International, West Conshohocken, Pa., DOI: 10.1520/E1755-01R07 be used to determine moisture content.

### V. Modifying Endogenous Nucleic Acids Encoding Biomass-Modulating Polypeptides

[0535] This document also features plant cells and plants in which an endogenous biomass-modulating nucleic acid described herein has been modified (e.g., a regulatory region, intron, or coding region of the biomass-modulating nucleic acid has been modified). The biomass of such plants is altered relative to the corresponding level of a control plant in which the endogenous nucleic acid is not modified. Such plants are referred to herein as modified plants and may be used to produce, for example, increased amounts of biomass.

[0536] Endogenous nucleic acid can be modified by homologous recombination techniques. For example, sequence specific endonucleases (e.g., zinc finger nucleases (ZFNs)) and meganucleases can be used to stimulate homologous recombination at endogenous plant genes. See, e.g., Townsend et al., Nature 459:442-445 (2009); Tovkach et al., Plant J., 57:747-757 (2009); and Lloyd et al., Proc. Natl. Acad. Sci. USA, 102:2232-2237 (2005). In particular, ZFNs engineered to create DNA double strand breaks at specific loci can be used to make targeted sequence changes in endogenous plant genes. For example, an endogenous plant gene can be replaced with a variant containing one or more mutations (e.g., produced using site-directed mutagenesis or directed evolution).

[0537] In some embodiments, endogenous nucleic acids can be modified by methylation or demethylation such that the expression of the modified endogenous nucleic acid is altered. For example, a double stranded RNA can be used to activate gene expression by targeting noncoding regulatory regions in gene promoters. See Shibuya et al., Proc Natl Acad Sci USA, 106(5): 1660-1665 (2009); and Li et al., Proc Natl Acad Sci USA, 103(46):17337-42 (2006).

[0538] In some embodiments, endogenous nucleic acids can be modified using activation tagging. For example, a vector containing multiple copies of an enhancer element from the constitutively active promoter of the cauliflower mosaic virus (CaMV) 35S gene can be used to activate an endogenous gene. See, Weigel et al., Plant Physiology, 122:1003-1013 (2000).

[0539] In some embodiments, endogenous nucleic acids can be modified by introducing an engineered transcription activation/repression factor (e.g., zinc finger protein transcription factor, or ZFP TF). See, for example, the world wide web at sangamo.com/tech/tech_plat_over.html#whatarezfp. An engineered transcription activation/repression factor (such as ZFP TF) can activate, repress, or switch the target endogenous biomass gene expression by binding specifically to the promoter region or coding region of the endogenous gene.

[0540] In some embodiments, endogenous nucleic acids can be modified by mutagenesis. Genetic mutations can be introduced within regenerable plant tissue using one or more mutagenic agents. Suitable mutagenic agents include, for example, ethyl methane sulfonate (EMS), N-nitroso-N-ethylurea (ENU), methyl N-nitrosoguanidine (MNNG), ethidium bromide, diepoxybutane, ionizing radiation, x-rays, UV rays and other mutagens known in the art. Suitable types of mutations include, for example, insertions or deletions of nucleotides, and transitions or transversions in the endogenous nucleic acid sequence. In one embodiment, TILLING (Targeted Induced Local Lesions In Genomes) can be used to produce plants having a modified endogenous nucleic acid. TILLING combines high-density mutagenesis with high-throughput screening methods. See, for example, McCallum et al., Nat Biotechnol 18: 455-457 (2000); reviewed by Stemple, Nat Rev Genet. 5(2):145-50 (2004).

[0541] In some embodiments, an endogenous nucleic acid can be modified via a gene silencing technique. See, for example, the section herein regarding “Inhibition of Expression of a Biomass-Modulating Polypeptide.”

[0542] A population of plants can be screened and/or selected for those members of the population that have a modified nucleic acid. A population of plants also can be screened and/or selected for those members of the population that have a trait or phenotype conferred by expression of the modified nucleic acid. As an alternative, a population of plants can be screened for those plants having a desired trait, such as a modulated level of biomass. For example, a population of progeny can be screened for those plants having a desired level of expression of a biomass-modulating polypeptide or nucleic acid. Physical and biochemical methods can be used to identify modified nucleic acids and/or expression levels as described with transgenic plants. Selection and/or screening can be carried out over one or more generations, and/or in more than one geographic location. In some cases, plants can be grown and selected under conditions which induce a desired phenotype or are otherwise necessary to produce a desired phenotype in a modified plant. In addition, selection and/or screening can be applied during a particular developmental stage in which the phenotype is expected to be exhibited by the plant. Selection and/or screening can be carried out to choose those modified plants having a statistically significant difference in a biomass level relative to a control plant in which the nucleic acid has not been modified. Selected or screened modified plants have an altered phenotype as compared to a corresponding control plant, as described in the “Transgenic Plant Phenotypes” section herein.

[0543] Although a plant or plant cell in which an endogenous biomass-modulating nucleic acid has been modified is not transgenic for that particular nucleic acid, it will be appreciated that such a plant or cell may contain transgenes. For example, a modified plant can contain a transgene for other traits, such as herbicide tolerance or insect resistance. As another example, a modified plant can contain one or more transgenes that, in conjunction with modifications of one or more endogenous nucleic acids, exhibits an increase in biomass.

[0544] As with transgenic plant cells, modified plant cells can constitute part or all of a whole plant. Such plants can be grown in the same manner as described for transgenic plants and can be bred or propagated in the same manner as described for transgenic plants.

### VI. Plant Breeding

[0545] Genetic polymorphisms that are useful in such methods include simple sequence repeats (SSRs, or microsatellites), rapid amplification of polymorphic DNA (RAPDs), single nucleotide polymorphisms (SNPs), amplified fragment length polymorphisms (AFLPs) and restriction fragment length polymorphisms (RFLPs). SSR polymorphisms can be identified, for example, by making sequence specific probes and amplifying template DNA from individuals in the population of interest by PCR. For example, PCR techniques can be used to enzymatically amplify a genetic marker associated with a nucleotide sequence conferring a specific trait (e.g., nucleotide sequences described herein). PCR can be used to amplify specific sequences from DNA as well as RNA, including sequences from total genomic DNA or total cellular RNA. When using RNA as a source of template, reverse transcriptase can be used to synthesize complementary DNA (cDNA) strands. Various PCR methods are described, for example, in PCR Primer: A Laboratory Manual, Dieffenbach and Dveksler, eds., Cold Spring Harbor Laboratory Press, 1995.

[0546] Generally, sequence information from polynucleotides flanking the region of interest or beyond is employed to design oligonucleotide primers that are identical or similar in sequence to opposite strands of the template to be amplified. Primers are typically 14 to 40 nucleotides in length, but can range from 10 nucleotides to hundreds of nucleotides in length. Template and amplified DNA is repeatedly denatured at a high temperature to separate the double strand, then cooled to allow annealing of primers and the extension of nucleotide sequences through the microsatellite, resulting in sufficient DNA for detection of PCR products. If the probes flank an SSR in the population, PCR products of different sizes will be produced. See, e.g., U.S. Pat. No. 5,766,847.

[0547] PCR products can be qualitative or quantitatively analyzed using several techniques. For example, PCR products can be stained with a fluorescent molecule (e.g., PicoGreen® or OliGreen®) and detected in solution using spectrophotometry or capillary electrophoresis. In some cases, PCR products can be separated in a gel matrix (e.g., agarose or polyacrylamide) by electrophoresis, and size-fractionated bands comprising PCR products can be visualized using nucleic acid stains. Suitable stains can fluoresce under UV light (e.g., Ethidium bromide, GR Safe, SYBR® Green, or SYBR® Gold). The results can be visualized via transillumination or epi-illumination, and an image of the fluorescent pattern can be acquired using a camera or scanner, for example. The image can be processed and analyzed using specialized software (e.g., ImageJ) to measure and compare the intensity of a band of interest against a standard loaded on the same gel.

[0548] Alternatively, SSR polymorphisms can be identified by using PCR product(s) as a probe against Southern blots from different individuals in the population. See, U. H. Refseth et al., (1997) Electrophoresis 18: 1519. Briefly, PCR products are separated by length through gel electrophoresis and transferred to a membrane. SSR-specific DNA probes, such as oligonucleotides labeled with radioactive, fluorescent, or chromogenic molecules, are applied to the membrane and hybridize to bound PCR products with a complementary nucleotide sequence. The pattern of hybridization can be visualized by autoradiography or by development of color on the membrane, for example.

[0549] In some cases, PCR products can be quantified using a real-time thermocycler detection system. For example, Quantitative real-time PCR can use a fluorescent dye that forms a DNA-dye-complex (e.g., SYBR® Green), or a fluorophore-containing DNA probe, such as single-stranded oligonucleotides covalently bound to a fluorescent reporter or fluorophore (e.g. 6-carboxyfluorescein or tetrachlorofluorescin) and quencher (e.g., tetramethylrhodamine or dihydrocyclopyrroloindole tripeptide minor groove binder). The fluorescent signal allows detection of the amplified product in real time, thereby indicating the presence of a sequence of interest, and allowing quantification of the copy number of a sequence of interest in cellular DNA or expression level of a sequence of interest from cellular mRNA.

[0550] The identification of RFLPs is discussed, for example, in Alonso-Blanco et al. (Methods in Molecular Biology, vol. 82, “Arabidopsis Protocols”, pp. 137-146, J. M. Martinez-Zapater and J. Salinas, eds., c. 1998 by Humana Press, Totowa, N.J.); Burr (“Mapping Genes with Recombinant Inbreds”, pp. 249-254, in Freeling, M. and V. Walbot (Ed.), The Maize Handbook, c. 1994 by Springer-Verlag New York, Inc.: New York, N.Y., USA; Berlin Germany; Burr et al. Genetics (1998) 118: 519; and Gardiner, J. et al., (1993) Genetics 134: 917). For example, to produce a RFLP library enriched with single- or low-copy expressed sequences, total DNA can be digested with a methylation-sensitive enzyme (e.g., PstI). The digested DNA can be separated by size on a preparative gel. Polynucleotide fragments (500 to 2000 bp) can be excised, eluted and cloned into a plasmid vector (e.g., pUC18). Southern blots of plasmid digests can be probed with total sheared DNA to select clones that hybridize to single- and low-copy sequences. Additional restriction endonucleases can be tested to increase the number of polymorphisms detected.

[0551] The identification of AFLPs is discussed, for example, in EP 0 534 858 and U.S. Pat. No. 5,878,215. In general, total cellular DNA is digested with one or more restriction enzymes. Restriction halfsite-specific adapters are ligated to all restriction fragments and the fragments are selectively amplified with two PCR primers that have corresponding adaptor and restriction site specific sequences. The PCR products can be visualized after size-fractionation, as described above.

[0552] In some embodiments, the methods are directed to breeding a plant line. Such methods use genetic polymorphisms identified as described above in a marker assisted breeding program to facilitate the development of lines that have a desired alteration in the biomass trait. Once a suitable genetic polymorphism is identified as being associated with variation for the trait, one or more individual plants are identified that possess the polymorphic allele correlated with the desired variation. Those plants are then used in a breeding program to combine the polymorphic allele with a plurality of other alleles at other loci that are correlated with the desired variation. Techniques suitable for use in a plant breeding program are known in the art and include, without limitation, backcrossing, mass selection, pedigree breeding, bulk selection, crossing to another population and recurrent selection. These techniques can be used alone or in combination with one or more other techniques in a breeding program. Thus, each identified plants is selfed or crossed a different plant to produce seed which is then germinated to form progeny plants. At least one such progeny plant is then selfed or crossed with a different plant to form a subsequent progeny generation. The breeding program can repeat the steps of selfing or outcrossing for an additional 0 to 5 generations as appropriate in order to achieve the desired uniformity and stability in the resulting plant line, which retains the polymorphic allele. In most breeding programs, analysis for the particular polymorphic allele will be carried out in each generation, although analysis can be carried out in alternate generations if desired.

[0553] In some cases, selection for other useful traits is also carried out, e.g., selection for fungal resistance or bacterial resistance. Selection for such other traits can be carried out before, during or after identification of individual plants that possess the desired polymorphic allele.

### VII. Articles of Manufacture

[0554] Transgenic plants and modified plants provided herein have various uses in the agricultural and energy production industries. For example, transgenic plants and modified plants described herein can be used to make animal feed and food products. Such plants, however, are often particularly useful as a feedstock for energy production.

[0555] Transgenic plants and modified plants described herein often produce higher yields of grain and/or biomass per hectare, relative to control plants that lack the exogenous nucleic acid. In some embodiments, such plants provide equivalent or even increased yields of grain and/or biomass per hectare relative to control plants when grown under conditions of reduced inputs such as fertilizer and/or water. Thus, such transgenic and modified plants can be used to provide yield stability at a lower input cost and/or under environmentally stressful conditions such as drought. In some embodiments, plants described herein have a composition that permits more efficient processing into free sugars, and subsequently ethanol, for energy production. In some embodiments, such plants provide higher yields of ethanol, butanol, dimethyl ether, other biofuel molecules, and/or sugar-derived co-products per kilogram of plant material, relative to control plants. Such processing efficiencies are believed to be derived from the composition of the plant material, including, but not limited to, content of glucan, cellulose, hemicellulose, and lignin. By providing higher biomass yields at an equivalent or even decreased cost of production, the transgenic and modified plants described herein improve profitability for farmers and processors as well as decrease costs to consumers.

[0556] Seeds from plants described herein can be conditioned and bagged in packaging material by means known in the art to form an article of manufacture. Packaging material such as paper and cloth are well known in the art. A package of seed can have a label, e.g., a tag or label secured to the packaging material, a label printed on the packaging material, or a label inserted within the package, that describes the nature of the seeds therein.

[0557] The invention will be further described in the following examples, which do not limit the scope of the invention described in the claims.

### VIII. Examples

### Example 1

### Transgenic Switchgrass Exhibiting Decreased Ash Content

[0558] The T-DNA binary vectors containing an RNAi construct comprising SEQ ID NO:2914 or an RNAi construct comprising SEQ ID NO:2925 under the control of a PD3141 promoter (WO/2009/099899) were introduced into switchgrass by Agrobacterium-mediated transformation essentially as described in Richards et al., Plant Cell. Rep. 20:48-54 (2001) and Somleva et al., Crop Sci. 42:2080-2087 (2002). The nucleotide sequence set forth in SEQ ID NO:2914 corresponds to nucleic acid residues 22 to 325 of SEQ ID NO:877. The nucleotide sequence set forth in SEQ ID NO:2925 corresponds to the DNA complement of nucleic acid residues 23 to 412 of SEQ ID NO:2916. Plants from at least two independent events from each transformation were selected for further study; these events were referred to as switchgrass screening lines. The presence of each construct was confirmed by PCR.

[0559] The ash content of transgenic switchgrass lines was predicted using an NIR composition model for switchgrass. Aerial tissues (leaves and stems) were collected from T₀ plants 2 months after the transformants were transplanted into soil in the greenhouse. NIR spectral data were collected from dried, milled samples and entered into the NIR model. The predicted ash content of each transgenic line was compared to that of non-transgenic wild-type control plants. The percent ash content was also determined using a method that was substantially similar to the method described in ASTM E1755-01, “Standard Test Method for Ash in Biomass,” ASTM International, West Conshohocken, Pa., DOI: 10.1520/E1755-01R07. The results for wild-type and transgenic switchgrass lines are presented in Table 1.

TABLE 1

| | NIR Model | | ASTM E1755 | | |
|---|---|---|---|---|---|
| | | % Change | | | % Change |
| | | (relative to | | | (relative to |
| | | lowest | | | lowest |
| Plant Line | % Ash | WT value) | % Ash | STDev | WT value) |
| Pv00379-01 | 1.1 | −18.52 | 9.53 | 0.13 | −4.39 |
| Pv00379-02 | 0.83 | −38.52 | 9.21 | 0.01 | −7.56 |
| Pv00379-03 | 2.08 | 54.07 | 11.07 | 0.02 | 11.10 |
| Pv00379-04 | 0.91 | −32.59 | 9.43 | 0.09 | −5.40 |
| Pv00379-05 | 1.42 | 5.19 | 8.70 | 0.02 | −12.67 |
| Pv00379-06 | 0.99 | −26.67 | 8.25 | 0.01 | −17.25 |
| Pv00379-07 | 1.49 | 10.37 | 8.69 | 0.01 | −12.79 |
| Pv00379-08 | 0.57 | −57.78 | 8.87 | 0.05 | −11.05 |
| Pv00379-Ave | 1.17 | −13.06 | −9.22 | N/A | −7.51 |
| Pv00380-01 | 2.76 | 104.44 | 11.33 | 0.01 | 13.66 |
| Pv00380-02 | 2.87 | 112.59 | 10.75 | 0.01 | 7.81 |
| Pv00380-03 | 1.62 | 20.00 | 8.52 | 0.07 | −14.53 |
| Pv00380-04 | 2.38 | 76.30 | 8.92 | 0.10 | −10.52 |
| Pv00380-05 | 1.27 | −5.93 | 8.10 | 0.05 | −18.75 |
| Pv00380-06 | 2.2 | 62.96 | 7.63 | 0.02 | −23.40 |
| Pv00380-08 | 2.13 | 57.78 | 8.50 | 0.01 | −14.67 |
| Pv00380-09 | 0.89 | −34.07 | 8.84 | 0.06 | −11.31 |
| Pv00380-Ave | 2.02 | 49.26 | 9.07 | N/A | −8.96 |
| Pv-WT (A26)-21 | 1.35 | 0.00 | 10.73 | 0.13 | 7.65 |
| Pv-WT (A26)-22 | 2.34 | 73.33 | 10.48 | 0.01 | 5.12 |
| Pv-WT (A26)-23 | 1.97 | 45.93 | 11.70 | 0.02 | 17.41 |
| Pv-WT (A26)-24 | 3.4 | 151.85 | 12.51 | 0.12 | 25.56 |
| Pv-WT (A26)-25 | 1.74 | 28.89 | 10.74 | 0.05 | 7.79 |
| Pv-WT (A26)-26 | 2.34 | 73.33 | 9.97 | 0.02 | 0.00 |
| Pv-WT (A26)-27 | 1.44 | 6.67 | 10.25 | 0.04 | 2.79 |
| Pv-WT Ave | 2.08 | 54.29 | 10.91 | N/A | 9.47 |

[0560] These results indicate that the ash content of a transgenic plant as determined by ASTM E1755 can be decreased by about 4 percent to about 23 percent relative to the lowest value obtained for a wild-type control plant.

### Example 2

### Transgenic Arabidopsis Plants

[0561] The following is a list of nucleic acids that were isolated from Arabidopsis thaliana plants: CeresAnnot:831967 (SEQ ID NO:2879), CeresAnnot:837136 (SEQ ID NO:309), CeresClone:5055 (SEQ ID NO:402), CeresClone:14432 (SEQ ID NO:668), CeresAnnot:860791 (SEQ ID NO:2324), and CeresClone:21240 (SEQ ID NO:1796). The following nucleic acids were isolated from Panicum virgatum plants: CeresClone:1724846 (SEQ ID NO:834), CeresClone:1727475 (SEQ ID NO:335), CeresClone:1769660 (SEQ ID NO:1660), CeresClone:1775942 (SEQ ID NO:1137), CeresClone:1788006 (SEQ ID NO 1946), CeresClone:1801750 (SEQ ID NO:211), CeresClone:1806608 (SEQ ID NO:2544), CeresClone:1815770 (SEQ ID NO:2437), CeresClone:1817100 (SEQ ID NO:2090), CeresClone:1830065 (SEQ ID NO:2028), CeresClone:1821162 (SEQ ID NO:2323), CeresClone: 1797459 (SEQ ID NO:2619), CeresClone:1902646 (SEQ ID NO:501), CeresClone:1724055 (SEQ ID NO:1517), CeresClone:1724569 (SEQ ID NO:1623), CeresClone:1724782 (SEQ ID NO:1886), CeresClone:1725400 (SEQ ID NO:1317), CeresClone:1726076 (SEQ ID NO:458), CeresClone:1727628 (SEQ ID NO:845), CeresClone:1760764 (SEQ ID NO:1425), CeresClone:1763298 (SEQ ID NO:2524), CeresClone:1764605 (SEQ ID NO:1271), CeresClone:1773290 (SEQ ID NO:2653), CeresClone:1777248 (SEQ ID NO:2465), CeresClone:1781320 (SEQ ID NO:1106), CeresClone:1788124 (SEQ ID NO:1053), CeresClone:1788820 (SEQ ID NO:114), CeresClone:1789564 (SEQ ID NO:2707), CeresClone:1789593 (SEQ ID NO:1480), CeresClone:1790340 (SEQ ID NO:2747), CeresClone:1792586 (SEQ ID NO:1726), CeresClone:1794784 (SEQ ID NO:2145), CeresClone:1824159 (SEQ ID NO:1), CeresClone:1900097 (SEQ ID NO:1568), CeresClone:1955550 (SEQ ID NO:2189), CeresClone:1955766 (SEQ ID NO:748), CeresClone:1816881 (SEQ ID NO:1319), CeresClone:1888614 (SEQ ID NO:1116), CeresClone:1786326 (SEQ ID NO:2820), CeresClone:2010191 (SEQ ID NO:78), CeresClone:1809393 (SEQ ID NO:2598), CeresClone:1804242 (SEQ ID NO:628), and CeresClone:2014404 (SEQ ID NO:283). CeresClone:691319 (SEQ ID NO:692) was isolated from Glycine max plants. CeresClone:570057 (SEQ ID NO:716) was isolated from Triticum aestivum plants. CeresClone:1224770 (SEQ ID NO:2926) was isolated from Oryza sativa. CeresClone:240112 (SEQ ID NO:2620) was isolated from Zea mays plants.

[0562] Each isolated nucleic acid described above was cloned into a binary or cointegration Ti plasmid vector containing a selectable marker conferring resistance to Finale®. The nucleic acid was operably linked to a 35S promoter. Each vector was introduced into Arabidopsis ecotype Wassilewskija (WS) via Agrobacterium-mediated transformation using the floral dip method essentially as described in Bechtold, N. et al., C. R. Acad. Sci. Paris, 316:1194-1199 (1993). The presence of each construct was verified by PCR. At least two independent events from each transformation were selected for further study. T₀ plants are plants from transformed tissue culture. T₁ plants are first generation progeny of self-pollinated T₀ plants. T₂ plants are second generation progeny of self-pollinated T₁ plants.

### Example 3

### Transgenic Plants Exhibiting Increased Biomass

[0563] Biomass samples were collected and processed to determine the dry matter yield of transgenic plants. T₂ seeds from several transformation events of Arabidopsis were sown in a soil mixture composed of 60% Sunshine Mix and 40% medium-size vermiculite. Two lines were used as controls: (1) untransformed wild-type Arabidopsis and (2) wild-type transformed with construct Bin4-Ec6-Luc::NMCH-Luc, which contains a sequence conferring Finale® resistance, a Ec6 promoter to drive expression of a luciferase polypeptide, and a NMCH promoter to drive expression of a second luciferase polypeptide.

[0564] The sown seeds were vernalized for at least 3 days at 4° C. then transferred to either a greenhouse or a walk-in growth chamber for germination and growth. About one week post-germination, the experimental plants and the transgenic control were sprayed with Finale® to select for herbicide-resistant transgenic plants. Each pot was thinned-out by randomly removing seedlings to reduce the density of seedlings per pot to at least 10. Plants were allowed to grow until senescence.

[0565] Vegetative tissue (stems and undropped leaves) from ten senesced plants of each event were collected in a pre-labeled envelope and dried in a 42° C. oven overnight. Reproductive structures (siliques and seeeds) from senesced plants of each event were collected separately. After cooling, each sample of vegetative tissue was milled, processed for composition analysis, and weighed to obtain the dry matter yield for each event. The dry matter yield for plants of each transgenic event were compared to the corresponding value for control lines. The fold increase in dry matter yield relative to the control is presented in Table 2.

TABLE 2

| | | Dry Matter |
|---|---|---|
| | | Yield |
| Clone ID | Plant Line | (Fold Increase) |
| 1727475 | ME28945-01 | 1.40 |
| | ME28945-02 | 1.09 |
| | ME28945-03 | 1.36 |
| | ME28945-04 | 1.27 |
| | ME28945-05 | 1.19 |
| | ME28945-06 | 1.30 |
| 1788006 | ME29122-01 | 1.35 |
| | ME29122-02 | 1.24 |
| | ME29122-03 | 0.93 |
| | ME29122-04 | 0.97 |
| | ME29122-06 | 1.08 |
| 1806608 | ME29754-01 | 1.05 |
| | ME29754-02 | 0.87 |
| | ME29754-03 | 1.44 |
| | ME29754-04 | 1.48 |
| | ME29754-05 | 0.99 |
| | ME29754-06 | 1.34 |
| 1815770 | ME30349-01 | 2.15 |
| | ME30349-02 | 1.90 |
| | ME30349-03 | 2.74 |
| | ME30349-04 | 2.84 |
| | ME30349-05 | 2.72 |
| | ME30349-06 | 2.03 |
| 1775942 | ME30870-01 | 1.11 |
| | ME30870-02 | 0.98 |
| | ME30870-03 | 1.64 |
| | ME30870-04 | 1.12 |
| | ME30870-05 | 1.25 |
| | ME30870-06 | 1.57 |
| 1797459 | ME30884-01 | 1.08 |
| | ME30884-02 | 1.46 |
| | ME30884-04 | 1.29 |
| | ME30884-05 | 1.23 |
| 1821162 | ME31038-01 | 1.73 |
| | ME31038-02 | 1.45 |
| | ME31038-03 | 1.92 |
| | ME31038-04 | 2.10 |
| | ME31038-05 | 1.69 |
| 1769660 | ME27077-01 | 1.21 |
| | ME27077-02 | 1.33 |
| | ME27077-03 | 0.91 |
| | ME27077-04 | 1.21 |
| 1830065 | ME27681-01 | 1.16 |
| | ME27681-02 | 1.88 |
| | ME27681-03 | 1.23 |
| | ME27681-04 | 1.10 |
| | ME27681-05 | 1.20 |
| | ME27681-06 | 1.42 |
| 1790811 | ME27772-01 | 1.41 |
| | ME27772-02 | 1.01 |
| | ME27772-03 | 1.81 |
| | ME27772-05 | 1.60 |
| | ME27772-06 | 1.59 |
| 1724846 | ME29252-01 | 1.38 |
| | ME29252-02 | 1.03 |
| | ME29252-03 | 1.02 |
| | ME29252-05 | 1.33 |
| | ME29252-06 | 2.05 |
| 1817100 | ME29128-01 | 2.29 |
| | ME29128-02 | 2.55 |
| | ME29128-03 | 2.21 |
| | ME29128-04 | 2.08 |
| | ME29128-05 | 2.23 |
| | ME29128-06 | 2.89 |
| 1902646 | ME29277-01 | 5.48 |
| | ME29277-03 | 1.42 |
| | ME29277-04 | 1.99 |
| | ME29277-06 | 1.60 |
| 1801750 | ME26544-01 | 0.77 |
| | ME26544-02 | 0.66 |
| | ME26544-03 | 0.65 |
| | ME26544-04-99 | 1.21 |
| | ME26544-05 | 1.19 |
| | ME26544-06 | 1.19 |

[0566] These results indicate that the dry matter yield of a transgenic plant can be modulated relative to a control plant. As indicated above, the dry matter yield of a transgenic plant can be increased about 1.2 to about 5 fold, relative to a wild-type control plant.

### Example 4

### Transgenic Plants Exhibiting Increased Lignin

### NIR Model

[0567] Predicted lignin content of transgenic Arabidopsis thaliana lines was determined using a NIR composition model developed as described in WO2009/059176. Samples of biomass (typically at least 20 g dry weight) consisting of dried above-ground parts were collected from 10 to 12 T₂ plants at senescence. Samples were prepared for compositional analysis as described in “Preparation of Samples for Compositional Analysis,” September 2005, by the US Dept. of Energy National Renewable Energy Laboratory, which is substantially similar to ASTM method E1757-01. Briefly, samples were dried to a moisture content of 10% or less, either at room temperature or in a forced air oven set at or below 45° C. After drying, samples were milled in a standard laboratory knife mill to pass a 2 mm screen.

[0568] Near infrared spectral data were acquired from prepared samples using a Bruker Optics MPA™ FT-NIR spectrometer (Bruker Optics, Ettlingen, Germany), running Opus 5.5 software essentially according to the manufacturer's protocols. An integrating sphere with a rotating sample cup assembly was used to obtain spectra of samples. A standard lead-sulfide detector array was used to monitor NIR light from 12,800-5,800 cm-1. A Blackman-Harris 3-term apodization function was selected with a zero filling factor of 2. The Bruker instrument has a maximum resolution of 2 cm-1. To minimize the effect of water in the biomass spectra, each sample was air dried to less than 10% moisture prior to NIR analysis. Spectral information was collected from 12,500 cm-1 to 3600 cm-1 with a resolution of 8 cm⁻¹, and entered into the NIR model. The predicted lignin content of the transgenic line was compared to the predicted lignin content of the non-transgenic wild-type plants. The percent change in lignin (NIR) is presented in Table 3.

### Pyrolysis GC-MS Method

[0569] Samples of approximately 2 mg of milled dried biomass were analyzed on a Frontier lab PY-2020iS Pyrolyzer and Shimadzu QP2010 GCMS. Methylstearate was incorporated into the sample to serve as an internal standard. Samples were loaded and processed in a batch run with the following settings:

[0570] Py Settings:
[0571] Temperature: 550° C.
[0572] Interface: 300° C.

[0573] GC Settings:
[0574] Glass insert w/silica wool: SPLIT
[0575] Linear Velocity: 8.9 cm/sec
[0576] Split Ratio: 300
[0577] Injection Port Temperature: 350° C.
[0578] Oven Temperature: 70° C.
[0579] Detector Voltage: 0.5 kV
[0580] Interface Temperature: 250° C.
[0581] Acquisition Mode: Scan (for qualitative analysis)
[0582] Acquisition Time: 3.25-21.5 minutes, 35 m/z-400 m/z
[0583] Pressure: 128.8 kPa

[0584] MS Settings:
[0585] Ion Source Temperature: 200° C.
[0586] Interface Temperature: 250° C.
[0587] Solvent Cut time: 2.25 min
[0588] Micro scan width: 0

[0589] Chromatogram peaks were identified using the reference standards previously run during the protocol development. The area under each peak was manually integrated, quantified, and normalized relative to the internal standard. Levoglucosan and furfural served as cellulose markers. The average values for the lignin content of plants of each transgenic line were compared to the corresponding value for a wild-type control line. Events exhibiting increased lignin content are presented in Table 3.

TABLE 3

| | | % Change | % Change |
|---|---|---|---|
| | | in Lignin | in Lignin |
| Clone ID | Plant Line | (NIR) | (PyGC) |
| 1725400 | ME31528-01 | 17.81 | — |
| | ME31528-02 | 16.25 | — |
| | ME31528-03 | 21.91 | — |
| | ME31528-04 | 17.43 | — |
| 1724782 | ME26114-01 | 14.88 | 16.50 |
| | ME26114-02 | 15.16 | 30.21 |
| | ME26114-03 | 11.46 | 4.21 |
| | ME26114-04 | 13.10 | 7.08 |
| | ME26114-05 | 5.69 | −7.26 |
| | ME26114-06 | 10.60 | 10.41 |
| 1794784 | ME27658-01 | 10.44 | 17.02 |
| | ME27658-02 | 13.31 | −1.38 |
| | ME27658-03 | 12.78 | 3.13 |
| | ME27658-04 | 14.57 | 48.63 |
| | ME27658-05 | 12.33 | 42.45 |
| 1955766 | ME29626-01 | 4.10 | 67.14 |
| | ME29626-02 | −1.63 | 49.86 |
| | ME29626-03 | −4.57 | — |
| | ME29626-04 | 0.13 | 45.99 |
| | ME29626-05 | 3.88 | 36.71 |
| | ME29626-06 | −0.45 | 37.01 |
| 1804242 | ME26515-01 | 14.69 | 39.84 |
| | ME26515-03 | 16.19 | 39.38 |
| | ME26515-04 | 13.26 | 42.35 |
| | ME26515-05 | 15.84 | 53.77 |
| | ME26515-06 | 14.64 | 31.96 |
| 1816881 | ME28947-01 | 1.02 | 17.44 |
| | ME28947-02 | 10.60 | 15.11 |
| | ME28947-03 | 0.69 | 11.78 |
| | ME28947-04 | −2.15 | −7.44 |
| | ME28947-05 | −4.78 | −13.22 |
| | ME28947-06 | 9.32 | 12.22 |
| 570057 | ME24912-01 | 36.83 | 10.44 |
| | ME24912-02 | 31.66 | 14.22 |
| | ME24912-03 | 33.58 | 16.89 |
| | ME24912-05 | 32.35 | 13.56 |
| Annot | ME26166-01 | 26.37 | — |
| 831967 | ME26166-02 | 30.70 | 30.67 |
| | ME26166-03 | 24.76 | 1.44 |
| | ME26166-04 | 29.91 | 8.44 |
| | ME26166-05 | 28.86 | 34.00 |

— = Not Determined

[0590] These results indicate that the predicted lignin content of a transgenic plant can be increased from about 5 percent to about 37 percent, relative to a wild-type control plant.

### Example 5

### Transgenic Plants Exhibiting Decreased Lignin

[0591] Lignin content of transgenic Arabidopsis thaliana lines was determined as described in Example 4. Events exhibiting a decrease in lignin content are presented in Table 4.

TABLE 4

| | | % Change | % Change |
|---|---|---|---|
| | | in Lignin | in Lignin |
| Clone ID | Plant Line | (NIR) | (PyGC) |
| 2010191 | ME30683-01 | −10.12 | — |
| | ME30683-02 | −13.19 | — |
| | ME30683-03 | 3.71 | — |
| | ME30683-04 | −13.54 | — |
| | ME30683-05 | 4.66 | — |
| | ME30683-06 | 8.70 | — |
| 1786326 | ME30617-01 | 2.12 | — |
| | ME30617-02 | 4.37 | — |
| | ME30617-03 | 1.04 | — |
| | ME30617-04 | −4.50 | −8.18 |
| | ME30617-05 | −7.60 | −22.84 |
| | ME30617-06 | −7.12 | 7.16 |
| 21240 | ME25767-01 | −36.54 | — |
| | ME25767-02 | −43.68 | — |
| | ME25767-03 | −42.28 | — |
| | ME25767-04 | −52.38 | — |
| | ME25767-05 | −36.03 | — |
| | ME25767-06 | −24.86 | — |
| 21240 | ME26161-03 | −8.69 | — |
| | ME26161-04 | −14.98 | — |
| | ME26161-05 | −14.91 | — |
| | ME26161-06 | −10.04 | — |
| | ME26161-07 | 0.00 | — |
| 21240 | ME06492-02-99 | −16.30 | — |
| | ME06492-07-99 | −10.99 | — |
| 1777248 | ME30365-01 | −4.39 | — |
| | ME30365-02 | −10.27 | −11.35 |
| | ME30365-03 | −8.69 | −54.02 |
| Annot | ME11531-01 | −4.69 | −34.98 |
| 837136 | ME11531-03 | 1.92 | −15.73 |
| Annot | ME18822-01 | −16.56 | −30.85 |
| 860791 | ME18822-02 | −7.27 | −20.46 |
| 691319 | ME05057-05-A | −56.89 | −119.58 |
| | ME05057-06-A | −94.05 | — |
| | ME05057-07-A | −34.17 | −145.00 |
| 1224770 | ME25694-01 | 13.92 | −18.78 |
| | ME25694-02 | 6.49 | −14.56 |
| | ME25694-03 | 16.91 | −27.44 |
| | ME25694-04 | 13.59 | −26.22 |
| | ME25694-05 | −3.44 | −18.00 |

— = Not Determined

[0592] These results indicate that the predicted lignin content of a transgenic plant can be decreased by about 3 percent to about 90 percent, as compared to a wild-type control plant.

### Example 6

### Transgenic Plants Exhibiting an Increased S:G Ratio

[0593] To determine the amount of hydroxyphenyl (H) lignin monomers, the integrated normalized peaks corresponding to the following were added together: phenol, 2,6-dimethylphenol, 2-ethylphenol, 4-methylphenol, 3-ethylphenol, 4-vinylphenol, and 4-hydroxyacetophenone. To determine the amount of guaiacyl (G) lignin monomers, the integrated normalized peaks corresponding to the following were added together: guaiacol, 4-methylguaiacol, 4-ethylguaiacol, 4-vinylguaiacol, 5-propylguaiacol, vanillin, isovanillin, acetoguaiacone, guaiacylacetone, eugenol, isoeugenol, and coniferyaldehyde. To determine the amount of syringyl (S) lignin monomers, the integrated normalized peaks corresponding to the following were added together: syringol, 4-methylsyringol, 4-ethylsyringol, 4-vinylsyringol, 4-allysyringol, syringylacetone, acetosyringol, homosyringaldehyde, syringaldehyde, and sinapaldehyde. The sum of all the H, G, and S peaks correspond to the total lignin. The average values for the S:G ratio of plants of each transgenic line were compared to the corresponding values in wild-type control lines. Events exhibiting an increased S:G ratio are presented in Table 5.

TABLE 5

| | | % Change |
|---|---|---|
| | | in S:G Ratio |
| Clone ID | Plant Line | (PyGC) |
| 1790340 | ME29777-01 | 14.81 |
| | ME29777-02 | 14.81 |
| | ME29777-03 | 14.81 |
| | ME29777-04 | 18.52 |
| | ME29777-05 | 18.52 |
| | ME29777-06 | 18.52 |

[0594] These results indicate that the S:G ratio of a transgenic plant can be increased by about 15 percent to about 18 percent, relative to a wild-type control plant.

### Example 7

### Transgenic Plants Exhibiting Increased Glucan

[0595] Biomass samples from Arabidopsis thaliana plants were collected and processed for compositional analysis as described in Example 4. A NIR spectrum was acquired using a Bruker Optics MPA™ FT-NIR spectrometer (Bruker Optics, Ettlingen, Germany), running Opus 5.5 software essentially according to the manufacturer's protocols. The glucan content was predicted from the NIR spectra using a NIR composition model developed as described in WO2009/059176. The glucan content of the transgenic lines was compared to the glucan content of wild-type control lines. Events exhibiting increased glucan content are presented in Table

TABLE 6

| | | % Change in |
|---|---|---|
| | | Glucan |
| Clone ID | Plant Line | (NIR) |
| 1773290 | ME31545-01 | 12.83 |
| | ME31545-02 | 12.49 |
| | ME31545-03 | 11.07 |
| | ME31545-04 | 18.89 |
| | ME31545-05 | 6.42 |
| | ME31545-06 | 17.01 |
| 1888614 | ME31010-01 | 13.95 |
| | ME31010-02 | 16.55 |
| | ME31010-03 | 20.91 |
| | ME31010-04 | 11.76 |
| | ME31010-05 | 10.02 |
| | ME31010-06 | 9.47 |

[0596] These results indicate that the glucan content of a transgenic plant can be increased by about 6 percent to about 20 percent, relative to a wild-type control plant.

### Example 8

### Transgenic Plants Exhibiting Decreased Lignin and Increased Biomass

[0597] Lignin content of transgenic Arabidopsis thaliana lines was determined as described in Example 4. In addition, biomass samples were collected and dry matter yield determined as described in Example 3. The average values for lignin content and dry matter yield of plants of each transgenic line were compared to the corresponding values in wild-type control lines. Events with a predicted decrease in lignin content and an increase in the dry matter yield are presented in Table 7.

TABLE 7

| | | | Dry Matter |
|---|---|---|---|
| | | % Change | Yield |
| | | in Lignin | (Fold |
| Clone ID | Plant Line | (NIR) | Increase) |
| 1763298 | ME26843-01 | −24.46 | 0.92 |
| | ME26843-02 | −21.70 | 1.24 |
| | ME26843-03 | −8.98 | 1.69 |
| | ME26843-04 | −21.26 | 0.95 |
| | ME26843-05 | −20.76 | 1.22 |

[0598] These results indicate that the predicted lignin content and the dry matter yield of a transgenic plant can be modulated relative to a control plant. As indicated above, the predicted lignin content of a transgenic plant can be decreased by about 10 percent to about 25 percent, and concomitantly, the dry matter yield of the transgenic plant can be increased by about 0.9 fold to about 1.7 fold, relative to a wild-type control plant.

### Example 9

### Transgenic Plants Exhibiting Decreased Lignin and Increased S:G Ratio

[0599] Lignin content and S:G ratio of transgenic Arabidopsis thaliana lines were determined as described in Examples 4 and 6. The average values for lignin content and the S:G ratio of plants of each transgenic line were compared to the corresponding values for wild-type control plants. The percent change in the level of each component is presented in Table 8.

TABLE 8

| | | % Change | % Change | % Change |
|---|---|---|---|---|
| | | in Lignin | in Lignin | in S:G Ratio |
| Clone ID | Plant Line | (NIR) | (PyGC) | (PyGC) |
| 1809393 | ME27043-01 | −30.12 | −30.28 | 9.83 |
| | ME27043-02 | −24.52 | −40.01 | 19.76 |
| | ME27043-03 | −32.86 | −40.96 | 7.08 |
| | ME27043-04 | −19.95 | — | — |
| | ME27043-05 | −22.79 | — | — |

— = Not Determined

[0600] These results show that the predicted lignin content and S:G ratio of a transgenic plant can be modulated relative to a control plant. As indicated above, the predicted lignin content of a transgenic plant can be decreased from about 25 percent to about 30 percent, and concomitantly, the S:G ratio of the transgenic plant can be increased by about 7 percent to about 20 percent, relative to a control plant.

### Example 10

### Transgenic Plants Exhibiting Increased Glucan and Increased S:G Ratio

[0601] Glucan content and the S:G ratio of transgenic Arabidopsis thaliana lines were determined as described in Examples 6 and 7. The average values for glucan content and the S:G ratio of plants of each transgenic line were compared to the corresponding values for wild-type control plants. Events exhibiting increased glucan content and increased S:G ratio are presented in Table 9.

TABLE 9

| | | % Change in | % Change |
|---|---|---|---|
| | | Glucan | in S:G Ratio |
| Clone ID | Plant Line | (NIR) | (PyGC) |
| 1789564 | ME29970-01 | 16.04 | 14.04 |
| | ME29970-02 | 14.11 | 9.09 |
| | ME29970-03 | 12.82 | 7.49 |
| | ME29970-04 | 2.45 | 13.14 |
| | ME29970-06 | 10.59 | 4.88 |

[0602] These results indicate that the glucan content and S:G ratio of a transgenic plant can be modulated relative to a control plant. As indicated above, the glucan content of a transgenic plant can be increased by about 2 percent to about 16 percent, and concomitantly, the S:G ratio of the transgenic plant can be increased from about 5 percent to about 14 percent, relative to a control plant.

### Example 11

### Transgenic Plants Exhibiting Increased Glucan and Increased Lignin

[0603] Lignin and glucan content of transgenic Arabidopsis thaliana lines were determined as described in Examples 4 and 7. The average values for glucan content and lignin content of plants of each transgenic line were compared to the corresponding values for wild-type control plants. Events exhibiting increased glucan and increased lignin content are presented in Table 10.

TABLE 10

| | | % Change in | % Change | % Change |
|---|---|---|---|---|
| | | Glucan | in Lignin | in Lignin |
| Clone ID | Plant Line | (NIR) | (NIR) | (PyGC) |
| 1764605 | ME31173-01 | 15.58 | −2.93 | 20.50 |
| | ME31173-03 | 15.91 | 3.43 | 40.09 |
| | ME31173-04 | 15.62 | 5.61 | 38.71 |
| | ME31173-05 | 16.66 | 7.26 | 20.04 |
| | ME31173-06 | 16.33 | 0.53 | 15.86 |

[0604] These results indicate that the glucan content and the predicted lignin content of a transgenic plant can be modulated relative to control plant. As indicated above, the glucan content of a transgenic plant can be increased by about 15 percent, and concomitantly, the predicted lignin content of the transgenic plant can be increased by about 1 percent to about 7 percent, relative to a wild-type control plant.

### Example 12

### Transgenic Plants Exhibiting Increased Lignin and Increased S:G Ratio

[0605] Lignin content and the S:G ratio of transgenic Arabidopsis thaliana lines were determined as described in Examples 4 and 6. The average values for lignin content and S:G ratio of plants of each transgenic line were compared to the corresponding values for wild-type control plants. Events exhibiting increased lignin and decreased S:G ratio are presented in Table 11.

TABLE 11

| | | % Change | % Change | % Change |
|---|---|---|---|---|
| | | in Lignin | in Lignin | in S:G Ratio |
| Clone ID | Plant Line | (NIR) | (PyGC) | (PyGC) |
| 1727628 | ME27144-01 | 16.41 | 85.59 | −3.27 |
| | ME27144-02 | 16.19 | 77.90 | −11.01 |
| | ME27144-03 | 11.64 | 71.13 | −6.76 |
| | ME27144-04 | 14.93 | 113.24 | −12.39 |
| | ME27144-05 | 17.76 | 89.80 | −14.38 |
| | ME27144-06 | 11.78 | 68.27 | −9.91 |

[0606] These results indicate that the predicted lignin content and the S:G ratio of a transgenic plant can be modulated relative to a control plant. As indicated above, the predicted lignin content of a transgenic plant can be increased by about 12 percent to about 18 percent, and concomitantly, the S:G ratio of the transgenic plant can be decreased by about 3 percent to about 14 percent, relative to a control plant.

### Example 13

### Transgenic Plants Exhibiting Increased Lignin and Increased Biomass

[0607] Lignin content and the dry matter yield of transgenic Arabidopsis thaliana lines were determined as described in Examples 4 and 3. The average values for lignin content and the dry matter yield of plants of each transgenic line were compared to the corresponding values for wild-type control plants. Events exhibiting increased lignin content and increased dry matter yield are presented in Table 12.

TABLE 12

| | | | | Dry Matter |
|---|---|---|---|---|
| | | % Change | % Change | Yield |
| | | in Lignin | in Lignin | (Fold |
| Clone ID | Plant Line | (NIR) | (PyGC) | Increase) |
| 1726076 | ME29794-02 | 3.92 | 36.46 | 2.06 |
| | ME29794-03 | 6.27 | 35.30 | 1.76 |
| | ME29794-04 | 1.77 | 30.32 | 1.33 |
| | ME29794-05 | 1.95 | 12.41 | 1.67 |
| | ME29794-06 | 7.52 | 6.78 | 2.01 |
| 1788820 | ME30345-01 | 11.53 | −3.64 | 1.67 |
| | ME30345-02 | 4.79 | −2.40 | 1.58 |
| | ME30345-03 | 9.58 | 2.48 | 1.22 |
| | ME30345-04 | 7.21 | 11.75 | 1.99 |
| | ME30345-05 | 8.94 | 10.59 | 1.78 |
| | ME30345-06 | 5.63 | 2.81 | 1.61 |

[0608] These results indicate that the predicted lignin content and the dry matter yield of a transgenic plant can be modulated. As indicated above, the predicted lignin content of a transgenic plant can be increased by about 2 percent to about 12 percent, and concomitantly, the dry matter yield of the transgenic plant can be increased by about 2 fold, relative to a wild-type control plant.

### Example 14

### Transgenic Plants Exhibiting Decreased Lignin and Increased S:G Ratio

[0609] Lignin content and the S:G ratio of transgenic Arabidopsis thaliana lines were determined as described in Examples 4 and 6. The average values for lignin content and S:G ratio of plants of each transgenic line were compared to the corresponding values for wild-type control plants. The percent change in each component is presented in Table 13.

TABLE 13

| | | % Change | % Change | % Change |
|---|---|---|---|---|
| | | in Lignin | in Lignin | in S:G Ratio |
| Clone ID | Plant Line | (NIR) | (PyGC) | (PyGC) |
| 2014404 | ME30110-01 | −3.84 | −37.73 | 64.29 |
| | ME30110-02 | 4.91 | −34.86 | 14.29 |
| | ME30110-03 | −5.06 | −60.50 | 64.29 |
| | ME30110-04 | −6.80 | −49.89 | 60.71 |
| | ME30110-05 | −0.77 | −47.46 | 28.57 |
| | ME30110-06 | −7.07 | −59.03 | 35.71 |

[0610] These results indicate that the predicted lignin content and the S:G ratio of a transgenic plant can be modulated relative to a control plant. As indicated above, the predicted lignin content of a transgenic plant can be decreased by about 1 percent to about 7 percent, and concomitantly the S:G ratio of the transgenic plant can be increased by about 14 percent to about 60 percent, relative to a wild-type control plant.

### Example 15

### Transgenic Plants Exhibiting Increased Lignin Content and Decreased S:G Ratio

[0611] Lignin content and the S:G ratio of transgenic Arabidopsis thaliana lines were determined as described in Examples 4 and 6. The average values for lignin content and S:G ratio of plants of each transgenic line were compared to the corresponding values for wild-type control plants. The percent change in the level of each component is presented in Table 14.

TABLE 14

| | | % Change | % Change | % Change |
|---|---|---|---|---|
| | | in Lignin | in Lignin | in S:G Ratio |
| Clone ID | Plant Line | (NIR) | (PyGC) | (PyGC) |
| 1955550 | ME30330-01 | 2.92 | 1.49 | −3.23 |
| | ME30330-02 | −4.81 | 8.68 | 0.00 |
| | ME30330-03 | 13.88 | 17.37 | −9.68 |
| | ME30330-04 | 9.43 | 25.72 | −6.45 |
| | ME30330-05 | 5.02 | 13.98 | −12.90 |
| | ME30330-06 | 8.54 | 9.10 | −12.90 |

[0612] These results indicate that the predicted lignin content and S:G ratio of a transgenic plant can be modulated relative to a control plant. As indicated above, the predicted lignin content of a transgenic plant can be increased by about 3 percent to about 14 percent, and concomitantly, the S:G ratio of the transgenic plant can be decreased by about 3 percent to about 13 percent, relative to a wild-type control plant.

### Example 16

### Transgenic Plants Exhibiting Decreased Lignin and Increased Biomass

[0613] Lignin content and dry matter yield of transgenic Arabidopsis thaliana lines were determined as described in Examples 4 and 3. The average values for lignin content and dry matter yield of plants of each transgenic line were compared to the corresponding values for wild-type control plants. The events exhibiting decreased lignin content and increased dry matter yield are presented in Table 15.

TABLE 15

| | | | | Dry Matter |
|---|---|---|---|---|
| | | % Change | % Change | Yield |
| | | in Lignin | in Lignin | (Fold |
| Clone ID | Plant Line | (NIR) | (PyGC) | Increase) |
| 1789593 | ME28415-01 | 9.89 | 5.29 | — |
| | ME28415-02 | 6.04 | −20.18 | 1.26 |
| | ME28415-03 | 2.77 | −2.81 | — |
| | ME28415-04 | 1.91 | −53.10 | 1.54 |
| | ME28415-05 | −3.22 | −2.81 | 1.31 |
| | ME28415-06 | 2.46 | 3.97 | — |

— = Not Determined

[0614] These results indicate that the predicted lignin content and the dry matter yield of a transgenic plant can be modulated relative to a control plant. As indicated above, the lignin content of a transgenic plant can be increased by about 3 percent, and concomitantly, the dry matter yield of the transgenic plant can be increased by about 1.5 fold.

### Example 17

### Transgenic Plants Exhibiting Increased Glucan Content and Decreased Lignin Content

[0615] Glucan and lignin content of transgenic Arabidopsis thaliana lines were determined as described in Examples 4 and 7. The average values for glucan and lignin content of plants of each transgenic line were compared to the corresponding values for wild-type control plants. The events exhibiting increased glucan content and decreased lignin content are presented in Table 16.

TABLE 16

| | | % Change in | % Change | % Change |
|---|---|---|---|---|
| | | Glucan | in Lignin | in Lignin |
| Clone ID | Plant Line | (NIR) | (NIR) | (PyGC) |
| 14432 | ME07523-04 | 7.89 | −16.85 | −21.68 |
| 14432 | ME04241-04-B | 53.94 | −3.43 | −35.32 |
| | ME04241-05-D | 48.44 | −11.65 | −40.43 |

[0616] These results indicate that the glucan content and the predicted lignin content of a transgenic plant can be modulated relative to a control plant. As indicated above, the glucan content can be increased from about 48 percent to about 54 percent, and concomitantly, the lignin content of the transgenic plant can be decreased by about 3 percent to about 17 percent, relative to a wild-type control plant.

### Example 18

### Transgenic Plants Exhibiting Decreased Glucan and Increased Lignin

[0617] Glucan and lignin content of transgenic Arabidopsis thaliana lines were determined as described in Examples 4 and 7. The average values for the glucan and lignin content of plants of each transgenic line were compared to the corresponding values for wild-type control plants. The events exhibiting decreased glucan content and increased lignin content are presented in Table 17.

TABLE 17

| | | % Change in | % Change | % Change |
|---|---|---|---|---|
| | | Glucan | in Lignin | in Lignin |
| Clone ID | Plant Line | (NIR) | (NIR) | (PyGC) |
| 1824159 | ME27368-01 | −11.95 | 5.34 | — |
| | ME27368-02 | −9.86 | 8.05 | — |
| | ME27368-04 | −13.08 | 3.57 | 46.67 |
| | ME27368-05 | −15.04 | 3.57 | 19.33 |
| | ME27368-06 | −12.45 | −2.77 | −5.33 |

— = Not Determined

[0618] These results indicate that the glucan content and the predicted lignin content of a transgenic plant can be modulated relative to a control plant. As indicated above, the glucan content can be decreased by about 10 percent to about 15 percent, and concomitantly, the lignin content of the transgenic plant can be increased by about 4 percent to about 8 percent, relative to a wild-type control plant.

### Example 19

### Transgenic Plants Exhibiting Increased Lignin and Increased Biomass

[0619] Lignin content and the dry matter yield of transgenic Arabidopsis thaliana lines were determined as described in Examples 4 and 3. The average values for lignin content and the dry matter yield of plants of each transgenic line were compared to the corresponding values for wild-type control plants. The events exhibiting increased dry matter yield and lignin content are presented in Table 18.

TABLE 18

| | | | | Dry Matter |
|---|---|---|---|---|
| | | % Change | % Change | Yield |
| | | in Lignin | in Lignin | (Fold |
| Clone ID | Plant Line | (NIR) | (PyGC) | Increase) |
| 1724055 | ME29158-01 | 33.39 | 54.33 | 0.99 |
| | ME29158-02 | 24.94 | 47.89 | 0.91 |
| | ME29158-03 | 34.04 | 35.11 | 0.82 |
| | ME29158-04 | 34.70 | 100.33 | 1.24 |
| | ME29158-05 | 43.71 | 52.44 | 1.61 |
| | ME29158-06 | 55.25 | 94.78 | 0.92 |

[0620] These results indicate that the predicted lignin content and the dry matter yield of a transgenic plant can be modulated relative to a control plant. As indicated above, the predicted lignin content of a transgenic plant can be increased by about 25 percent to about 55 percent, and concomitantly, the dry matter yield of the transgenic plant can be increased by about 1.6 fold.

### Example 20

### Transgenic Plants Exhibiting Decreased Lignin, Increased S:G Ratio, and Increased Biomass

[0621] Lignin content, the S:G ratio, and the dry matter yield of transgenic Arabidopsis thaliana lines were determined as described in Examples 3, 4 and 6. The average values for lignin content, S:G ratio, and the dry matter yield of plants of each transgenic line were compared to the corresponding value for wild-type control plants. The events exhibiting decreased lignin content, increased S:G ratio, and increased dry matter yield are presented in Table 19.

TABLE 19

| | | | | | Dry |
|---|---|---|---|---|---|
| | | | | % Chang | Matter |
| | | % Change | % Change | e in | Yield |
| | | in Lignin | in Lignin | S:G Ratio | (Fold |
| Clone ID | Plant Line | (NIR) | (PyGC) | (PyGC) | Increase) |
| 1900097 | ME30392-01 | −18.31 | −17.43 | −8.67 | 0.93 |
| | ME30392-02 | −19.62 | 0.10 | −2.67 | 1.38 |
| | ME30392-03 | −25.49 | −8.54 | 11.79 | 1.44 |
| | ME30392-04 | −17.53 | −10.58 | 11.30 | 1.42 |
| | ME30392-05 | −23.30 | −12.92 | 15.10 | 1.25 |
| | ME30392-06 | −18.63 | −11.71 | 8.24 | 0.94 |

[0622] These results indicate the predicted lignin content, the S:G ratio, and the dry matter yield of a transgenic plant can be modulated relative to a control plant. As indicated above, the lignin content of a transgenic plant can be decreased by about 18 percent to about 25 percent, the S:G ratio of the transgenic plant can be increased by about 8 percent to about 15 percent, and concomitantly, the dry matter yield of the transgenic plant can be increased by about 1.4 fold, relative to a wild-type control plant.

### Example 21

### Transgenic Plants Exhibiting Increased Lignin, Decreased S:G Ratio and Increased Biomass

[0623] Lignin content, the S:G ratio, and the dry matter yield of transgenic Arabidopsis thaliana lines were determined as described in Examples 3, 5, and 6. The average values for lignin content, the S:G ratio, and the dry matter yield of plants of each transgenic line were compared to the corresponding values for wild-type control plants. The events exhibiting increased lignin content, decreased S:G ratio, and increased dry matter yield are presented in Table 20.

TABLE 20

| | | | | | Dry |
|---|---|---|---|---|---|
| | | | | % Change | Matter |
| | | % Change | % Change | in | Yield |
| | | in Lignin | in Lignin | S:G Ratio | (Fold |
| Clone ID | Plant Line | (NIR) | (PyGC) | (PyGC) | Increase) |
| 1781320 | ME29764-01 | 15.59 | 79.35 | −22.93 | 1.23 |
| | ME29764-02 | 13.36 | 66.87 | −19.08 | 1.29 |
| | ME29764-03 | 15.15 | 81.11 | −0.32 | — |
| | ME29764-04 | 16.69 | 83.52 | −13.69 | — |
| | ME29764-05 | 17.91 | 85.47 | −18.46 | — |
| | ME29764-06 | 15.40 | 68.53 | −12.40 | — |

— = Not Determined

[0624] These results indicate that the predicted lignin content, S:G ratio, and dry matter yield of a transgenic plant can be modulated relative to a control plant. As indicated above, the lignin content of a transgenic plant can be increased by about 13 percent to about 18 percent, the S:G ratio of the transgenic plant can be decreased by about 1 percent to about 23 percent, and concomitantly, the dry matter yield of the transgenic plant can be increased by about 1.3 fold, relative to a wild-type control plant.

### Example 22

### Transgenic Plants Exhibiting Increased Lignin, Increased S:G Ratio, and Increased Biomass

[0625] Lignin content, the S:G ratio, and the dry matter yield of transgenic Arabidopsis thaliana lines were determined as described in Examples 3, 4, and 6. The average values for lignin content, S:G ratio, and the dry matter yield of plants of each transgenic line were compared to the corresponding values for wild-type control plants. The events exhibiting increased lignin content, increased S:G ratio, and increased dry matter yield are presented in Table 21.

TABLE 21

| | | | | | Dry |
|---|---|---|---|---|---|
| | | | | % Change | Matter |
| | | % Change | % Change | in | Yield |
| | | in Lignin | in Lignin | S:G Ratio | (Fold |
| Clone ID | Plant Line | (NIR) | (PyGC) | (PyGC) | Increase) |
| 1724569 | ME26627-01 | 11.37 | 24.77 | 20.00 | 1.39 |
| | ME26627-02 | 12.11 | 16.32 | 8.00 | 1.18 |
| | ME26627-03 | 14.13 | 48.40 | 12.00 | — |
| | ME26627-04 | 11.16 | 14.95 | 4.00 | — |
| | ME26627-05 | 12.61 | 16.10 | 12.00 | — |

— = Not Determined

[0626] These results indicate that the predicted lignin content, the S:G ratio, and the dry matter yield of a transgenic plant can be modulated relative to a control plant. As indicated above, the predicted lignin content of a transgenic plant can be increased by about 11 percent to about 14 percent, the S:G ratio of the transgenic plant can be increased by about 4 percent to about 20 percent, and concomitantly, the dry matter yield of the transgenic plant can be increased by about 1.4 fold, relative to a wild-type control plant.

### Example 23

### Transgenic Plants Exhibiting Increased Glucan, Increased Lignin, and Increased Biomass

[0627] Glucan content, lignin content, and the dry matter yield of transgenic Arabidopsis thaliana lines were determined as described in Examples 3, 4, and 7. The average values for glucan content, lignin content, and the dry matter yield of plants of each transgenic line were compared to the corresponding values for wild-type control plants. The events exhibiting increased glucan content, increased lignin content, and increased dry matter yield are presented in Table 22.

TABLE 22

| | | | | | Dry |
|---|---|---|---|---|---|
| | | % Change | | | Matter |
| | | in | % Change | % Change | Yield |
| | | Glucan | in Lignin | in Lignin | (Fold |
| Clone ID | Plant Line | (NIR) | (NIR) | (PyGC) | Increase) |
| 1788124 | ME31183-01 | 16.11 | 8.57 | 31.02 | 0.43 |
| | ME31183-02 | 20.08 | 6.95 | 7.82 | 0.29 |
| | ME31183-03 | 4.85 | −8.31 | 21.37 | 1.46 |
| | ME31183-04 | 3.92 | −17.39 | 15.52 | 1.50 |
| | ME31183-05 | 7.79 | −18.01 | 14.19 | 1.73 |
| | ME31183-06 | 2.95 | −16.43 | 20.32 | 1.92 |

[0628] These results indicate that the glucan content, the predicted lignin content, and the dry matter yield of a transgenic plant can be modulated relative to a control plant. As indicated above, the glucan content of a transgenic plant can be increased from about 4 percent to about 20 percent, the predicted lignin content of the transgenic plant can be increased from about 7 percent to about 9 percent, and concomitantly, the dry matter yield of the transgenic plant can be increased about 2 fold, relative to a wild-type control plant.

### Example 24

### Transgenic Plants Exhibiting Increased Glucan, Increased Lignin, and Increased S:G Ratio

[0629] Glucan content, lignin content, and the S:G ratio of transgenic Arabidopsis thaliana lines were determined as described in Examples 4, 6, and 7. The average values for glucan content, lignin content, and S:G ratio of plants of each transgenic line were compared to the corresponding values for wild-type control plants. The events exhibiting increased glucan content, decreased lignin content, and increased S:G ratio are presented in Table 23.

TABLE 23

| | | | % | % | % |
|---|---|---|---|---|---|
| | | | Change | Change | Change |
| | | % Change | in | in | in |
| | | in Glucan | Lignin | Lignin | S:G Ratio |
| Clone ID | Plant Line | (NIR) | (NIR) | (PyGC) | (PyGC) |
| 5055 | ME03563-01-99 | 1.75 | 13.82 | −32.19 | 22.22 |
| | ME03563-03-99 | 39.54 | 33.44 | −60.78 | 29.63 |
| | ME03563-05-99 | 12.15 | 13.93 | −56.17 | 25.93 |
| | ME03563-06-99 | 2.14 | 22.07 | −57.69 | 18.52 |
| 1760764 | ME31185-02 | 8.52 | −17.26 | −16.01 | 7.76 |
| | ME31185-03 | 5.67 | −25.50 | −36.09 | 21.01 |
| | ME31185-04 | 19.31 | −18.29 | −7.21 | 12.45 |
| | ME31185-05 | 23.12 | −12.38 | −6.03 | 18.90 |
| | ME31185-06 | 23.78 | −6.05 | 9.64 | 5.51 |

[0630] These results indicate that the glucan content, the predicted lignin content, and the S:G ratio of a transgenic plant can be modulated relative to a control plant. As indicated above, the glucan content of a transgenic plant can be increased by about 2 percent to about 40 percent, the predicted lignin content of the transgenic plant can be decreased by about 6 percent to about 26 percent, and concomitantly, the S:G ratio of the transgenic plant can be increased by about 6 percent to about 30 percent, relative to a wild-type control plant.

### Example 25

### Transgenic Plants Exhibiting Decreased Glucan, Decreased Lignin, Increased S:G ratio and Increased Biomass

[0631] Glucan and lignin content, the S:G ratio, and the dry matter yield of transgenic Arabidopsis thaliana lines were determined as described in Examples 3, 4, 6, and 7. The average values for glucan and lignin content, S:G ratio, and the dry matter yield of plants of each transgenic line were compared to the corresponding values for wild-type control plants. The events exhibiting decreased glucan content, decreased lignin content, increased S:G ratio, and increased dry matter yield are presented in Table 24.

TABLE 24

| | | | | | | Dry Matter |
|---|---|---|---|---|---|---|
| | | % Change in | % Change | % Change | % Change | Yield |
| | | Glucan | in Lignin | in Lignin | in S:G Ratio | (Fold |
| Clone ID | Plant Line | (NIR) | (NIR) | (PyGC) | (PyGC) | Increase) |
| 1792586 | ME28309-01 | −16.22 | −14.70 | −39.14 | 14.24 | 1.41 |
| | ME28309-02 | −13.37 | −4.39 | −35.22 | 25.87 | 1.55 |
| | ME28309-03 | −13.54 | −5.68 | −24.21 | 10.85 | 1.69 |
| | ME28309-04 | −16.51 | −11.53 | −48.23 | 38.73 | 2.23 |
| | ME28309-05 | −9.45 | −14.04 | −26.42 | 5.58 | 2.18 |
| | ME28309-06 | −10.86 | −8.70 | −25.77 | 26.05 | 2.08 |
| 240112 | ME29422-01 | −12.30 | −1.90 | −20.47 | −4.02 | 0.99 |
| | ME29422-02 | −17.95 | −6.39 | −42.58 | 17.35 | 0.85 |
| | ME29422-04 | −13.06 | 0.56 | −38.06 | 12.74 | 1.23 |
| | ME29422-05 | −19.23 | −9.55 | −43.30 | 26.53 | 1.14 |
| | ME29422-06 | 0.41 | 3.85 | −9.88 | 16.65 | 1.61 |

[0632] These results indicate that the glucan content, the predicted lignin content, the S:G ratio, and the dry matter yield of a transgenic plant can be modulated relative to a control plant. As indicated above, the glucan level of a transgenic plant can be decreased by about 9 percent to about 19 percent, the predicted lignin content of the transgenic plant can be decreased by about 2 percent to about 15 percent, the S:G ratio of the transgenic plant can be increased by about 6 percent to about 39 percent, and concomitantly, the dry matter yield of the transgenic plant can be increased by about 2 fold.

### Example 26

### Determination of Functional Homologs by Reciprocal BLAST

[0633] A candidate sequence was considered a functional homolog of a reference sequence if the candidate and reference sequences encoded proteins having a similar function and/or activity. A process known as Reciprocal BLAST (Rivera et al., Proc. Natl. Acad. Sci. USA, 95:6239-6244 (1998)) was used to identify potential functional homolog sequences from databases consisting of all available public and proprietary peptide sequences, including NR from NCBI and peptide translations from Ceres clones.

[0634] Before starting a Reciprocal BLAST process, a specific reference polypeptide was searched against all peptides from its source species using BLAST in order to identify polypeptides having BLAST sequence identity of 80% or greater to the reference polypeptide and an alignment length of 85% or greater along the shorter sequence in the alignment. The reference polypeptide and any of the aforementioned identified polypeptides were designated as a cluster.

[0635] The BLASTP version 2.0 program from Washington University at Saint Louis, Mo., USA was used to determine BLAST sequence identity and E-value. The BLASTP version 2.0 program includes the following parameters: 1) an E-value cutoff of 1.0e-5; 2) a word size of 5; and 3) the -postsw option. The BLAST sequence identity was calculated based on the alignment of the first BLAST HSP (High-scoring Segment Pairs) of the identified potential functional homolog sequence with a specific reference polypeptide. The number of identically matched residues in the BLAST HSP alignment was divided by the HSP length, and then multiplied by 100 to get the BLAST sequence identity. The HSP length typically included gaps in the alignment, but in some cases gaps were excluded.

[0636] The main Reciprocal BLAST process consists of two rounds of BLAST searches; forward search and reverse search. In the forward search step, a reference polypeptide sequence, “polypeptide A,” from source species SA was BLASTed against all protein sequences from a species of interest. Top hits were determined using an E-value cutoff of 10⁻⁵ and a sequence identity cutoff of 35%. Among the top hits, the sequence having the lowest E-value was designated as the best hit, and considered a potential functional homolog or ortholog. Any other top hit that had a sequence identity of 80% or greater to the best hit or to the original reference polypeptide was considered a potential functional homolog or ortholog as well. This process was repeated for all species of interest.

[0637] In the reverse search round, the top hits identified in the forward search from all species were BLASTed against all protein sequences from the source species SA. A top hit from the forward search that returned a polypeptide from the aforementioned cluster as its best hit was also considered as a potential functional homolog.

[0638] Functional homologs were identified by manual inspection of potential functional homolog sequences. Representative functional homologs for SEQ ID NO:2880, 310, 403, 669, 1797, 717, 693, 1518, 1624, 1887, 834, 1318, 459, 335, 846, 1426, 2525, 1272, 878, 1660, 2654, 1137, 2466, 1107, 1946, 1054, 115, 2708, 1481, 2748, 947, 1727, 2146, 2619, 211, 629, 2544, 2599, 2437, 2090, 2323, 2, 2028, 1569, 501, 2190, 749, 79, 284, and 2915 are shown in FIGS. 1-50, respectively. Additional exemplary homologs are correlated to certain Figures in the Sequence Listing.

### Example 27

### Determination of Functional Homologs by Hidden Markov Models

[0639] Hidden Markov Models (HMMs) were generated by the program HMMER 2.3.2. To generate each HMM, the default HMMER 2.3.2 program parameters, configured for global alignments, were used.

[0640] An HMM was generated using the sequences shown in FIG. 1 as input. These sequences were fitted to the model and a representative HMM bit score for each sequence is shown in the Sequence Listing. Additional sequences were fitted to the model, and representative HMM bit scores for any such additional sequences are shown in the Sequence Listing. The results indicate that these additional sequences are functional homologs of SEQ ID NO:2880.

[0641] The procedure above was repeated and an HMM was generated for each group of sequences shown in FIGS. 2-50, using the sequences shown in each Figure as input for that HMM. A representative bit score for each sequence is shown in the Sequence Listing. Additional sequences were fitted to certain HMMs, and representative HMM bit scores for such additional sequences are shown in the Sequence Listing. The results indicate that these additional sequences are functional homologs of the sequences used to generate that HMM.

### Other Embodiments

[0642] It is to be understood that while the invention has been described in conjunction with the detailed description thereof, the foregoing description is intended to illustrate and not limit the scope of the invention, which is defined by the scope of the appended claims. Other aspects, advantages, and modifications are within the scope of the following claims

The application's sequence listing, which the Patent Office published only in electronic form, follows.

SEQUENCE LISTING (2926 sequences)

SEQ ID NO: 1 - DNA, 1514 bp, Panicum virgatum
  misc_feature: Ceres Clone ID no. 1824159
  misc_feature: Encodes the peptide sequence at SEQ ID NO. 2
ctgattggttaggtctacctcatatgctgctgcttattagctcttgctccgttccatcgcatcgttcattctccggccctgccctggtagcatccatatagcagctgctagctagctatttcaaggagagatcgatcgagcatcatccattgcatgcgcatcttcgtcgatctcttgtccctcccatctcaatctcatctagctatctgcagggcaggcaggcgcacatggatcatcagcagcagcagcagacgccatgcgtgcccccagggttcaggttccatcccacggaggaggagctggtggggtactacctcgcccgcaaggtggccgcccagaagatcgacctcgacatcatccgggaggtggatctctacaggatcgagccatgggatctccaagagcggtgcagctactacggcggcgccggcggccaggaggatgagcccaccgagtactacttcttcagctacaaggaccgcaagtaccccagcggcacgcgcaccaaccgcgccaccgccgccggcttctggaaggccaccggcagggacaagcccgtgctctcctccggccgctcatccgccgcctgcctcagcgtcatcggcatgaggaagacgctcgtcttctaccgcggccgagctcccaacggcaggaagaccgactggatcatccacgagtaccgcctccaaaacaacgagcacgcgccggcgcaggaggaaggatgggtcgtctgccgcgccttccagaagccgatgcccaaccagcagcagagacacggctgctacgccggcagcttcccggccggctaccccagcatgcccacctactactacgacggctccaacgccgccgccgccgcacacgcgcggctactgatgggcggcgctgcagctccggcggcgatgcatgaccacaccctggtgcaggcagccgagtccaagctgcaggtgcatctcctcgccgacatgccgccgccgctccacagcccagccttcgacgccgccggccagtcctacgagcaatctgcggcggagtcgtcggcggtcgactggaacctgctgagcagcctgctgccggcggcgcagcttaacttccatcagccgccggcttcgccttcatgctccaagaacaacaatgacctgtgatgtgatccgtcaccgttatgactgcgtacgttcacgactgatcgatcgattatgtattgacgaccgaccaattattagctaagtattcctttcttgtagctagggtgtattatattcatcatttcactgagatcttcctggaactgattcatcagctaccacttactcctagttctcatcatgcatctgctgatcgatttatttcttccacatatacacacacacacacacacacacatctgtattattgatcacaacacaacataacatcattatatttgcctactacaaactacaaatggttttccctcttgttttttttttacttgtttctgcgtgcacaagaatgaaatttaaaactcctagctc

SEQ ID NO: 2 - protein, 305 aa, Panicum virgatum
  misc_feature (12)..(154): Pfam Name: NAM Pfam Description: No apical meristem (NAM) protein
  misc_feature: Ceres Clone ID no. 1824159
  misc_feature: Bit score of 761.9 for HMM based on sequences of Figure 42
  misc_feature: Functional Homolog Of SEQ ID NO. 2
  misc_feature: in Figure 42
MDHQQQQQTPCVPPGFRFHPTEEELVGYYLARKVAAQKIDLDIIREVDLYRIEPWDLQERCSYYGGAGGQEDEPTEYYFFSYKDRKYPSGTRTNRATAAGFWKATGRDKPVLSSGRSSAACLSVIGMRKTLVFYRGRAPNGRKTDWIIHEYRLQNNEHAPAQEEGWVVCRAFQKPMPNQQQRHGCYAGSFPAGYPSMPTYYYDGSNAAAAAHARLLMGGAAAPAAMHDHTLVQAAESKLQVHLLADMPPPLHSPAFDAAGQSYEQSAAESSAVDWNLLSSLLPAAQLNFHQPPASPSCSKNNNDL

SEQ ID NO: 3 - DNA, 1008 bp, Sorghum bicolor
  misc_feature: Ceres Annot ID no. 8703827
  misc_feature: Encodes the peptide sequence at SEQ ID NO. 4
atggatgatcatcatcatcagcagcagcaggcaccatgcgtgcctccaggtttcaggttccacccgacggaggaggagcttgtggggtactacctcgccaggaaggtggcctcccagaagatcgacctcgacatcatccgggaggtcgatctctacaggatcgagccatgggatctccaagagaggtgcggctactacggcggctcctacggccaggaccaggaggagccgacggagtactacttcttcagctacaaggaccgcaagtacccgagcggcacgcgcaccaaccgcgccaccgccgctggcttctggaaggccaccggcagggacaagccggtgctctcctccaccaccacctcccggtcctccgccgccgccggaggcatcagcgtcgtcatcggcatgcggaagacgctcgtcttctaccgcggccgcgcgcccaacggccgcaagacggactggatcatccacgagtaccggctgcagagcaacgagcacgcgcccgcgcaggaggaaggatgggtcgtctgccgcgccttccagaagcccatgcccaaccagcagcacatcaggcacgccgcctgctactacccttcgccgccgggcagctacctcggcgccgccatgcccgctgccacctactactacgacggacccgtccctgcgccgcggctactgatgaacagcggcggcggcgctgtggctgcggctgcacctccggcggcagcgcatgaccacggcggcggcttggcggctgagtccaagctgcaggtgcagctcctcgccgacatgccgccgctccacagcccctcctccgtcgacggcggcgtcgtgcagcatcatagctacaacgatcagatcgccgccgccgccgtcgctgcagagtcgacgacggtggattggaacctgctgagcagcctgctgccgcccgcgcagctcaatttccatcacacaccgccgccggaatctccgtcttcttgctccaagaacaacaatgatgcatga

SEQ ID NO: 4 - protein, 335 aa, Sorghum bicolor
  misc_feature (14)..(163): Pfam Name: NAM Pfam Description: No apical meristem (NAM) protein
  misc_feature: Ceres Annot ID no. 8703827
  misc_feature: Bit score of 766.8 for HMM based on sequences of Figure 42
  misc_feature: Functional Homolog Of SEQ ID NO. 2
  misc_feature: in Figure 42
MDDHHHQQQQAPCVPPGFRFHPTEEELVGYYLARKVASQKIDLDIIREVDLYRIEPWDLQERCGYYGGSYGQDQEEPTEYYFFSYKDRKYPSGTRTNRATAAGFWKATGRDKPVLSSTTTSRSSAAAGGISVVIGMRKTLVFYRGRAPNGRKTDWIIHEYRLQSNEHAPAQEEGWVVCRAFQKPMPNQQHIRHAACYYPSPPGSYLGAAMPAATYYYDGPVPAPRLLMNSGGGAVAAAAPPAAAHDHGGGLAAESKLQVQLLADMPPLHSPSSVDGGVVQHHSYNDQIAAAAVAAESTTVDWNLLSSLLPPAQLNFHHTPPPESPSSCSKNNNDA

SEQ ID NO: 5 - protein, 324 aa, Oryza sativa subsp. japonica
  misc_feature (14)..(148): Pfam Name: NAM Pfam Description: No apical meristem (NAM) protein
  misc_feature: Public GI ID no. 115474357
  misc_feature: Bit score of 779.1 for HMM based on sequences of Figure 42
  misc_feature: Functional Homolog Of SEQ ID NO. 2
  misc_feature: in Figure 42
MDRHEEEAGESPCVPPGFRFHPTEEELVGYYLARKVASQKIDLDIIQELDLYRIEPWDLQERCKYGGHGGDEQTEWYFFSYKDRKYPSGTRTNRATAAGFWKATGRDKPVLSSPSTRVIGMRKTLVFYKGRAPNGRKTDWIIHEYRLQSNEHAPTQEEGWVVCRAFQKPMPNQQQHRLSYGCIPGSYGAGAYAAVPDNYSLLLHHDNPSFAGRPLMSAAASALFANNNNNSVVDHSNILSSESKLHFSDMMPPLESPTIVDGEGYVSQASSCVDVDQQAGIVDWNLLTSLLPPPAHQLFHHLPSASSSKNSNNISSSGFIDDRD

SEQ ID NO: 6 - protein, 320 aa, Zea mays
  misc_feature (10)..(152): Pfam Name: NAM Pfam Description: No apical meristem (NAM) protein
  misc_feature: Public GI ID no. 212723110
  misc_feature: Bit score of 791.4 for HMM based on sequences of Figure 42
  misc_feature: Functional Homolog Of SEQ ID NO. 2
  misc_feature: in Figure 42
MDQAAEESCVPPGFRFHPTEEELVGYYLARKVASQRIDLDIIQEVDLYRIEPWDLQERCKPQHAGGGHDEQTQEWYFFSYKDRKYPSGTRTNRATAAGFWKATGRDKPVLSSSTRTTRCSRVIGMRKTLVFYKGRAPNGRKSDWIMHEYRLQSNEHAPAQEEGWVVCRAFQKPIPNQRPFFPTSYAGYYDHNLSTTARLHVDGDRHFLAGSSAAAAALLQQPPGLAGSSFPQLYSDDDLESKKQLLSIPPLESPTAMACCSDAGGYAQRSSYDEHEMMMMMIQQGGGGGEQAAAAIDWNFLDSLLSATSQLHGPSGSLLQ

SEQ ID NO: 7 - DNA, 960 bp, Populus balsamifera subsp. trichocarpa
  misc_feature: Ceres Annot ID no. 1540152
  misc_feature: Encodes the peptide sequence at SEQ ID NO. 8
atggaatcctgtgtcccaccaggctttaggtttcatccaacagaagaagaacttgtaggatactatctcaagaggaagattcactcactgaaaatcgatctagatgttatcgttgacattgatctatataacatggagccatgggacatccaagccaagtgcaagctagggtatgatgaacagaatgagtggtatttcttcagtcacaaggataggaagtatccgaccggaacacggactaacagagccactgctgccggattttggaaggcaacaggaagggacaaggccgtgctcaccaagaacagacttattgggatgaggaagaccttggtgttctacaagggacgtgcaccaaatggaaggaaaactgactggatcatgcatgaatatcgtctccaaacatctgagcatggaccccaacaggaagaagggtgggtggtttgccgggcattcaagaaaccaatccctaatcaaagacaaggttttgaagcttggaatcatgcttattatgtcaataatatcaaccatgctagacctccttcattctcagatacagtaactactacacatacggttcatccgaatcaaagtgcaagttttcatcagccttttagctcgagttcggacctcatttcacaccaagaatttttggacaataataatcggcttgttgaactcccacaactagatagccctagtacactttcaacaagttttgctcccaaagaaggtaacttccaccagaccaatgaagattacgatgatgaaaggagcaacaatagcagccaatatatcgactggaaaagtttggacaccttacttgcatcacaagtgaatgattccagtacttcatcatttccccttcaaaattttccttctataacgcaaaactatgacctagcagctgggcagcaagaccatgttagccatttccttgactgctttcctgacatataa

SEQ ID NO: 8 - protein, 319 aa, Populus balsamifera subsp. trichocarpa
  misc_feature (5)..(134): Pfam Name: NAM Pfam Description: No apical meristem (NAM) protein
  misc_feature: Ceres Annot ID no. 1540152
  misc_feature: Bit score of 827.1 for HMM based on sequences of Figure 42
  misc_feature: Functional Homolog Of SEQ ID NO. 2
  misc_feature: in Figure 42
MESCVPPGFRFHPTEEELVGYYLKRKIHSLKIDLDVIVDIDLYNMEPWDIQAKCKLGYDEQNEWYFFSHKDRKYPTGTRTNRATAAGFWKATGRDKAVLTKNRLIGMRKTLVFYKGRAPNGRKTDWIMHEYRLQTSEHGPQQEEGWVVCRAFKKPIPNQRQGFEAWNHAYYVNNINHARPPSFSDTVTTTHTVHPNQSASFHQPFSSSSDLISHQEFLDNNNRLVELPQLDSPSTLSTSFAPKEGNFHQTNEDYDDERSNNSSQYIDWKSLDTLLASQVNDSSTSSFPLQNFPSITQNYDLAAGQQDHVSHFLDCFPDI

SEQ ID NO: 9 - DNA, 1170 bp, Arabidopsis thaliana
  misc_feature: Ceres Clone ID no. 151034
  misc_feature: Encodes the peptide sequence at SEQ ID NO. 10
atcttgtttcttactcatttctctaacaattttccaaattaaatacgtttataggatcattgtggatggataatataatgcaatcgtcaatgccaccgggattccgatttcatccgacagaggaagagcttgtgggttattacctagataggaagatcaattcaatgaagagtgctttagatgtcattgtagagattgatctctacaaaatggagccatgggatatacaagcgaggtgtaaactagggtatgaagagcaaaacgagtggtacttctttagtcataaggacaggaagtaccctaccgggactaggaccaaccgagccaccgcggctgggttctggaaagccacgggtagagacaaggcggtactatcaaagaacagtgtcatcggaatgcggaagacacttgtctactacaagggtcgagctcctaatggaagaaagtccgattggatcatgcacgaataccgtctccaaaactccgagcttgccccggttcaggaggaaggctgggtggtgtgtcgagcatttaggaagccaattccaaaccagaggccattagggtacgagccatggcagaaccagctctaccacgtcgaaagtagtaacaactactcatcttcagtgacaatgaacacgagtcatcatatcggtgcatcttcatcaagtcataaccttaatcaaatgctcatgagcaataaccactacaatcctaataatacatcctcatcgatgcatcaatatggcaacattgagctcccgcagttggacagcccgagcttgtcgcctagtttagggacgaataaagatcagaacgagagtttcgagcaagaagaagagaagagctttaactgtgtggattggagaacactagataccttgcttgaaacacaagtcatacatccacataaccctaatattcttatgttcgaaacgcagtcgtataatccggcgccaagcttcccttccatgcatcaaagctataatgaggtcgaagctaatattcatcattctcttggatgcttccctgactcgtaattaaaaaaaaaacacttcatctatatattgatttgtattctatgatttaattgttccatctggaaaataacatttataactgtctatttktaaaagaagyytgtgtttattacgtagaaatttgttgttg

SEQ ID NO: 10 - protein, 324 aa, Arabidopsis thaliana
  misc_feature (9)..(138): Pfam Name: NAM Pfam Description: No apical meristem (NAM) protein
  misc_feature: Ceres Clone ID no. 151034
  misc_feature: Bit score of 812.9 for HMM based on sequences of Figure 42
  misc_feature: Functional Homolog Of SEQ ID NO. 2
  misc_feature: in Figure 42
MDNIMQSSMPPGFRFHPTEEELVGYYLDRKINSMKSALDVIVEIDLYKMEPWDIQARCKLGYEEQNEWYFFSHKDRKYPTGTRTNRATAAGFWKATGRDKAVLSKNSVIGMRKTLVYYKGRAPNGRKSDWIMHEYRLQNSELAPVQEEGWVVCRAFRKPIPNQRPLGYEPWQNQLYHVESSNNYSSSVTMNTSHHIGASSSSHNLNQMLMSNNHYNPNNTSSSMHQYGNIELPQLDSPSLSPSLGTNKDQNESFEQEEEKSFNCVDWRTLDTLLETQVIHPHNPNILMFETQSYNPAPSFPSMHQSYNEVEANIHHSLGCFPDS

SEQ ID NO: 11 - DNA, 1359 bp, Glycine max
  misc_feature: Ceres Clone ID no. 546186
  misc_feature: Encodes the peptide sequence at SEQ ID NO. 12
aacggaatttttcttacttctctctctctctctccatcatcattcatgttgttttcttctaccaagctagcctagcttcttcatctccttcaatttgtcttctcttcattaattccaattgtctttaaaccgctatctcatcagtaccagtaattgctatcatggagtcgatggagtcatgtgtcccaccagggtttcggttccacccaacagatgaagagcttgttggttattatctcaggaagaaagtcgcttctcagaaaattgaccttgatgttatcagagagatcgatctatatcgtattgaaccatgggatctccaagagagatgcaggatagggtatgaagagcagaatgagtggtatttcttcagccacaaagataaaaagtatccaacagggacaagaactaatagagctaccatggctgggttttggaaggcgacaggaagagacaaagcagtgtatgaaagagcaaaacttattgggatgaggaagacccttgttttctacaaaggaagagcccctaatggacagaaaagtgattggatcatgcacgagtataggcttgaatctgatgagaatggacctccacaggaggaaggttgggttgtgtgcagagccttcaagaagaaaaccactgggcaaacgaagactataaatattgaaggatgggagtcaagctacttctatgacgaagcaagtggggcaacaagcactttggtcgatccaattgaactcatttcaaggcaatctcagagctttctggctcaaaatttcatgtgcaagcaagagctagaagcagataacttgacttgcatgcatcaagatccgtttgtgcaacttcctcagctagaaagcccgtctttgccactagtaaagaagccaagcacagtgtccctagtatcagacaataataacgaaggtgaagacaatcaaaacaggttgttattcaacaacaacaacacaaagaaagtcactactgattggagagcccttgacaagtttgtagcctctcaactaagtcaagaagtaaacacgcatgaaactaatgttggagtactctcatcaagctttgaaccccatgatgataaccacgacatggcactgctgctactgcagagtagtagggatgaagggaacaggttaagcccgtttctaaatacaagctccgactgtgacaatgggatatgcgtattcgaaaaatgatccaagaagaaaaagaagtgcgtggaaacgatttttaattatttgtagtagtaccatgtgttaaattaatgttctatggatgctgggacaaagacatactatatttttgtaaaaaaaaaatatgtgtggatcagaagaattaaaactctct

SEQ ID NO: 12 - protein, 348 aa, Glycine max
  misc_feature (8)..(137): Pfam Name: NAM Pfam Description: No apical meristem (NAM) protein
  misc_feature: Ceres Clone ID no. 546186
  misc_feature: Bit score of 791.3 for HMM based on sequences of Figure 42
  misc_feature: Functional Homolog Of SEQ ID NO. 2
  misc_feature: in Figure 42
MESMESCVPPGFRFHPTDEELVGYYLRKKVASQKIDLDVIREIDLYRIEPWDLQERCRIGYEEQNEWYFFSHKDKKYPTGTRTNRATMAGFWKATGRDKAVYERAKLIGMRKTLVFYKGRAPNGQKSDWIMHEYRLESDENGPPQEEGWVVCRAFKKKTTGQTKTINIEGWESSYFYDEASGATSTLVDPIELISRQSQSFLAQNFMCKQELEADNLTCMHQDPFVQLPQLESPSLPLVKKPSTVSLVSDNNNEGEDNQNRLLFNNNNTKKVTTDWRALDKFVASQLSQEVNTHETNVGVLSSSFEPHDDNHDMALLLLQSSRDEGNRLSPFLNTSSDCDNGICVFEK

SEQ ID NO: 13 - protein, 313 aa, Vitis vinifera
  misc_feature (7)..(136): Pfam Name: NAM Pfam Description: No apical meristem (NAM) protein
  misc_feature: Public GI ID no. 157352570
  misc_feature: Bit score of 788.3 for HMM based on sequences of Figure 42
  misc_feature: Functional Homolog Of SEQ ID NO. 2
  misc_feature: in Figure 42
MEMESCVPPGFRFHPTEQELVDYYLKRKINSLKIDLDVIIEIDLYRMEPWDIQDRCKLGYDEQNEWYFFSHKDKKYPTGTRTNRATAAGFWKATGRDKAVILRNRIIGMRKTLVFYKGRAPNGRKTDWIMHEYRLQTSEHGPPQAKGWVVCRAFKKPTSSHKQSYEAWSHAYYVRDSSHVEPPSLPATLSPMHMVHPNQGFYQRYFGSEQELMYNHGIMNNQAFEIPQLDSPSALSPSLATKEVFEHNGMNNSEYFEDENSDHAKQYIDWKNLDDLLASQLADTTSSAPLVPYNSELGAQNPVSHLLGCFPDL

SEQ ID NO: 14 - DNA, 1109 bp, Zea mays
  misc_feature: Ceres Clone ID no. 1707861
  misc_feature: Encodes the peptide sequence at SEQ ID NO. 15
tgcttgagcaagctctgctggtggcttgctagctatttctatcgatccagcagctatagctatgcatgcatgcagcaatggcggacgatgagcagcggcaggcagcagcatatgcgtgcgtgccgccagggttcaggttccacccgacggaggaggagctggtggggtactacctcgccaggaaggtggcttcccagaagatcgacgacctcgacatcatcagggaggtggatctctacaggatcgagccatgggatctccaggtccaggagaggtgcggctactacggcggcggccaggatcaggaggagccgacggagtactacttcttcagctacaaggaccgcaagtacccgagcggcacgcgcaccaaccgcgccaccgccgccggcttctggaaggccacgggcagggacaagccggtgctctcctccagcagcagcggcgtcgtcatcggcatgcggaagacgctggtgttctaccgcggccgcgcgcccaacggccgcaagacggactggatcatccacgagtaccggctgcagagcaacgagcacgcccccgcgcaggaggaaggatgggtcgtctgccgcgccttccacaagcccatgcccaaccaccaccaccacatgatcaggcacgccgccgcttcctgctgctactactatcctgcccctgcgcctcccgccgccggtctgccgccgcataatggccacctgcacctccacagcccctccgcggagtcggcggtggattggaacctgctgagcagcctgctaccgcccgggcagctggatttcgtccatcacacgctgacaccgccgccggcttcttctccttcttcctgctccacgacgaccaccaccaccaccaccaggaacaataacaatgaatgatgcgtgacaagacatcttaatttttccagctagcaatccaagacgactgattattatatctactgttttaaccaaccacgcccacactacacactagctagcttacgtacgtagcgtatatatatattttgcattgtagggttactaggaactcatcatttcacgtgtacgagcttgagatctatctggaactgatatcagattgcttgatcatct

SEQ ID NO: 15 - protein, 275 aa, Zea mays
  misc_feature (19)..(159): Pfam Name: NAM Pfam Description: No apical meristem (NAM) protein
  misc_feature: Ceres Clone ID no. 1707861
  misc_feature: Bit score of 476.5 for HMM based on sequences of Figure 42
  misc_feature: Functional Homolog Of SEQ ID NO. 2
MHAAMADDEQRQAAAYACVPPGFRFHPTEEELVGYYLARKVASQKIDDLDIIREVDLYRIEPWDLQVQERCGYYGGGQDQEEPTEYYFFSYKDRKYPSGTRTNRATAAGFWKATGRDKPVLSSSSSGVVIGMRKTLVFYRGRAPNGRKTDWIIHEYRLQSNEHAPAQEEGWVVCRAFHKPMPNHHHHMIRHAAASCCYYYPAPAPPAAGLPPHNGHLHLHSPSAESAVDWNLLSSLLPPGQLDFVHHTLTPPPASSPSSCSTTTTTTTTRNNNNE

SEQ ID NO: 16 - DNA, 1002 bp, Sorghum bicolor
  misc_feature: Ceres Annot ID no. 8703721
  misc_feature: Encodes the peptide sequence at SEQ ID NO. 17
atggatcagcaggaggagtcttgtgttcccccaggcttcaggttccaccctacagaggaagagctggtgggatactaccttgccaggaaggtggcctcccagaagatcgacctcgacatcatccaggaggtcgatctctacaggatagagccatgggatctgcaagagcggtgcaggcagcacgccggcggtgggcacgacgagcagacgacggagtggtacttcttcagctacaaggaccgcaagtaccccagcgggacgaggaccaaccgcgccacggcggccggattctggaaggccaccggcagggacaagccggtgctgtcgtcgtcgtgcaccaggaccagcaggtgcggcggcggcagcagggtcgtcatcggcatgaggaagacgctggtgttttacaagggcagggcccccaacggcaggaagagcgactggatcatgcacgagtaccgactccaatccaacgagcacgcacccgcgcaggaggaaggctgggtggtgtgccgcgcattccagaagcctatccccaaccagcagaggcccttcttccccaccagctacggcgccggttactacgaccaccacctctcaacgacgacgaccactcggctgaacgtcgacggcgaccgccatatgcatttcctgggctcatcatcagcactgctacaccaccctgcaggcctgctcagcagcttcccgccttcttcgttatactctgacgacgacttggagtccaagaaacatctgttcagtatgccgccgctggagagccccactgccgccatagcctgctgttctgatggcggcggcggcggctacgctccagctactacgcagagaagcagctacgatgaacatgagctgatgatccaacaggaaggaggagaaggagagcaagctgcagccgctgccggcgccatcgactggaactttctggacagcctgctgtccgcgacgtcgcaactccatgggccctcgggatccttgttgcagtga

SEQ ID NO: 17 - protein, 333 aa, Sorghum bicolor
  misc_feature (9)..(155): Pfam Name: NAM Pfam Description: No apical meristem (NAM) protein
  misc_feature: Ceres Annot ID no. 8703721
  misc_feature: Bit score of 663.2 for HMM based on sequences of Figure 42
  misc_feature: Functional Homolog Of SEQ ID NO. 2
MDQQEESCVPPGFRFHPTEEELVGYYLARKVASQKIDLDIIQEVDLYRIEPWDLQERCRQHAGGGHDEQTTEWYFFSYKDRKYPSGTRTNRATAAGFWKATGRDKPVLSSSCTRTSRCGGGSRVVIGMRKTLVFYKGRAPNGRKSDWIMHEYRLQSNEHAPAQEEGWVVCRAFQKPIPNQQRPFFPTSYGAGYYDHHLSTTTTTRLNVDGDRHMHFLGSSSALLHHPAGLLSSFPPSSLYSDDDLESKKHLFSMPPLESPTAAIACCSDGGGGGYAPATTQRSSYDEHELMIQQEGGEGEQAAAAAGAIDWNFLDSLLSATSQLHGPSGSLLQ

SEQ ID NO: 18 - protein, 293 aa, Oryza sativa subsp. indica
  misc_feature (14)..(135): Pfam Name: NAM Pfam Description: No apical meristem (NAM) protein
  misc_feature: Public GI ID no. 125559843
  misc_feature: Bit score of 612.3 for HMM based on sequences of Figure 42
  misc_feature: Functional Homolog Of SEQ ID NO. 2
MDRHEEEAGESPCVPPGFRFHPTEEELVGYYLARKVASQKIDLDIIQELDLYRIEPWDLQERCKYGGHGGDEQTEWYFFSYKDRKYPSGTRTNRATAAGFWKATGRDKPVLSSPSTRVIGMRKTLEEGWVVCRAFQKPMPNQQQHRLSYGCIPGSYGAGAYAAVPDNYSLLLHHDNPSFAGRPLMSAAASALFANNNNNSVVDHSNILSSESKLHFSDMMPPLESPTIVDGEGYVSQASSCVDVDQQAGIVDWNLLTSLLPPPAHQLFHHLPSASSSKNSNNISSSGFIDDRD

SEQ ID NO: 19 - DNA, 969 bp, Populus balsamifera subsp. trichocarpa
  misc_feature: Ceres Annot ID no. 1533215
  misc_feature: Encodes the peptide sequence at SEQ ID NO. 20
atggagatggaatcctgtgtcccaccaggctttagatttcacccaacagaagaagaacttgtaggttactacctcaagaggaagattgactcacagaaaatcgatctagatgttatcgctaacattgatctctacaaaatggagccgtgggacatccaagccagatgcaatctagggtatgctgaacagaatgagtggtatttcttcagtcacaaggacaggaagtatccgaccggaacacggactaatagagccactgctgctggattttggaaggcaaccggaagggacaaggccgtgctctccaagaacaggcttatagggatgaggaagaccttagtgttctacaagggacgtgcacccaatggaaggaaaactgactggatcatgcatgaatatcgtctccaaacatctgaacatggaccccctcaggaagagggatgggtggtatgcagggcattcaagaaaccaagtcctaatcaaagacaaggttttgaagcttggagtcatgcttattatctcaatgatatcaaccatgctagacctccttcattctcagatactgtaactactgcacataatatggttcgaccgaatcaaggtgcgagttttcaacagcccttcggctcgaattctgacctcgtttcaaaccaaacatttttggataacaataaccagcttgttgaactcccagaactagatagccctagtacactctcaacaagttttgcagcaaaagaaggcaatttccaccagaccaatgaagattacgatgaagaaaggagcaataatagcagccaatatatcgactggaaaaactttgacaccttactagcgtcacaagtgactgattcaagtacttcatatccccttcaagacttgccatctatacctcaaaactatgacctagcagctggccagcaagaccaatatgttagccatttccttgactgctttcctgacttataa

SEQ ID NO: 20 - protein, 320 aa, Populus balsamifera subsp. trichocarpa
  misc_feature (5)..(134): Pfam Name: NAM Pfam Description: No apical meristem (NAM) protein
  misc_feature: Ceres Annot ID no. 1533215
  misc_feature: Bit score of 757.9 for HMM based on sequences of Figure 42
  misc_feature: Functional Homolog Of SEQ ID NO. 2
MESCVPPGFRFHPTEEELVGYYLKRKIDSQKIDLDVIANIDLYKMEPWDIQARCNLGYAEQNEWYFFSHKDRKYPTGTRTNRATAAGFWKATGRDKAVLSKNRLIGMRKTLVFYKGRAPNGRKTDWIMHEYRLQTSEHGPPQEEGWVVCRAFKKPSPNQRQGFEAWSHAYYLNDINHARPPSFSDTVTTAHNMVRPNQGASFQQPFGSNSDLVSNQTFLDNNNQLVELPELDSPSTLSTSFAAKEGNFHQTNEDYDEERSNNSSQYIDWKNFDTLLASQVTDSSTSYPLQDLPSIPQNYDLAAGQQDQYVSHFLDCFPDL

SEQ ID NO: 21 - DNA, 1107 bp, Sorghum bicolor
  misc_feature: Ceres Annot ID no. 8643427
  misc_feature: Encodes the peptide sequence at SEQ ID NO. 22
atggaatcatgcgtgcccccgggcttcaggttccaccccaccgacgaggagctcgtcggctactacctcaggaagaaggtggcctctcagaagatcgacctcgacgtcatacgcgacatcgatctctaccgcatcgagccatgggatcttcaagaacattgcgggatcgggtacgaggagcagaacgagtggtacttcttcagctacaaggaccgcaagtacccgacagggacacggaccaacagggccaccatggccgggttctggaaggcgacgggcagggacaaggcggtgcacgacaaaagccgcctcatcggcatgaggaagacgctcgtcttctacaagggaagggcgcccaacgggcagaagaccgactggatcatgcacgagtaccggctggagactgacgagaacgcgccaccacaggaagaaggctgggtggtgtgccgggcgttcaagaagagaacagcgtacccagcaaggagcatggcgatggcatgggaccccagctacgcctatcgcgaggtcagcgccatgggcgcggcggtggcagcggaggcggcggcgttcgtggaccccaatgcggcgtacgctcagatcaggcgccagtccaacaagagcgcgcgcttcaagcaggaggccgagctggacggcgctgctgccgcgttgctgcagtactcctccagccacctagtcgagctgccgcagctcgagagcccgtcggcgccgctcgcgccggccaaccagagccaggcgtcagccgctgatgaggtggtggtggacggcgccgacagcggtaggcggccgggcaagaaggcgcgggctgataagatggccacggactggagggcgctcgacaagttcgtcgcgtcacagctcagccccgccgcggagtgcggcggcagcttggaggcggccgcagcagcagcgtcgacggccgccgccggcaacgtgggctcacagctggaccacgttgaggatgatgacgacatggcggcattgctgttcctcaacagcgacgggagggaggaagcggagaggtggacggggctgctcggccccgccggcggggacggcgactttggactgtgtgtgttcgagaaatga

SEQ ID NO: 22 - protein, 368 aa, Sorghum bicolor
  misc_feature (5)..(134): Pfam Name: NAM Pfam Description: No apical meristem (NAM) protein
  misc_feature: Ceres Annot ID no. 8643427
  misc_feature: Bit score of 527.0 for HMM based on sequences of Figure 42
  misc_feature: Functional Homolog Of SEQ ID NO. 2
MESCVPPGFRFHPTDEELVGYYLRKKVASQKIDLDVIRDIDLYRIEPWDLQEHCGIGYEEQNEWYFFSYKDRKYPTGTRTNRATMAGFWKATGRDKAVHDKSRLIGMRKTLVFYKGRAPNGQKTDWIMHEYRLETDENAPPQEEGWVVCRAFKKRTAYPARSMAMAWDPSYAYREVSAMGAAVAAEAAAFVDPNAAYAQIRRQSNKSARFKQEAELDGAAAALLQYSSSHLVELPQLESPSAPLAPANQSQASAADEVVVDGADSGRRPGKKARADKMATDWRALDKFVASQLSPAAECGGSLEAAAAAASTAAAGNVGSQLDHVEDDDDMAALLFLNSDGREEAERWTGLLGPAGGDGDFGLCVFEK

SEQ ID NO: 23 - DNA, 1020 bp, Sorghum bicolor
  misc_feature: Ceres Annot ID no. 8734475
  misc_feature: Encodes the peptide sequence at SEQ ID NO. 24
atgggtatgagcagcgcacaagcgcagacgcagcagctggttcctccaggttttcgattccatccgacagacgaagagctggtggactactacctcaggaagaaggtggcctcaagaaggatcgacctcaatgtcatcaaagatgtcgatctttacaagatagagccatgggatctccaagagaagtgcagattgggaggacctggtgaggaggagcagaacgagtggtacttcttcagccacaaagacaagaaatacccgacgggcacccggaccaaccgtgccaccgccgctgggttttggaaggccaccggcagagacaagccgatctatgctaacaagcagcggcagctggtgggcatgaggaagacgctggtgtactacaagggcagggctcccaatggccacaagtccgattggatcatgcacgagtaccgccttgaaaccaatgagaatggccctccccaggaggaaggatgggtagtatgtagggtgttcaaaaagcgactaccaacaacaagaagagaatctgaccatgatgcaccatgctggtatgtcgatgatgatggaaccttcatgcatgaccttaactctcccatgagtggattgccaccacaccacagcatcgcacagctgcaagaacaacacctccaaatgctgaacaatagctacaagagggaactgaagctacaattccagatgccaagccatcatattctaaatgccattcctcacgagctagagagcccatccttccattctcttttggtctccccagaccatcaaaccaaagtgcaacatgcccaccaacatgttcagctcatggagcatgcagtcgaccaagtcactgattggagagttctggacaagtttgttgcgtctcaacttagtaacgatgcagcaaagggtgtagattatactgatgaaggagatatccttcaggtcaatgagaagcaagaggtggctaccgattatgcatcaacgtcaacatccagcagccaagttgatccatggaagtga

SEQ ID NO: 24 - protein, 339 aa, Sorghum bicolor
  misc_feature (14)..(148): Pfam Name: NAM Pfam Description: No apical meristem (NAM) protein
  misc_feature: Ceres Annot ID no. 8734475
  misc_feature: Bit score of 465.3 for HMM based on sequences of Figure 42
  misc_feature: Functional Homolog Of SEQ ID NO. 2
MGMSSAQAQTQQLVPPGFRFHPTDEELVDYYLRKKVASRRIDLNVIKDVDLYKIEPWDLQEKCRLGGPGEEEQNEWYFFSHKDKKYPTGTRTNRATAAGFWKATGRDKPIYANKQRQLVGMRKTLVYYKGRAPNGHKSDWIMHEYRLETNENGPPQEEGWVVCRVFKKRLPTTRRESDHDAPCWYVDDDGTFMHDLNSPMSGLPPHHSIAQLQEQHLQMLNNSYKRELKLQFQMPSHHILNAIPHELESPSFHSLLVSPDHQTKVQHAHQHVQLMEHAVDQVTDWRVLDKFVASQLSNDAAKGVDYTDEGDILQVNEKQEVATDYASTSTSSSQVDPWK

SEQ ID NO: 25 - protein, 341 aa, Oryza sativa subsp. japonica
  misc_feature (8)..(137): Pfam Name: NAM Pfam Description: No apical meristem (NAM) protein
  misc_feature: Public GI ID no. 115483104
  misc_feature: Bit score of 531.4 for HMM based on sequences of Figure 42
  misc_feature: Functional Homolog Of SEQ ID NO. 2
MVIMESCVPPGFRFHPTDEELVGYYLRKKVASQKIDLDVIRDVDLYRIEPWDLQEHCRIGYEEQSEWYFFSYKDRKYPTGTRTNRATMTGFWKATGRDKAVRERSRLIGMRKTLVFYKGRAPNGHKTDWIVHEYRLESDENAPPQEEGWVVCRAFKKRTMQPPRSSIGAWEASYSYHDPAVFVGGGEHFKQEAAAELDGVAAAAGANAFLRYSTRLAELPQLESPPLPSQGSQAASAVVDGEEDNADSSRRPGGGGGAAAAVTTDWRAFDKFVASQLSPEEQHTCRATDDDDMAALLLLDGGGQEDDAGRWLGSAGLLSAVAADATTDCGLGTSCVPGDIN

SEQ ID NO: 26 - protein, 364 aa, Oryza sativa subsp. japonica
  misc_feature (17)..(153): Pfam Name: NAM Pfam Description: No apical meristem (NAM) protein
  misc_feature: Public GI ID no. 115465900
  misc_feature: Bit score of 437.4 for HMM based on sequences of Figure 42
  misc_feature: Functional Homolog Of SEQ ID NO. 2
MDGSSMSSSSTQQQAQVPPGFRFHPTDEELVDYYLRKKVAARRIDLNVIKDVDLYKIEPWDLQERCRINGGSAAEEQNEWYFFSHKDKKYPTGTRTNRATAAGFWKATGRDKPIYATKQHSLLVGMRKTLVYYRGRAPNGHKSDWIMHEYRLETTETAPPQEEGWVVCRVFKKRLPTTRRDSDHDAPCGSWYVDEDAPGAFMSPMMITRSSILRPHQHHAGITLQEQHLHTTYKHRDLTTKIQQLQVPAAGHHLLNTMPHDLESSTSSFHSLLVSPDHHQINMHHAQADPFFDDMHAVDQATTTDWRVLDKFVASQLSNDATNKPADHYTDEGDILQVSDKQQEVAAADYASTSTSSSQIDPWK

SEQ ID NO: 27 - protein, 366 aa, Oryza sativa subsp. japonica
  misc_feature (5)..(134): Pfam Name: NAM Pfam Description: No apical meristem (NAM) protein
  misc_feature: Public GI ID no. 115450461
  misc_feature: Bit score of 526.6 for HMM based on sequences of Figure 42
  misc_feature: Functional Homolog Of SEQ ID NO. 2
MESCVPPGFRFHPTDEELVGYYLRKKVASQKIDLDVIRDIDLYRIEPWDLQEHCGIGYDEQSEWYFFSYKDRKYPTGTRTNRATMAGFWKATGRDKAVHDKSRLIGMRKTLVFYKGRAPNGQKTDWIMHEYRLETDENAPPQEEGWVVCRAFKKRTAYPARSMVETWDYSLHERNIMSAAAAAAFADPSAAYAQMRRQHRSGRFKQEAELDGAATALLHYSSHLAELPQLESPSAAAAPLQPNPSQLATAGEDDDCKGDNGGRRAKKARAAGDKVATTTDWRALDKFVASQLSPGECGSMEATAEAAAAAVAGVSSPLDHGDDDMAALLFLNSDERDEVDRWTGLLGSGAGASGVDGDLGICVFDK

SEQ ID NO: 28 - DNA, 2088 bp, Zea mays
  misc_feature: Ceres Clone ID no. 1579097
  misc_feature: Encodes the peptide sequence at SEQ ID NO. 29
gcgagcgagcctgcaagctgcaccgtaccctagctactctcttcttcctcacctccatctctttcactgttgccgcctttgcctaatattctcaccgccgccatagattgcaaatcgagctccgatccatctgtttctaactccagctagctagctcactcttctcggcggctcttgctttgttttccccatatacatacaagaggtagatcaattaatccggtcagttcatttattagttggattggatcggcagcgcgcaaccccgttcgtctccgttcccgtttgcacggcagtcgtcctagcttcattcgctggcctccctttgatcttcctcggtccctccctctttctcctccgatcccatagcttctctctctgtgtgtgctaaaaacagctagctaggttaggggagaggcagcagagacagggacaatctagagattaacagacaagatcgatcggtcgagcttgcgcgcatgcactgaattgattctcaagcgcgcagagatccatgaactctcatgcatgcatgcatgtcatagcaagagataatgacctagctagctagctggggagagaatacccacacatagatcagcaagagacagggagaccaaagataaaaatagaggtccattcctgtctccacctgcacctctacgtactattgctgcagctactactagtagagatctctgcaaggttttcgtcacatatatctctctgatttgggaaagcaggttgatctagctagctagatgggcatgagcagcacacaagcagcagcgcagacacagcagcagcagcagcagctggttcctccaggctttcggttccatcccacagacgaagagctggtggactactacctcaggaagaaggtggcctcaagaaggatcgacctcaatgtcatcaaagatgtcgatctttacaagatagagccatgggatctccaagacaagtgcagactgggaggccctggtgaggaggagcagaacgagtggtacttcttcagccacaaggacaagaagtacccgacgggcacccggaccaaccgcgccactgccgccgggttctggaaggcaaccggcagagacaagcccatctacgccaacaagcagcggcagctggtgggcatgaggaagacgctggtgtactacaagggcagagctcccaatggccacaagtccgactggatcatgcacgagtaccgccttgaaaccaatgagaatggccctccacaggaggaaggatgggtagtatgcagggtgttcaaaaagcgactaccaacaacaagaagagaatctgaccatgatgcaccatgctggtatgtcgatgaagatggaaccttcatgcatgaccttaactcccccatgggtggactgccaccacaccacagcatcgcacagctgcacgaacaacacctccagatgctcaacaacagctacaagaggcgggaactcaagctgcaattccagatgccaagccatcatatcctcaatgccgccgccgccattcctcacgagctagagcccccatcctttcattctcttttggtctcaccagaccatcatcaagctgctaaagcgcaccaccgtgctgttcagctcatggacgagcatgcagccgaccaggtcactgattggagagttctggacaagtttgttgcatctcagcttagtcacgacgatgcggccaagggtgtcgattatactgatgaaggagatatccttcagatcaatgagaagcaagctaccgagtatgcatcaacctcaacatccagcagccaagttgatccatggaagtgacggtgatcatgaaattaatcaaaaatactgcctcctcgtataaaatattatattaagagctacaataacgatgatcggatcaattgggacatataagtaatttgatctctacatagtacgtggcgtgtaaatgagactacatacatattgagttgtgtattggtgtactacttattattatatcccttcaggatgttgtactaataatatacttagcatatgcatgcacaccgcgtttctatatgaataataaagtcatggacaacttggaaacttc

SEQ ID NO: 29 - protein, 349 aa, Zea mays
  misc_feature (20)..(154): Pfam Name: NAM Pfam Description: No apical meristem (NAM) protein
  misc_feature: Ceres Clone ID no. 1579097
  misc_feature: Bit score of 456.0 for HMM based on sequences of Figure 42
  misc_feature: Functional Homolog Of SEQ ID NO. 2
MGMSSTQAAAQTQQQQQQLVPPGFRFHPTDEELVDYYLRKKVASRRIDLNVIKDVDLYKIEPWDLQDKCRLGGPGEEEQNEWYFFSHKDKKYPTGTRTNRATAAGFWKATGRDKPIYANKQRQLVGMRKTLVYYKGRAPNGHKSDWIMHEYRLETNENGPPQEEGWVVCRVFKKRLPTTRRESDHDAPCWYVDEDGTFMHDLNSPMGGLPPHHSIAQLHEQHLQMLNNSYKRRELKLQFQMPSHHILNAAAAIPHELEPPSFHSLLVSPDHHQAAKAHHRAVQLMDEHAADQVTDWRVLDKFVASQLSHDDAAKGVDYTDEGDILQINEKQATEYASTSTSSSQVDPWK

SEQ ID NO: 30 - protein, 376 aa, Oryza sativa subsp. japonica
  misc_feature (52)..(181): Pfam Name: NAM Pfam Description: No apical meristem (NAM) protein
  misc_feature: Public GI ID no. 38605889
  misc_feature: Bit score of 444.2 for HMM based on sequences of Figure 42
  misc_feature: Functional Homolog Of SEQ ID NO. 2
MEVEARIHLLLIKLVFYRSAEERESASVHINLLPVRELYFDPRKKMDAFSHVPPGFRFHPTDEELVDYYLRKKVALKKIDLDVIKDIDLYKIEPWDLQEQCKIGNEEQNEWYFFSHKDKKYPTGTRTNRATTAGFWKATGRDKPIYVKNCLVGMRKTLVFYRGRAPNGQKSDWIMHEYRLETNEYGAPQEEGWVVCRVFKKRVAAVQRAAGDGGDSPFWFNEHVAFMAPAPGLDSPYHGHRQSHPCKLEVEYHHHLLPQEAAPFMHLPRLESPKLPAADIIVATAASSALQPCGHTTAQQLQLQIEPVYVTADASAADWRDLDKLVASQFGHGDSTAKEPSYCNPVQVFQVEGKQEDSLDYVSTSASCGGEEDLWK

SEQ ID NO: 31 - DNA, 1134 bp, Arabidopsis thaliana
  misc_feature: Ceres Annot ID no. 849986
  misc_feature: Encodes the peptide sequence at SEQ ID NO. 32
atggaatcggtggatcaatcatgtagtgttcctccgggattcagattccatccaacagatgaagagctcgttggttactatttaaggaaaaaagttgcatcgcaaaagatcgatcttgatgtcataagagatattgatctctacagaatcgaaccatgggatttacaagagagctgccgaatcggatatgaggaaagaaatgaatggtatttcttcagccacaaagataagaaatatccaacaggaacaagaacaaacagagcgaccatggctgggttttggaaagccacgggccgagacaaggctgtttacgacaagtcaaaactgattggtatgagaaaaacacttgtgttctacaaaggaagagcccctaatggccaaaaaaccgattggatcatgcatgaataccggctagagtcagatgagaatgcacctcctcaggaagaagggtgggtggtttgtagagcgttcaagaaaaagccaatgaccgggcaagccaagaacacagaaacttggagctcaagttacttttacgacgaattaccgagtggagtacgctcagttacggagcctcttaactacgtatctaagcagaaacaaaacgtttttgcacaagatttaatgttcaagcaagaactagaaggatcagatatcggtttaaacttcatccactgcgatcaattcattcaacttccgcagcttgaaagcccttcactccctcttaccaaaagaccagtgagcttgacgtcaattacatcattggagaagaataaaaatatctacaaaagacatttaatagaagaggatgtgagcttcaatgcgctaataagtagtggaaataaagataagaagaagaagaaaacatcagtgatgacgacggattggagagcactcgataaatttgttgcttctcaacttatgagccaagaagatggagtttcgggttttggaggtcatcatgaagaagataacaataaaatcggtcattacaataacgaagagagcaataacaagggatcagtagagactgcttcttccacgttattgagtgatagagaagaagagaacagattcatcagtggattattgtgttccaacttggactatgacttatatagggatttacatgtttga

SEQ ID NO: 32 - protein, 377 aa, Arabidopsis thaliana
  misc_feature (10)..(139): Pfam Name: NAM Pfam Description: No apical meristem (NAM) protein
  misc_feature: Ceres Annot ID no. 849986
  misc_feature: Bit score of 567.5 for HMM based on sequences of Figure 42
  misc_feature: Functional Homolog Of SEQ ID NO. 2
MESVDQSCSVPPGFRFHPTDEELVGYYLRKKVASQKIDLDVIRDIDLYRIEPWDLQESCRIGYEERNEWYFFSHKDKKYPTGTRTNRATMAGFWKATGRDKAVYDKSKLIGMRKTLVFYKGRAPNGQKTDWIMHEYRLESDENAPPQEEGWVVCRAFKKKPMTGQAKNTETWSSSYFYDELPSGVRSVTEPLNYVSKQKQNVFAQDLMFKQELEGSDIGLNFIHCDQFIQLPQLESPSLPLTKRPVSLTSITSLEKNKNIYKRHLIEEDVSFNALISSGNKDKKKKKTSVMTTDWRALDKFVASQLMSQEDGVSGFGGHHEEDNNKIGHYNNEESNNKGSVETASSTLLSDREEENRFISGLLCSNLDYDLYRDLHV

SEQ ID NO: 33 - DNA, 1017 bp, Populus balsamifera subsp. trichocarpa
  misc_feature: Ceres Annot ID no. 1486736
  misc_feature: Encodes the peptide sequence at SEQ ID NO. 34
atggaatcctgtgtcccaccaggctttaggtttcatccaacagaagaagaacttgtaggatactatctcaagaggaagattcactcactgaaaatcgatctagatgttatcgttgacattgatctatataacatggagccatgggacatccaagccaagtgcaagctagggtatgatgaacagaatgagtggtatttcttcagtcacaaggataggaagtatccgaccggaacacggactaacagagccactgctgccggattttggaaggcaacaggaagggacaaggccgtgctcaccaagaacagacttattgggatgaggaagaccttggtgttctacaagggacgtgcaccaaatggaaggaaaactgactggatcatgcatgaatatcgtctccaaacatctgagcatggaccccaacaggcaagttctttctccattccaataacaacacttttttctttttcaacaatattgcacgaagaagggtgggtggtttgccgggcattcaagaaaccaatccctaatcaaagacaaggttttgaagcttggaatcatgcttattatgtcaataatatcaaccatgctagacctccttcattctcagatacagtaactactacacatacggttcatccgaatcaaagtgcaagttttcatcagccttttagctcgagttcggacctcatttcacaccaagaatttttggacaataataatcggcttgttgaactcccacaactagatagccctagtacactttcaacaagttttgctcccaaagaaggtaacttccaccagaccaatgaagattacgatgatgaaaggagcaacaatagcagccaatatatcgactggaaaagtttggacaccttacttgcatcacaagtgaatgattccagtacttcatcatttccccttcaaaattttccttctataacgcaaaactatgacctagcagctgggcagcaagaccatgttagccatttccttgactgctttcctgacatataa

SEQ ID NO: 34 - protein, 338 aa, Populus balsamifera subsp. trichocarpa
  misc_feature (5)..(134): Pfam Name: NAM Pfam Description: No apical meristem (NAM) protein
  misc_feature: Ceres Annot ID no. 1486736
  misc_feature: Bit score of 798.6 for HMM based on sequences of Figure 42
  misc_feature: Functional Homolog Of SEQ ID NO. 2
MESCVPPGFRFHPTEEELVGYYLKRKIHSLKIDLDVIVDIDLYNMEPWDIQAKCKLGYDEQNEWYFFSHKDRKYPTGTRTNRATAAGFWKATGRDKAVLTKNRLIGMRKTLVFYKGRAPNGRKTDWIMHEYRLQTSEHGPQQASSFSIPITTLFSFSTILHEEGWVVCRAFKKPIPNQRQGFEAWNHAYYVNNINHARPPSFSDTVTTTHTVHPNQSASFHQPFSSSSDLISHQEFLDNNNRLVELPQLDSPSTLSTSFAPKEGNFHQTNEDYDDERSNNSSQYIDWKSLDTLLASQVNDSSTSSFPLQNFPSITQNYDLAAGQQDHVSHFLDCFPDI

SEQ ID NO: 35 - protein, 354 aa, Oryza sativa subsp. japonica
  misc_feature (7)..(136): Pfam Name: NAM Pfam Description: No apical meristem (NAM) protein
  misc_feature: Public GI ID no. 125583042
  misc_feature: Bit score of 433.6 for HMM based on sequences of Figure 42
  misc_feature: Functional Homolog Of SEQ ID NO. 2
MDTFSHVPPGFRFHPTDEELVDYYLRKKVASKKIDLDVIKDVDLYKIEPWDLQEKCKIGMEEQNDWYFFSHKDKKYPTGTRTNRATGAGFWKATGRDKPIYARSCLVGMRKTLVFYKGRAPNGQKSDWIMHEYRLETNENGTTPEEGWVVCRVFKKRVATVRRMADGSPCWFDDHGAVGAFMPDLSSPRQLLPHHHHHHPGSSAALYHGHHHQQLQQMRPSCSIFLSWRAPSRRRRLLRRRAYIGGHLGSSSSTALTTHDDEASGSAAQQQPPSLEAVYMAGAGVGIGVDASVTDWRLLDKFVASQLLSKESMSSYGSHPAQVFQAADGGKHEEALDYASTSAGSGGGEADLWK

SEQ ID NO: 36 - DNA, 1098 bp, Arabidopsis thaliana
  misc_feature: Ceres Annot ID no. 827270
  misc_feature: Encodes the peptide sequence at SEQ ID NO. 37
atggagccaatggaatcttgtagcgttcctccaggatttaggttccatccgacggacgaagagcttgtcgggtactatctaaggaagaaaatcgcatcgcaaaagattgatctcgacgtcatcagagacatcgatctctacagaatagaaccatgggatctacaagaacaatgtcgaatcggttatgaggaacaaaatgaatggtatttttttagtcacaaggacaagaaatatccaacggggacaagaactaatagagcgaccatggctggattttggaaagccacgggaagagacaaagctgtttacgacaaaacaaaactaattggtatgaggaaaacacttgtgttctacaaaggacgtgcacctaatggcaagaaatccgattggatcatgcatgagtaccggctcgagtcagatgagaatgcaccgccccaggaagaaggatgggtggtttgtagagcattcaaaaaaagagctacagggcaagccaagaacacggaaacttggagctcaagttacttttacgatgaagttgcaccgaatggagttaactcggttatggaccccattgattacatatctaagcagcaacataacatttttgggaaaggtttgatgtgtaagcaagaactagaaggaatggttgatggtataaactatatacaatcgaatcaattcattcagctcccacaactccaaagcccttctctcccgctgatgaaaagaccttcaagctcgatgtccataacatcaatggataacaattacaactataaactcccattagcggatgaagaaagcttcgagtcattcataagaggagaggatagaaggaagaagaaaaagcaagtaatgatgacgggaaattggagagagttagacaagtttgttgcttcacaacttatgagccaagaagacaatggaacttcaagtttcgcaggtcatcatatagttaatgaagataaaaacaacaatgatgtggagatggattcgtcaatgtttttgagcgaaagagaagaagaaaacaggttcgtcagtgaattcttgagtacaaactcggattatgatattgggatttgcgtatttgataattga

SEQ ID NO: 37 - protein, 365 aa, Arabidopsis thaliana
  misc_feature (9)..(138): Pfam Name: NAM Pfam Description: No apical meristem (NAM) protein
  misc_feature: Ceres Annot ID no. 827270
  misc_feature: Bit score of 573.7 for HMM based on sequences of Figure 42
  misc_feature: Functional Homolog Of SEQ ID NO. 2
MEPMESCSVPPGFRFHPTDEELVGYYLRKKIASQKIDLDVIRDIDLYRIEPWDLQEQCRIGYEEQNEWYFFSHKDKKYPTGTRTNRATMAGFWKATGRDKAVYDKTKLIGMRKTLVFYKGRAPNGKKSDWIMHEYRLESDENAPPQEEGWVVCRAFKKRATGQAKNTETWSSSYFYDEVAPNGVNSVMDPIDYISKQQHNIFGKGLMCKQELEGMVDGINYIQSNQFIQLPQLQSPSLPLMKRPSSSMSITSMDNNYNYKLPLADEESFESFIRGEDRRKKKKQVMMTGNWRELDKFVASQLMSQEDNGTSSFAGHHIVNEDKNNNDVEMDSSMFLSEREEENRFVSEFLSTNSDYDIGICVFDN

SEQ ID NO: 38 - protein, 335 aa, Vitis vinifera
  misc_feature (8)..(137): Pfam Name: NAM Pfam Description: No apical meristem (NAM) protein
  misc_feature: Public GI ID no. 157354896
  misc_feature: Bit score of 644.0 for HMM based on sequences of Figure 42
  misc_feature: Functional Homolog Of SEQ ID NO. 2
MDSMESCVPPGFRFHPTDEELVGYYLKKKVASQKIDLDVIRDIDLYRIEPWDLQERCRIGYEEQNEWYFFSHKDKKYPTGTRTNRATMAGFWKATGRDKAVYDKTKLIGMRKTLVFYKGRAPNGQKTDWIMHEYRLESEENGPPQAKGWVVCRAFKKRTTSQSKSIEGWDTSYFYDEPSGVSTVMDPIDYISRQPQNYLGQNFLCKQEIEADNLNFMHATEHFVQLPQLESPSLPLMKRPSSVSLISENNEEEDQTRGCNNAEKVTDWRALDKFVASQLSQEDRYEGDGVSSFGAHHNSDMALLLLQSSRDEANKLNGFLNSSSDCDIGICVFEK

SEQ ID NO: 39 - protein, 357 aa, Zinnia elegans
  misc_feature (11)..(140): Pfam Name: NAM Pfam Description: No apical meristem (NAM) protein
  misc_feature: Public GI ID no. 73759951
  misc_feature: Bit score of 568.0 for HMM based on sequences of Figure 42
  misc_feature: Functional Homolog Of SEQ ID NO. 2
MDTMNQSSCTVPPGFRFHPTDEELVGYYLRKKVASQKIDLDVIKDIDLYRIEPWDLIERCRIGYEEQNEWYFFSHKDKKYPTGTRTNRATMAGFWKATGRDKAVYEKLRLIGMRKTLVFYKGRAPNGQKTDWIMHEYRLESEENGPPQEEGWVVCRAFKKRATGQTRTTPAWESNYFLDESSLLTSTMDDYTTIQPSNIPLTSSFMCKQELEASENLNFIHCDQFIQLPHLESPSLQSIKRPISSILYEHDQQEDDQITKRITNNVRSKDEVRDWRDLDKFVASQLSQEEEIRCVEEGFSTNFQENIDHSTSLSHMFNYQDGIEEYSGCDKGGKLNGFLSSTSSDHFDVGICIFDKL

SEQ ID NO: 40 - DNA, 1476 bp, Gossypium hirsutum
  misc_feature: Ceres Clone ID no. 1848312
  misc_feature: Encodes the peptide sequence at SEQ ID NO. 41
cataagagaaactaagcaacattgtgagtgagtgctgcttattaccaaatgagctacctagctataatacttttttctttttatatataaaaatagcaatttggaatacaaaaggatcgtatatatgaattaacccaagttatatacttgattgttatttatagcattggtcacctttttaatagaaaataattcattatcttttttagcttttttttcatttacccttttaagtcttttttctttttctcctgttctcttatttaagttagatttattggttataatttagagatgatgaagtaagaggactcgaggagtgggtaatgctaatagtagtagtgttggtgaacttgatgcagcagcaacaagagttatgatggagtcaacggagtcatgtgtcccacctggattccggttccacccgacggacgaggagcttgttgggtattatctgagaaagaaagttggatcacagaagattgatcttgatgttatcaaagaaatcgatctctatagaatcgaaccatgggatcttaaagagagatgccaaataggatgtgaggagcaaaacgagtggtatttcttcagccacaaggataagaagtatccaacagggacaagaactaacagagcaaccatggctggtttctggaaagcaacagggagagacaaagcagtgtatgataaatcaaagctgatcggcatgaggaagactcttgttttctacaaaggacgagctcctcatggccagaaatctgactggatcatgcatgaatacagactcgaatccgatgatcatgcttctccgaaggaggaaggatgggtggtttgtagagcttttaagaagagaatcactggtcaaaccaagaacatgcaagtgtgggagtcgagctatttctatgatgaagcaagtggcatgagttcagtggtcgatccaatcgattacatacccaggcagaactttttaccccaaaatctcctttgtaagaaagaagcagataattattccaactttgtggatcactcggatgatcagtttgtagagcttcctgagctggaaagcccatcactgccattaataaagaggccgagctccatatcagagaagactaaacatgaagaagaagatgatgaagagctgaacaatagcaagaaattgactgattggagagcacttgataagtttgttgcttctcagctgagccaagaagatagatttgagggtgaaggagtttcaagctttgacgccattaataataataatagtaatagtaataactcagacatggcattgatgttattgcagaatagtagtagagaagaagggaataagttgaacgagttcttaaattcgagttcagattgtgatattggaatatgcttatttgctaagtgaaggggaagaaatgaagagattacgatgatgatgaagaggcttttatcgcttattattatatcgtttgatgcataatg

SEQ ID NO: 41 - protein, 340 aa, Gossypium hirsutum
  misc_feature (9)..(138): Pfam Name: NAM Pfam Description: No apical meristem (NAM) protein
  misc_feature: Ceres Clone ID no. 1848312
  misc_feature: Bit score of 581.8 for HMM based on sequences of Figure 42
  misc_feature: Functional Homolog Of SEQ ID NO. 2
MMESTESCVPPGFRFHPTDEELVGYYLRKKVGSQKIDLDVIKEIDLYRIEPWDLKERCQIGCEEQNEWYFFSHKDKKYPTGTRTNRATMAGFWKATGRDKAVYDKSKLIGMRKTLVFYKGRAPHGQKSDWIMHEYRLESDDHASPKEEGWVVCRAFKKRITGQTKNMQVWESSYFYDEASGMSSVVDPIDYIPRQNFLPQNLLCKKEADNYSNFVDHSDDQFVELPELESPSLPLIKRPSSISEKTKHEEEDDEELNNSKKLTDWRALDKFVASQLSQEDRFEGEGVSSFDAINNNNSNSNNSDMALMLLQNSSREEGNKLNEFLNSSSDCDIGICLFAK

SEQ ID NO: 42 - DNA, 1023 bp, Sorghum bicolor
  misc_feature: Ceres Annot ID no. 8702071
  misc_feature: Encodes the peptide sequence at SEQ ID NO. 43
atggacgctttcacacatgttcctcccggctttcgtttccaccctaccgatgaggaactcgttgattactaccttaggaaaaaggtagcaatgaagaagatagatttggatgttataaaagatgtggacttgtacaaaattgagccttgggatctgcaagaaaaatgcaggattggagctgaagagcagaacgagtggtacttcttcagccacaaggacaagaagtacccaaccggcactcgcaccaacagagcgacgacggctggtttctggaaggccacagggagagacaagccgatctatgtgaagaactgcctcgtagggatgaggaagacactagttttctacaaaggccgagcgcccaacgggcagaagtcagactggatcatgcacgagtatcgcttggagaccaacgaaaatggaatcccacacgaagaaggatgggttgtctgcagggtgttcaggaagcgactcgcgactgtccaaagaatggttggggactcaccttactggttcaacgaccacgcagggttcatgccaccggagctcggctcgccgaggcaggcggcacaccaccagcagagcgccatgatgtaccataggcaacagagcagctacccttgcaaggtggagctagagtaccaccacctccttccccaggagcacttcttgcagcagctccctccgctggagagccccaagctccctgaccttattggccaagtagatgctactctccagccatgcggccttacaccggagcatggtctcgttcgctacaccgtgcaagagctccaagccgagccgctctatctgacggctaggaatgtgtctggcacagattggcgagctctcgacaagttcgtggcgtcccagctcagcaacgacaccactctgaaggagtcaactagctactccaatccgacacaggtgtttcagcagtctgaggagaaagaggaggcattagactacgtgtcaacatcagcttcttgtggaggtgacaatgatttctggaaattataa

SEQ ID NO: 43 - protein, 340 aa, Sorghum bicolor
  misc_feature (7)..(136): Pfam Name: NAM Pfam Description: No apical meristem (NAM) protein
  misc_feature: Ceres Annot ID no. 8702071
  misc_feature: Bit score of 457.8 for HMM based on sequences of Figure 42
  misc_feature: Functional Homolog Of SEQ ID NO. 2
MDAFTHVPPGFRFHPTDEELVDYYLRKKVAMKKIDLDVIKDVDLYKIEPWDLQEKCRIGAEEQNEWYFFSHKDKKYPTGTRTNRATTAGFWKATGRDKPIYVKNCLVGMRKTLVFYKGRAPNGQKSDWIMHEYRLETNENGIPHEEGWVVCRVFRKRLATVQRMVGDSPYWFNDHAGFMPPELGSPRQAAHHQQSAMMYHRQQSSYPCKVELEYHHLLPQEHFLQQLPPLESPKLPDLIGQVDATLQPCGLTPEHGLVRYTVQELQAEPLYLTARNVSGTDWRALDKFVASQLSNDTTLKESTSYSNPTQVFQQSEEKEEALDYVSTSASCGGDNDFWKL

SEQ ID NO: 44 - DNA, 1113 bp, Oryza sativa
  misc_feature: Ceres Annot ID no. 1692437
  misc_feature: Encodes the peptide sequence at SEQ ID NO. 45
atggacactttctcccatgtgccacctggtttccgctttcaccctactgacgaggagctcgtcgattactacctgaggaagaaggtggcatcgaagaaaatcgacctcgacgttataaaagacgtcgacctgtacaaaatcgagccctgggatctccaagagaagtgcaagattggcatggaagaacagaatgactggtacttcttcagccacaaagacaaaaagtacccgacgggcacccgcaccaaccgggccacgggcgccggcttctggaaggcgacggggagggacaagcccatctacgcccgcagctgcctcgtcgggatgaggaagacactcgtcttctacaagggccgtgcccccaatggccagaagtcggactggatcatgcacgagtaccgcctcgagaccaacgaaaacggcaccacacctgaggaaggatgggtggtctgccgggtgttcaagaagcgggtggcgacggtgcggagaatggccgacggatcaccgtgctggttcgatgaccacggcgccgtcggtgcgttcatgccggacctcagctcgccgaggcagctactgccgcaccaccaccaccaccacccgggctcgtcggcggcgctgtaccacggccaccaccaccagcagctgcagcagatgtacggtcactgcaagccggagctggagtaccaccacctcctgccgcaggaggccttcctgcagcatcttcctcagctggagagccccaagccgccgccgccgcctcctgcggcggcggcctacattggcggccacctcggatcgtcgtcgtccaccgcccttactactcacgacgacgaagcctccggctccgccgcgcagcagcagccgccgtcgttggaggctgtttacatggccggcgccggcgtcggcatcggcgtcgacgcgtcggtgacggactggaggctactggacaagttcgtcgcgtctcagctgctcagcaaggagtccatgtccagctacggatcccatccggctcaggtgtttcaggctgcagacggtggcaagcatgaagaggctttggactacgcttcgacgtcggccggctccggcggcggcgaggctgatctgtggaaatag

SEQ ID NO: 45 - protein, 370 aa, Oryza sativa
  misc_feature (7)..(136): Pfam Name: NAM Pfam Description: No apical meristem (NAM) protein
  misc_feature: Ceres Annot ID no. 1692437
  misc_feature: Bit score of 459.7 for HMM based on sequences of Figure 42
  misc_feature: Functional Homolog Of SEQ ID NO. 2
MDTFSHVPPGFRFHPTDEELVDYYLRKKVASKKIDLDVIKDVDLYKIEPWDLQEKCKIGMEEQNDWYFFSHKDKKYPTGTRTNRATGAGFWKATGRDKPIYARSCLVGMRKTLVFYKGRAPNGQKSDWIMHEYRLETNENGTTPEEGWVVCRVFKKRVATVRRMADGSPCWFDDHGAVGAFMPDLSSPRQLLPHHHHHHPGSSAALYHGHHHQQLQQMYGHCKPELEYHHLLPQEAFLQHLPQLESPKPPPPPPAAAAYIGGHLGSSSSTALTTHDDEASGSAAQQQPPSLEAVYMAGAGVGIGVDASVTDWRLLDKFVASQLLSKESMSSYGSHPAQVFQAADGGKHEEALDYASTSAGSGGGEADLWK

SEQ ID NO: 46 - DNA, 1044 bp, Sorghum bicolor
  misc_feature: Ceres Annot ID no. 8681598
  misc_feature: Encodes the peptide sequence at SEQ ID NO. 47
atggacactttttctcatgtaccccctggattccgtttccaccccactgacgaggaactcgtcgattactacctcaggaagaaggtggcgtccaacaagatcgaccttgacgtcataaaagacgtcgatctgtacaaaattgagccctgggatctccaagagaagtgcaagattgggatggaggagcagaacgagtggtacttcttcagccacaaggacaagaagtacccgacggggtctcgcaccaaccgggcgaccaccgccggcttctggaaggcgacggggcgcgacaagcccatctacaccaagagctgcctcgtcgggatgaggaagacgctcgtcttctacaggggccgtgcgcccaacggccagaagtccgactggatcatgcacgagtaccgcctcgagaccaccgagaacgggaccgcccctgaggaaggatgggtggtctgcagggtgttcaagaagcgagtggcgaccgtgcggagaatggccgacggcgcgccgtggttcgacgaccacgtcgccggcggcgggttcatgccggacctcattggctcgccgaggcagctgatgcaccaccaccaccacccaaacgcggtgtacagcggcggtcagcagcagctctaccactgcaagccggagctggagtaccatcaccttctgcccagccaagacgccttcttgcagcagcttcctcagttggtggagagccccaagcctcctcccgcctacattgccgccgcccaaggcagctgcagcctccagctccagtcccccgacgaggccactgggtacaccacccagcaaccggccctgatgatggaggccgccgcttacatggacgactcggtcaccgattggagagtgctcgacaagttcgtcgcgtctcagctcttcagccacggcgacggcacagcgaaagaggccggctactccagtccggcgcaggtgtttcaggctgagaacaagcaaccagaagaagcactggactacgcctccacatctgcctctggtggcggcgaagcgaacatgtggaaatag

SEQ ID NO: 47 - protein, 347 aa, Sorghum bicolor
  misc_feature (7)..(136): Pfam Name: NAM Pfam Description: No apical meristem (NAM) protein
  misc_feature: Ceres Annot ID no. 8681598
  misc_feature: Bit score of 454.1 for HMM based on sequences of Figure 42
  misc_feature: Functional Homolog Of SEQ ID NO. 2
MDTFSHVPPGFRFHPTDEELVDYYLRKKVASNKIDLDVIKDVDLYKIEPWDLQEKCKIGMEEQNEWYFFSHKDKKYPTGSRTNRATTAGFWKATGRDKPIYTKSCLVGMRKTLVFYRGRAPNGQKSDWIMHEYRLETTENGTAPEEGWVVCRVFKKRVATVRRMADGAPWFDDHVAGGGFMPDLIGSPRQLMHHHHHPNAVYSGGQQQLYHCKPELEYHHLLPSQDAFLQQLPQLVESPKPPPAYIAAAQGSCSLQLQSPDEATGYTTQQPALMMEAAAYMDDSVTDWRVLDKFVASQLFSHGDGTAKEAGYSSPAQVFQAENKQPEEALDYASTSASGGGEANMWK

SEQ ID NO: 48 - DNA, 879 bp, Arabidopsis thaliana
  misc_feature: Ceres Annot ID no. 857774
  misc_feature: Encodes the peptide sequence at SEQ ID NO. 49
atgatgaaggttgatcaagattattcgtgtagtataccgcctggatttaggtttcatccgacagatgaagaacttgtcggatattatctcaagaagaaaatcgcctcccagaggattgatctcgacgttatcagagaaattgatctttacaagatcgaaccatgggatctacaagagagatgtaggatagggtacgaggagcaaacggagtggtatttcttcagccatagagacaagaagtatccgactgggactaggacaaaccgagccaccgtggccggtttctggaaagcaacgggccgggacaaggcggtttacctcaactccaaacttatcggtatgagaaaaacgcttgtcttttaccgaggtcgagcgcctaatggccaaaagtccgattggatcattcacgaatactacagcctcgagtcacaccagaactctcctccacaggaagaaggatgggtagtgtgtagagcatttaagaaacgaacgaccatcccaacaaaaaggaggcaactttgggatccgaactgcttattctacgacgacgccactctcttggaacctctcgacaagcgagccagacataatcctgattttaccgccacaccgttcaagcaagaactactctccgaggccagtcacgtccaggatggagatttcggatctatgtaccttcaatgcatcgatgatgatcaattctcccagcttcctcagctcgagagcccctctcttccgtcggaaataactccccatagtactactttttctgagaacagtagccggaaagatgacatgagctccgagaagaggatcactgactggagatatctagataagttcgtggcgtctcaatttttgatgagtggagaagactaa

SEQ ID NO: 49 - protein, 292 aa, Arabidopsis thaliana
  misc_feature (12)..(142): Pfam Name: NAM Pfam Description: No apical meristem (NAM) protein
  misc_feature: Ceres Annot ID no. 857774
  misc_feature: Bit score of 463.6 for HMM based on sequences of Figure 42
  misc_feature: Functional Homolog Of SEQ ID NO. 2
MMKVDQDYSCSIPPGFRFHPTDEELVGYYLKKKIASQRIDLDVIREIDLYKIEPWDLQERCRIGYEEQTEWYFFSHRDKKYPTGTRTNRATVAGFWKATGRDKAVYLNSKLIGMRKTLVFYRGRAPNGQKSDWIIHEYYSLESHQNSPPQEEGWVVCRAFKKRTTIPTKRRQLWDPNCLFYDDATLLEPLDKRARHNPDFTATPFKQELLSEASHVQDGDFGSMYLQCIDDDQFSQLPQLESPSLPSEITPHSTTFSENSSRKDDMSSEKRITDWRYLDKFVASQFLMSGED

SEQ ID NO: 50 - DNA, 1749 bp, Gossypium hirsutum
  misc_feature: Ceres Clone ID no. 1944387
  misc_feature: Encodes the peptide sequence at SEQ ID NO. 51
ataatataaaccacctttaaattgaaaaaaaagaaaaacaaaacacctgcttacaatacaagacctaggtctctatcagttgcagcaggtggagatggcaatagaggaagttctctctgtgtgtttgtcttagccgatattgcgccactttttttaagcttttgcaccaatttagctccaaaccggcagtgaaagatagacaacgtaagcttatgataatgaaaagattagcttattaagatagatagatcatacccattctttgatcattagggttcctctctctctctttcattttcttttgcttcctatttaacccttctccttctccatcctcccattcttctaaagtctcaaaccctttccctttttgtggcctttcttctgttttttatttatcgggattcgatccgacaactcccctttcaggcaggcttaaaacatacttgcctgtttctttatatttttgtcgtcttcttgtccaaatttggaataaaagcttctaatactgccgtcatatttgggagaaaaaagtaaacagggttgttcgatccaactcttgatttttgctggaagagaagattcaatcaccccagatctgtatttgaactgcttgagaaaaagaaaatgaatgtacttccacaagttccaccaggctttcgcttccatcccacagaagaagaactggttgattattaccttagaaagaaaatctctttaagaaggattgacctagatgtaattaaagatgttgatctctataaaattgagccttgggatcttcaagagatatgcagaatagggagagaagagcaaaatgaatggtatttcttcagccataaggataagaaatatccaacaggaagtcgcacaaatagagccacggcagctgggttttggaaagcaacgggcagagacaaggctatttattctaagcatgacttgattgggatgaggaaaacattagtgttttataaaggtcgagccccaaatggacaaaagtctgactggattatgcatgagtatcgccttgaaacttatgaaaatgggactccacaggacgaaggatgggttgtatgtagggtattcaagaagagaataacagctatgcgcaaagtcggtgaacatgaatcttcgtgttggtatgatgatcaagtctcgttcattcccgatctagattccccaaaccaaacatccctatctaataacgcttaccaccaccttccctattcctgcaagaaagagcttgatttgcagtaccaagttccccatgaccattacctccagtcacgggatcccctaagctgcaatccaatggctgcatttggccagtgctcatccttcacacaggcccatcatattcaacaaactcatcaccaacacttgaatgcactctttgggaaccacagcaatgagcaagcggtggatcaagccactgattggcgcctccttgacacccttgttgcttctcagcttagtcaagaagaagagatatatcgccaatcaaagtaattactcaaatgcactgtcttcattcttcgctgaataaaaaagggaagtaagtaatgctttaatcctctgtacataataaaactatacgaacaaaacacaccttaacattaattgttgaactcctagatcttccctagtagtactaaattaatgtcatatgtggctaggtggagtgttgccttgaggaattaagttgattgcagctttaattgtcttatgcaagtaaagcattttttt

SEQ ID NO: 51 - protein, 294 aa, Gossypium hirsutum
  misc_feature (7)..(136): Pfam Name: NAM Pfam Description: No apical meristem (NAM) protein
  misc_feature: Ceres Clone ID no. 1944387
  misc_feature: Bit score of 422.2 for HMM based on sequences of Figure 42
  misc_feature: Functional Homolog Of SEQ ID NO. 2
MNVLPQVPPGFRFHPTEEELVDYYLRKKISLRRIDLDVIKDVDLYKIEPWDLQEICRIGREEQNEWYFFSHKDKKYPTGSRTNRATAAGFWKATGRDKAIYSKHDLIGMRKTLVFYKGRAPNGQKSDWIMHEYRLETYENGTPQDEGWVVCRVFKKRITAMRKVGEHESSCWYDDQVSFIPDLDSPNQTSLSNNAYHHLPYSCKKELDLQYQVPHDHYLQSRDPLSCNPMAAFGQCSSFTQAHHIQQTHHQHLNALFGNHSNEQAVDQATDWRLLDTLVASQLSQEEEIYRQSK

SEQ ID NO: 52 - DNA, 1188 bp, Arabidopsis thaliana
  misc_feature: Ceres Annot ID no. 832306
  misc_feature: Encodes the peptide sequence at SEQ ID NO. 53
atgaattcattttcccacgtccctccgggttttagatttcacccgacagatgaagaacttgtagactactacctgaggaaaaaagtcgcatcgaagagaatagaaattgatttcataaaggacattgatctttacaagattgagccatgggaccttcaagagttgtgcaaaattgggcatgaagagcagagtgattggtacttctttagccataaagacaagaagtatcccacagggactcgaaccaatagagcaacaaaagcagggttttggaaagccaccggaagagataaggctatctatttgaggcatagtctaattggcatgaggaaaacacttgtgttttacaagggaagagccccaaatggacaaaagtctgattggatcatgcacgaataccgcttagaaaccgatgaaaacggaactcctcaggaagaaggatgggttgtgtgtagggttttcaagaagagattggctgcagttagacgaatgggagattacgactcatccccttcacattggtacgatgatcaactttcttttatggcctccgagctcgagacaaacggtcaacgacggattctccccaatcatcatcagcagcagcagcacgagcaccaacaacatatgccatatggcctcaatgcatctgcttacgctctcaacaaccctaacttgcaatgcaagcaagagctagaactacactacaaccacctggtacaacgaaatcatcttcttgatgaatctcatttatcgttcctccaacttcctcaactagaaagccctaagattcaacaagataacagtaattgcaactctcttccttatggaacaagcaacatcgataataactcgagccataatgctaacttgcagcaatcaaatatcgcgcatgaggaacaattgaatcaaggaaatcagaacttcagctctctatacatgaacagcggcaacgagcaagtgatggaccaagtcacagactggagagttctcgataaatttgttgcttctcagctaagcaacgaggaggctgccacagcttctgcatctatacagaataatgccaaggacacaagcaatgctgagtaccaagttgatgaagaaaaagatccgaaaagggcttcagacatgggagaagaatatactgcttctacttcttcgagttgtcagattgatctatggaagtga

SEQ ID NO: 53 - protein, 395 aa, Arabidopsis thaliana
  misc_feature (7)..(136): Pfam Name: NAM Pfam Description: No apical meristem (NAM) protein
  misc_feature: Ceres Annot ID no. 832306
  misc_feature: Bit score of 458.6 for HMM based on sequences of Figure 42
  misc_feature: Functional Homolog Of SEQ ID NO. 2
MNSFSHVPPGFRFHPTDEELVDYYLRKKVASKRIEIDFIKDIDLYKIEPWDLQELCKIGHEEQSDWYFFSHKDKKYPTGTRTNRATKAGFWKATGRDKAIYLRHSLIGMRKTLVFYKGRAPNGQKSDWIMHEYRLETDENGTPQEEGWVVCRVFKKRLAAVRRMGDYDSSPSHWYDDQLSFMASELETNGQRRILPNHHQQQQHEHQQHMPYGLNASAYALNNPNLQCKQELELHYNHLVQRNHLLDESHLSFLQLPQLESPKIQQDNSNCNSLPYGTSNIDNNSSHNANLQQSNIAHEEQLNQGNQNFSSLYMNSGNEQVMDQVTDWRVLDKFVASQLSNEEAATASASIQNNAKDTSNAEYQVDEEKDPKRASDMGEEYTASTSSSCQIDLWK

SEQ ID NO: 54 - DNA, 1664 bp, Glycine max
  misc_feature: Ceres Clone ID no. 528201
  misc_feature: Encodes the peptide sequence at SEQ ID NO. 55
attcatctctatcggtactcaatacacaggttttaattctttaagagcggagatgaacacgttttcacatgtaccaccaggctttcgatttcatccgaccgatgaagaacttgtcggttactaccttaggaaaaaggtagcgtctaaaaggattgatctagatgtcatcaaagatgtcgatctctataaaattgaaccatgggatctccaagaattatgcaaaataggaaccgatgaacaaagtgactggtatttctttagtcataaagataagaaatatccaactggaactcgcaccaatagagctacaaaagcaggattctggaaagccacgggaagagacaaggcaatatactctaagcattgcctcattggcatgagaaagactctcgtgttttacaaaggacgagccccaaatggacagaagtctgattggatcatgcatgagtacaggctagaaactaatgaaaatggaacaacttctcaggaagaaggctgggttgtgtgtagagtgttcaagaagagaatgacaacaatgcagaaagtgggagagtatgatcaatcaccctgttggtacgatgagcaagtttccttcatgcaagatcttgaatcccccaggcgcagtatttctctgccttatgcatcataccaccaccaccaccaccctagctgcaagcctgagctcatggaattgcaatacaacaacattccccacgatgcattcctccaacttccacaacttgaaagccccaaagttactcaatcagcatgctcagttgtcccttatggctatgaaaacaacaacaacaacaacaacaacaacaatggaagcaccttgcagttctcatcactcactcaggaagaacagttacaatattgcaataaccaacaaagtcaccattctctctatggcagcaatgatcatgcggttgaccaggtcacagattggcgtgtacttgacaaatatgttgcttctcagctcagtcacaacaaccaagatgtcgtttccaaggaaaccagttattccaatgcacccattttcaatgtgacggaacaagtttctgtggttgcaaatggatccaaaaaggagcaagtttctcaggagtatgcttcaacgtctacctccagttaccagattgacctgtggaagtgaattttttttatacatatatatagtaactatataaataagatatcatatgatgcataatactaattataggaagtgcgtacaagtgaatgttggaaaaaaagaaaaagaccatagtgttgctccgtgttgttgtacataataaacctaaaatgtttaatatatcattagttgtattgaacctcttgaggctggagtatatggactgaaatgtatccattagtgttgcaattcttcagttgaaaaagacacgcctatatacagcaaacagattggtgcttcaaggtcaactcgatctacagcaagaagtgatctatatgatgggaagagttctatgaattaatgttacaggtgatttgttcactacagcttaatgttgcatttattataaaagttacatatgttttcagtttgtatttgaaatagccaattacttggatatatgattggatctaccagaagtttaagaatggagggatgagatttgagaatctaaactaagcatgcttctgat

SEQ ID NO: 55 - protein, 366 aa, Glycine max
  misc_feature (7)..(136): Pfam Name: NAM Pfam Description: No apical meristem (NAM) protein
  misc_feature: Ceres Clone ID no. 528201
  misc_feature: Bit score of 458.9 for HMM based on sequences of Figure 42
  misc_feature: Functional Homolog Of SEQ ID NO. 2
MNTFSHVPPGFRFHPTDEELVGYYLRKKVASKRIDLDVIKDVDLYKIEPWDLQELCKIGTDEQSDWYFFSHKDKKYPTGTRTNRATKAGFWKATGRDKAIYSKHCLIGMRKTLVFYKGRAPNGQKSDWIMHEYRLETNENGTTSQEEGWVVCRVFKKRMTTMQKVGEYDQSPCWYDEQVSFMQDLESPRRSISLPYASYHHHHHPSCKPELMELQYNNIPHDAFLQLPQLESPKVTQSACSVVPYGYENNNNNNNNNNGSTLQFSSLTQEEQLQYCNNQQSHHSLYGSNDHAVDQVTDWRVLDKYVASQLSHNNQDVVSKETSYSNAPIFNVTEQVSVVANGSKKEQVSQEYASTSTSSYQIDLWK

SEQ ID NO: 56 - protein, 283 aa, Thellungiella halophila
  misc_feature (10)..(139): Pfam Name: NAM Pfam Description: No apical meristem (NAM) protein
  misc_feature: Public GI ID no. 78499704
  misc_feature: Bit score of 433.1 for HMM based on sequences of Figure 42
  misc_feature: Functional Homolog Of SEQ ID NO. 2
MGLDQESSSVPPGFRFHPTDEELVGYYLKKKVASQKIDLDVIREIDLYKIEPWDLQERCKIGYEQKEWYFFSHKDKKYPTGTRTNRATVAGFWKATGRDKAVYLNSKLIGMRKTLVFYRGRAPNGQKSDWIIHEYYSLESHQNYSPPQEEGWVVCRAFKKRSTVPTKRRQRLWDPNCFFYDATLLEPLDKNVLKRAKHNTDFAVTVPFKHIVDDEDLGSMHLHSIDDDQFSQLPQLESPSLPSDKLPEMARQSTRALEDEKRITDWRSLDKFVATQFLMSGQD

SEQ ID NO: 57 - protein, 344 aa, Zea mays
  misc_feature (7)..(136): Pfam Name: NAM Pfam Description: No apical meristem (NAM) protein
  misc_feature: Public GI ID no. 194704142
  misc_feature: Bit score of 434.8 for HMM based on sequences of Figure 42
  misc_feature: Functional Homolog Of SEQ ID NO. 2
MDAFTHVPPGFRFHPTDEELVDYYLRKKVALKKIDLDVIKDVDLYKIEPWDLQEKCRIGSEEQNEWYFFSHKDKKYPTGTRTNRATTAGFWKATGRDKPIYVKNCLVGMRKTLVFYKGRAPNGQKSDWIMHEYRLETNNNGIPHEEGWVVCRVFRKRLATVQRMAGDSPYWFNDHAGFMAPELGSPRQAAHHQQNVMMYHRQQSSYSYPCKVELEYHHLLPQEHFLQQLPQLESPKLPDLIGQVDTTLQPACGLTQEHGAPRYTLQELQAEPLYLATGGDTDWRALDKFMASQLSHGDITPNKDSANNYSNPALQVIQQSEEKEEALDYVSTSASCGGDNDLWK

SEQ ID NO: 58 - DNA, 1185 bp, Arabidopsis thaliana
  misc_feature: Ceres Annot ID no. 836923
  misc_feature: Encodes the peptide sequence at SEQ ID NO. 59
atgaattcgttttcacaagtacctcctggcttcagatttcatcctactgatgaagaacttgtagactactacttgaggaaaaaagttgcatcaaagagaatagaaatcgatatcatcaaggatgttgatctttacaagattgagccatgtgatcttcaagagttatgcaagataggaaacgaagagcagagcgaatggtacttctttagtcataaagacaagaagtatcccacgggaactcgaaccaatagagccacgaaagcaggattttggaaagccactggaagagacaaggctatatatataagacatagtcttatcggtatgaggaaaacacttgtgttttacaaaggaagagccccaaatggtcagaaatccgattggatcatgcacgaatatcgcttagaaacaagtgaaaatggaacccctcaggaagaaggatgggtagtatgtagggtattcaagaagaaattggcagcgacagtgaggaaaatgggagattaccattcatcaccatcgcagcattggtacgatgatcagctctcttttatggcctccgagatcatttctagttctccacgacagtttcttcccaatcatcattataaccgccaccatcaccagcagacattgccttgtggcctcaatgcattcaacaacaacaatcctaacttgcaatgcaagcaagagctcgagttacattacaatcaaatggtacaacatcaacaacaaaaccatcatcttcgtgaatctatgtttctccagcttcctcagctcgaaagccctaccagtaattgcaattctgacaacaacaataacacaagaaatattagtaacttgcagaaatcatcaaatatatctcatgaggaacaattgcaacaagggaatcaaagtttcagctctctgtattacgatcaaggagtagagcaaatgactactgactggagagttctcgataaatttgttgcttcacagcttagcaatgatgaagaggctgcagccgtggtttcttcttcttctcatcaaaacaacgtcaagattgacacgagaaacacgggttatcatgtgatagatgagggaataaatttgccggagaatgattctgaaagggttgttgaaatgggagaagagtattcaaatgctcatgctgcttctacttcttcaagttgtcagattgatctctag

SEQ ID NO: 59 - protein, 394 aa, Arabidopsis thaliana
  misc_feature (7)..(136): Pfam Name: NAM Pfam Description: No apical meristem (NAM) protein
  misc_feature: Ceres Annot ID no. 836923
  misc_feature: Bit score of 453.7 for HMM based on sequences of Figure 42
  misc_feature: Functional Homolog Of SEQ ID NO. 2
MNSFSQVPPGFRFHPTDEELVDYYLRKKVASKRIEIDIIKDVDLYKIEPCDLQELCKIGNEEQSEWYFFSHKDKKYPTGTRTNRATKAGFWKATGRDKAIYIRHSLIGMRKTLVFYKGRAPNGQKSDWIMHEYRLETSENGTPQEEGWVVCRVFKKKLAATVRKMGDYHSSPSQHWYDDQLSFMASEIISSSPRQFLPNHHYNRHHHQQTLPCGLNAFNNNNPNLQCKQELELHYNQMVQHQQQNHHLRESMFLQLPQLESPTSNCNSDNNNNTRNISNLQKSSNISHEEQLQQGNQSFSSLYYDQGVEQMTTDWRVLDKFVASQLSNDEEAAAVVSSSSHQNNVKIDTRNTGYHVIDEGINLPENDSERVVEMGEEYSNAHAASTSSSCQIDL

SEQ ID NO: 60 - protein, 359 aa, Oryza sativa subsp. japonica
  misc_feature (10)..(142): Pfam Name: NAM Pfam Description: No apical meristem (NAM) protein
  misc_feature: Public GI ID no. 115445339
  misc_feature: Bit score of 314.8 for HMM based on sequences of Figure 42
  misc_feature: Functional Homolog Of SEQ ID NO. 2
MHPNGAPLAVPPGFRFHPTDEELLYYYLRKKVAYEAIDLDVIREIDLNKLEPWDLKDRCRIGTGAQEEWYFFSHKDKKYPTGTRTNRATVAGFWKATGRDKAIFLGSGGGTRIGLRKTLVFYTGRAPHGKKTDWIMHEYRLDDDNVDVPEEGWVVCRVFKKKSIHQRGFDQPDMAAAADEDELRYQLLHGAGMSSSPVDQKHVLLQEQLVAHGAHGGGFVVPAFEASMHLPQLASADAAPCGGGGGGHVAFASMNPLDAAGCGSQNMMTMKMAATSGGEMLLMSGGGVDGGRFGAAADWSILDKLLASHQNLDQLFHGKVAGAHQQQQQMAMDAASSLQRLPFHHYLGLEAADLLKFSM

SEQ ID NO: 61 - DNA, 1116 bp, Solanum lycopersicum
  misc_feature: Ceres Annot ID no. 8464728
  misc_feature: Encodes the peptide sequence at SEQ ID NO. 62
atggatacaaacgaatcatgcgttccacctggatttcgatttcatccaacagatgaagaacttgttggatactatcttagaaaaaaaattgcatcacaaaagattgatcttgatgttattagagatattgatctctacagaattgaaccgtgggatcttcaagataaatgccggatcggatatgaagagcagaatgagtggtatttcttcagccacaaagataagaagtatccaacagggaccagaactaatagggcaacaatggctggattttggaaggcaacaggaagagacaaagctgtatacaataaatcaaaacttataggcatgagaaaaacccttgtcttctataagggtagggcacctaatggacaaaaatctgattggattatgcatgaatatcgtctcgaatctgaagaaaatggtcctccacaggcaagtataattaatagggatgaggtgcaacatggacaagttaagatagatgaagttagtgtgcaagaagaaggatgggtggtttgtagagcatttaagaaaaaaattacaggacaaacaaagagtaataatatggttgaaggatgggaatcaaattatttctatgatgaagcaacaactgctacaataagctccatagtggatcctcttgaatacatcacaagacaacctccaaatctttcaaataataatttcaataatctactatgcaaacaagaaacatcaatggatcaagcagctgaaaacaatctcaacttttcttatacaaattcagatcaattcattcagcttccacagctcgaaagcccttcactaccactcctaaaaaggccaattagctccatgtctctcgtctccgataacaacaacaacaacaacaacaataatcatgatgaagatggaagcaaaaatgtaacggctgattggagagcacttgacaaatttgttgcttctcaattgagtcatgaagagacaacgttatacgaagatgatcagcataattgttccgatttgggaatgttgctattgctgagtgatagaggagaaggacctaagctgaatgagatcttgagttcgagctctgaggatagtgatattggcatttgtttatttgataaatga

SEQ ID NO: 62 - protein, 371 aa, Solanum lycopersicum
  misc_feature (8)..(137): Pfam Name: NAM Pfam Description: No apical meristem (NAM) protein
  misc_feature: Ceres Annot ID no. 8464728
  misc_feature: Bit score of 566.9 for HMM based on sequences of Figure 42
  misc_feature: Functional Homolog Of SEQ ID NO. 2
MDTNESCVPPGFRFHPTDEELVGYYLRKKIASQKIDLDVIRDIDLYRIEPWDLQDKCRIGYEEQNEWYFFSHKDKKYPTGTRTNRATMAGFWKATGRDKAVYNKSKLIGMRKTLVFYKGRAPNGQKSDWIMHEYRLESEENGPPQASIINRDEVQHGQVKIDEVSVQEEGWVVCRAFKKKITGQTKSNNMVEGWESNYFYDEATTATISSIVDPLEYITRQPPNLSNNNFNNLLCKQETSMDQAAENNLNFSYTNSDQFIQLPQLESPSLPLLKRPISSMSLVSDNNNNNNNNNHDEDGSKNVTADWRALDKFVASQLSHEETTLYEDDQHNCSDLGMLLLLSDRGEGPKLNEILSSSSEDSDIGICLFDK

SEQ ID NO: 63 - protein, 435 aa, Zea mays
  misc_feature (11)..(142): Pfam Name: NAM Pfam Description: No apical meristem (NAM) protein
  misc_feature: Public GI ID no. 33321040
  misc_feature: Bit score of 301.9 for HMM based on sequences of Figure 42
  misc_feature: Functional Homolog Of SEQ ID NO. 2
MSISVNGQSVVPPGFRFHPTEEELLTYYLKKKVASERIDLDVIRDVDLNKLEPWDIQEKCRIGSGPQNDWYFFSHKDKKYPTGTRTNRATAAGFWKATGRDKAIYASPGARRIGMRKTLVFYKGRAPHGQKSDWIMHEYRLEAPVDAGAGAAHHLLLPAAEHPPYYTSPPQAPSSTTTATIRGAAGDQAAQEQEGWVICRVFKKKNLVHHGQSSGVKQQAAGDDHAASHTAAAAAHMDESSPSQCSSVTVISDHVHANVNDKQQQAQASLLMMHTHHSASSDDDALDHILQQYMGGGRQAPAPDTKPALLEQLDHLHHHLAAAPTTRAAAGFYYGKFMKLPPLEHAGLPPSPPPPGAREYGAAAAAGWDDDDDALDRLAAYDHLNGLSNDASKNMAAFFDVEPSAAAAAAVDGDLWSLARSVSALHADLTMNNNV

SEQ ID NO: 64 - protein, 342 aa, Vitis vinifera
  misc_feature (7)..(136): Pfam Name: NAM Pfam Description: No apical meristem (NAM) protein
  misc_feature: Public GI ID no. 157360723
  misc_feature: Bit score of 477.0 for HMM based on sequences of Figure 42
  misc_feature: Functional Homolog Of SEQ ID NO. 2
MNTFSHVPPGFRFHPTDEELVDYYLRKKVASRRIDLDVIKDVDLYKIEPWDLQELCKIGTEEQNEWYFFSHKDKKYPTGTRTNRATKAGFWKATGRDKAIYCKHSLIGMRKTLVFYKGRAPNGQKSDWIMHEYRLETNENGTPQAKGWVVCRVFKKRMATMRKVGEHGSPCWYDDQVSFMPDLDSPRRISQPYTSFQHHYSCKQELELPYNMPHDPYLQLPQLESPKLPQSAASVSCNSSSTLTQEEHIQQSYQQNMSSLYSSNNEQAVDQVTDWRVLDKFVASQLSHDQDASKETNYSNAAVPTFHVADHMNLLVNDSKRPEIPQEYASTSTSSCQIDLWK

SEQ ID NO: 65 - protein, 409 aa, Arabidopsis thaliana
  misc_feature (7)..(150): Pfam Name: NAM Pfam Description: No apical meristem (NAM) protein
  misc_feature: Public GI ID no. 10086508
  misc_feature: Bit score of 435.3 for HMM based on sequences of Figure 42
  misc_feature: Functional Homolog Of SEQ ID NO. 2
MNSFSHVPPGFRFHPTDEELVDYYLRKKVASKRIEIDFIKDIDLYKIEPWDLQGKILKVFFYSFVEIELCKIGHEEQSDWYFFSHKDKKYPTGTRTNRATKAGFWKATGRDKAIYLRHSLIGMRKTLVFYKGRAPNGQKSDWIMHEYRLETDENGTPQEEGWVVCRVFKKRLAAVRRMGDYDSSPSHWYDDQLSFMASELETNGQRRILPNHHQQQQHEHQQHMPYGLNASAYALNNPNLQCKQELELHYNHLVQRNHLLDESHLSFLQLPQLESPKIQQDNSNCNSLPYGTSNIDNNSSHNANLQQSNIAHEEQLNQGNQNFSSLYMNSGNEQVMDQVTDWRVLDKFVASQLSNEEAATASASIQNNAKDTSNAEYQVDEEKDPKRASDMGEEYTASTSSSCQIDLWK

SEQ ID NO: 66 - DNA, 1653 bp, Panicum virgatum
  misc_feature: Ceres Clone ID no. 1877937
  misc_feature: Encodes the peptide sequence at SEQ ID NO. 67
agcttcttcttccatcgatctctttcctcctcctatccctcacctcatcgtcgtcttcctccctccctccctccctcgctcacctgtagctagctagctagctagcagctgctatacacacactcaccaccagctcgccggccaattgagccctccaccacctgtatccagagagagagagagagagagagagagagagagagagagagagagagagagagagagagagagagagagagagagagagagagagagagagagtacagaacgaagagccggccggccggcgagggatcaatcaatataatgagcatctcggtgaacgggcagtcgtgcgtgccgccggggttccggttccaccccacggaggaggagctgctcaactactacctccgcaagaaggtcgcctcccaggagatcgacctcgacgtcatccgcgacgtcgacctcaacaagctcgagccatgggacatccaagagaaatgtaagatcgggtccgggccgcagaacgactggtacttcttcagccacaaggacaagaagtaccctacggggacgcgcacgaaccgcgccacggcggccggcttctggaaggccaccggccgcgacaaggccatctacaacgccgtcaagcgcatcggcatgcgcaagacgctcgtcttctacaagggccgcgccccgcacggccagaagtccgactggatcatgcacgagtaccgcctcgacgacccggcagccgtcgtctccggcgacgacgccgccgccacggtcgccgctgctgctgccgcgtcgtcggacgccggccaggaggacggctgggtggtgtgcagggtgttcaagaagaagcaccaccacaaagagtcgggaagcgggggcggcggcaggcacggcagcggtcgagtgggcgacggcggcaagtcggcggcggcggcgcaccgcggcctgcagtactcctccagcgacgacacgctcgaccagatcctgcagtacatgggcaggtcgttcaagcaggagcacgagcaggtcctctcgccgcagggcggcggcgcggggccgaggtacctccggcccatcgataccgtgctgggcgggcacgggttcatgaagctgcccccgctggagagcccgtcggcggccgcgctgacgccgcacctctcggcagccggcgacgcggaggcggcgtccgccggggacgacctcctccacggcgccgggacggcgaacgggatcacagactgggccatgatggaccggctggtggcgtcgcacctcaacgggcaggcggccgaccccgccgcgccgccggcgagccaccaccagctctgcttcgacgacggccccggcgccgacgacgacgcggacgggctcgccttctacgccgccgccaccacgaggctccacgccggtggcggctccagcgacgacgacctgtggagcttcacgcggtcgtcggctcggccgggcgctgccacgtcgacggagcggctgagccacgtgtcgctgtagccgtccggccgtcgccggccggcctagctactatatatacatacgtaaagccccccactagctagctacaacgtgacatggccagcagctgcatgctgccctgctgtgccttggtacagtaaagagacaagcaacaccaacaacacc

SEQ ID NO: 67 - protein, 399 aa, Panicum virgatum
  misc_feature (11)..(140): Pfam Name: NAM Pfam Description: No apical meristem (NAM) protein
  misc_feature: Ceres Clone ID no. 1877937
  misc_feature: Bit score of 368.9 for HMM based on sequences of Figure 42
  misc_feature: Functional Homolog Of SEQ ID NO. 2
MSISVNGQSCVPPGFRFHPTEEELLNYYLRKKVASQEIDLDVIRDVDLNKLEPWDIQEKCKIGSGPQNDWYFFSHKDKKYPTGTRTNRATAAGFWKATGRDKAIYNAVKRIGMRKTLVFYKGRAPHGQKSDWIMHEYRLDDPAAVVSGDDAAATVAAAAAASSDAGQEDGWVVCRVFKKKHHHKESGSGGGGRHGSGRVGDGGKSAAAAHRGLQYSSSDDTLDQILQYMGRSFKQEHEQVLSPQGGGAGPRYLRPIDTVLGGHGFMKLPPLESPSAAALTPHLSAAGDAEAASAGDDLLHGAGTANGITDWAMMDRLVASHLNGQAADPAAPPASHHQLCFDDGPGADDDADGLAFYAAATTRLHAGGGSSDDDLWSFTRSSARPGAATSTERLSHVSL

SEQ ID NO: 68 - DNA, 528 bp, Populus balsamifera subsp. trichocarpa
  misc_feature: Ceres Annot ID no. 1533211
  misc_feature: Encodes the peptide sequence at SEQ ID NO. 69
atggagatggaatcctgtgtcccaccaggctttagatttcacccaacagaagaagaacttgtaggttactacctcaagaggaagattgactcacagaaaatcgatctagatgttatcgctaacattgatctctacaaaatggagccgtgggacatccaagccagatgcaatctagggtatgctgaacagaatgagtggtatttcttcagtcacaaggacaggaagtatccgaccggaacacggactaatagagccactgctgctggattttggaaggcaaccggaagggacaaggccgtgctctccaagaacaggcttatagggatgaggaagaccttagtgttctacaagggacgtgcacccaatggaaggaaaactgactggatcatgcatgaatatcgtctccaaacatctgaacatggaccccctcaggcaagctcattcttcattaattttaataataacaaaataaaaaataaaaaaatcatttgtctttctcaacattgcacgtataaaagcattccttaa

SEQ ID NO: 69 - protein, 173 aa, Populus balsamifera subsp. trichocarpa
  misc_feature (5)..(134): Pfam Name: NAM Pfam Description: No apical meristem (NAM) protein
  misc_feature: Ceres Annot ID no. 1533211
  misc_feature: Bit score of 292.4 for HMM based on sequences of Figure 42
  misc_feature: Functional Homolog Of SEQ ID NO. 2
MESCVPPGFRFHPTEEELVGYYLKRKIDSQKIDLDVIANIDLYKMEPWDIQARCNLGYAEQNEWYFFSHKDRKYPTGTRTNRATAAGFWKATGRDKAVLSKNRLIGMRKTLVFYKGRAPNGRKTDWIMHEYRLQTSEHGPPQASSFFINFNNNKIKNKKIICLSQHCTYKSIP

SEQ ID NO: 70 - protein, 344 aa, Medicago truncatula
  misc_feature (10)..(140): Pfam Name: NAM Pfam Description: No apical meristem (NAM) protein
  misc_feature: Public GI ID no. 124360182
  misc_feature: Bit score of 358.8 for HMM based on sequences of Figure 42
  misc_feature: Functional Homolog Of SEQ ID NO. 2
MMQGSGELTVPPGFRFHPTDEELLYYYLRKKVSYEAIDLDVIREVDLNRLEPWDLKDKCRIGSGPQNEWYFFSHKDKKYPTGTRTNRATTAGFWKATGRDKAIYHTNSKRIGMRKTLVFYTGRAPHGHKTDWIMHEYRLDDDDNAEVQEDGWVVCRVFKKKNTNRSYQQEIEEEDHHMINHMRSTNGPNHFLEPKHHHHMQQLGLYDYNNNTTTTFDGTIHLPQLFSPESAIAAPPTSFHNSSMDILECSQNLLRLTTTNTSSGLNLMQQQQQQGERLISGSDWSFLDKLLASHNGMDLNLRNKLCNTPNNHQAAPSAVGTSSAQKFPFHYLGCESHDIMKFSK

SEQ ID NO: 71 - protein, 379 aa, Zea mays
  misc_feature (11)..(140): Pfam Name: NAM Pfam Description: No apical meristem (NAM) protein
  misc_feature: Public GI ID no. 194700068
  misc_feature: Bit score of 359.6 for HMM based on sequences of Figure 42
  misc_feature: Functional Homolog Of SEQ ID NO. 2
MSISVNGQSCVPPGFRFHPTEEELLNYYLRKKVASQQIDLDVIRDVDLNKLEPWDIQERCKIGSGPQNDWYFFSHKDKKYPTGTRTNRATAAGFWKATGRDKAIYSAVRRMGMRKTLVFYRGRAPHGHKSDWIMHEYRLDDPDAAAVAATVAAAAASSDGGQEDGWVVCRVFQKKHHHKESSGRCRSKRGSKTEHGHGEAKTAAHQRHGCGLQYSSNDDTLDHMLGRRSCKQEHELLPLPPPAAARAASRYIRPIETVLGGHGFMKLPPLESPAAAEALTTPHAVSAGDATAAGALDGLHRAGNGITDWVMMDRMVALHLNGQAPAADQLGSCFDASADGGGLACFYSAAANRLLGGGDDDLWSFTRSSSTERLGHVSL

SEQ ID NO: 72 - DNA, 1086 bp, Populus balsamifera subsp. trichocarpa
  misc_feature: Ceres Annot ID no. 1487753
  misc_feature: Encodes the peptide sequence at SEQ ID NO. 73
atggagtcttgtgtcccacctggattcaggttccatccaaccgatgaagagcttgttggctattatctaaggaagaaagttgcatcacaaaagattgatcttgatgttattagagatattgatctttacagaattgaaccatgggatctacaagagagatgctggatcggatatgaagagcagaatgagtggtacttctttagccacaaggataagaagtatccaacagggacaaggactaatagagcaaccatggctggcttttggaaggctaccgggagagacaaggcagtgtatgacaaaacaaaactcattggcatgaggaaaacccttgtcttctacaaaggaagagccccaaatgggcagaaaactcactggatcatgcatgaataccggcttgaatcagatgagaatggtcctccacaggcaagcatatcaacttatgtcactataacaccccccccccccaacacaaatggatatgtcgccctaaaggaagaaggatgggtagtttgtcgtgcatttaagaagcgaactactggccaaaccaagagcattgaagggtgggactcaagctacttctatgaggaatcaagtggggttagctcagtggtggatcctattgattatatagcaaggcaacctcaaggctttttggctcataatttcttgtgtaagcaggagatagaaggagataagttaagtttcatgcactcagaaaattttgtacagcttcctcagttaaagagcccatctgagccattaataaagaggccaacctcgtcaatgtctttgatatcagagaataataacagtaacaatgaagaggtagagcaaaatggattgtccaacaacaacacccagaaagtaactgactggagagcccttgacaagtttgttgcttctcagttgagtcaagaagaaagatatgatggtgatggtgtttcaagctttgttgaggcagaaaataactcagatttgccatttctgttgttgcaaagtggtagagatgacgggaacaagtttaatggattcttaggttcaagttctgactgtgatattggaatatgcatatttgaaaaatga

SEQ ID NO: 73 - protein, 361 aa, Populus balsamifera subsp. trichocarpa
  misc_feature (5)..(134): Pfam Name: NAM Pfam Description: No apical meristem (NAM) protein
  misc_feature: Ceres Annot ID no. 1487753
  misc_feature: Bit score of 588.1 for HMM based on sequences of Figure 42
  misc_feature: Functional Homolog Of SEQ ID NO. 2
MESCVPPGFRFHPTDEELVGYYLRKKVASQKIDLDVIRDIDLYRIEPWDLQERCWIGYEEQNEWYFFSHKDKKYPTGTRTNRATMAGFWKATGRDKAVYDKTKLIGMRKTLVFYKGRAPNGQKTHWIMHEYRLESDENGPPQASISTYVTITPPPPNTNGYVALKEEGWVVCRAFKKRTTGQTKSIEGWDSSYFYEESSGVSSVVDPIDYIARQPQGFLAHNFLCKQEIEGDKLSFMHSENFVQLPQLKSPSEPLIKRPTSSMSLISENNNSNNEEVEQNGLSNNNTQKVTDWRALDKFVASQLSQEERYDGDGVSSFVEAENNSDLPFLLLQSGRDDGNKFNGFLGSSSDCDIGICIFEK

SEQ ID NO: 74 - protein, 285 aa, Oryza sativa subsp. japonica
  misc_feature (8)..(144): Pfam Name: NAM Pfam Description: No apical meristem (NAM) protein
  misc_feature: Public GI ID no. 32487489
  misc_feature: Bit score of 268 for HMM based on sequences of Figure 42
  misc_feature: Functional Homolog Of SEQ ID NO. 2
MEEEWCCVAPGFRFHPTEEELVGYYLARKVVGQQDDGIIQEVDLNSIEPWDLLQAQQHDQEYYCYFFSYKDRKYPSARGTGTRTNRATAAGFWKATGRDKPVLSSSRSSSSPAVIGMRKTLVFYRGRAPNGCKTDWIIHEYRLVAHHQQPDGSCWVVCRAFHKPTTTTLQHQLHLHRPAPLLHHPGYYDDQYLYPPPAAAAGGGGLLCSPALDMELEDEEDESKMMILSNDNIPLVVSPTAVHTQGTGGDIINDATTAPAAAAAADHRRHLAPPPPLHLLANSVD

SEQ ID NO: 75 - protein, 290 aa, Oryza sativa subsp. indica
  misc_feature (7)..(143): Pfam Name: NAM Pfam Description: No apical meristem (NAM) protein
  misc_feature: Public GI ID no. 90399258
  misc_feature: Bit score of 279.4 for HMM based on sequences of Figure 42
  misc_feature: Functional Homolog Of SEQ ID NO. 2
MEEWCCVAPGFRFHPTEEELVGYYLARKVVGQQDDGIIQEVDLNSIEPWDLLQAQQHDQEYYCYFFSYKDRKYPSARGTGTRTNRATAAGFWKATGRDKPVLSSSRSSSSPAVIGMRKTLVFYRGRAPNGCKTDWIIHEYRLVAHHQQPDGSCWVVCRAFHKPTTTTTLQHQLHLHRPPPLLHHPGYYDDQYLCPPPAAAGGGGLLCSPALDMELEDEEDESKMMILSNDNIPLVVSPTAVHTQGTGGDIINDATTAPAAAAAAADHRRHPELLAAGPIDTLLHHHHFTC

SEQ ID NO: 76 - DNA, 1354 bp, Triticum aestivum
  misc_feature: Ceres Clone ID no. 630591
  misc_feature: Encodes the peptide sequence at SEQ ID NO. 77
aaaagaaagctctagctagctagctacttcgcaaattttgcgtgcatcgatcgacgatggctgacttctcgtccagcaacggcgtcccgccggggttccggttccaccctaccgacgaggagctgctgctctactacctcaagaagaagatcggcttcgaaaagttcgacctcgaggtcatcagggaggtcgacctcaacaagatcgagccatgggacctccaagagagatgccggatcgggtctgcgccgcagaacgagtggtacttcttcagccacaaggaccgcaagtacccgacggggtcgcggacgaaccgcgcgacgacggccgggttctggaaggcaacggggagggacaagtgcatccgcaccagctaccgcaagatcgggatgcgcaagacgctcgtcttctaccgcggccgcgccccacacggccagaagtccgactggatcatgcacgagtaccgcctcgaggaaatcgacgaagcccagggcggcaccagcgaggatggatgggtggtgtgccgcgtgttcaagaagaagtgtttcttcaagatcgccggaggcggcgaggggagctcgagccagagcgcggacgccggcggcggccacatggccgtgtcctcgccgctgggtggccacgaccacgctgacagggccgccatggcatcccactacatgcacgggatgcacccgcagtaccacccccagcacgcctcttccttctactactcccagatgcaaccaccggaggcggcctactcgcaccacgtgcaggtccaggacctcctcaccaaccaccggccggccgccgacgcagctggcggcgggtatgatttctccagcctgccggtcgagcaccctggcctggacgtcggcagcagcgacggcgtcgcggcggatgggctggccgaaggaagagatcagacaaacggtgcagccgatcagcagtggcagccgatggacgggttcagcaacggcgggggcgccgctgcagtacagcagatgagcgccatgaactccgggcaacgaggtggggagatggatttgtggggatatgggaggtaaattcaacatcaccaagacatgagaaagtgcatccgcatgcatgaatgttgcatgcaagtgggaaggaggatcctgaaaatactggtaatgttgttggagagttatcattggtttttggtgtactgtatatgttgtgttattaatttatcccaatttattgttgtctaatgtaataagaactacggatacatatcggtatgtaagattgtaagtggtgatttgtgcgtgtacatgtgtttgcaaagagaaaaacacaagaatttaagtttgtgattttcttgccatgt

SEQ ID NO: 77 - protein, 336 aa, Triticum aestivum
  misc_feature (10)..(139): Pfam Name: NAM Pfam Description: No apical meristem (NAM) protein
  misc_feature: Ceres Clone ID no. 630591
  misc_feature: Bit score of 291.6 for HMM based on sequences of Figure 42
  misc_feature: Functional Homolog Of SEQ ID NO. 2
MADFSSSNGVPPGFRFHPTDEELLLYYLKKKIGFEKFDLEVIREVDLNKIEPWDLQERCRIGSAPQNEWYFFSHKDRKYPTGSRTNRATTAGFWKATGRDKCIRTSYRKIGMRKTLVFYRGRAPHGQKSDWIMHEYRLEEIDEAQGGTSEDGWVVCRVFKKKCFFKIAGGGEGSSSQSADAGGGHMAVSSPLGGHDHADRAAMASHYMHGMHPQYHPQHASSFYYSQMQPPEAAYSHHVQVQDLLTNHRPAADAAGGGYDFSSLPVEHPGLDVGSSDGVAADGLAEGRDQTNGAADQQWQPMDGFSNGGGAAAVQQMSAMNSGQRGGEMDLWGYGR

SEQ ID NO: 78 - DNA, 716 bp, Panicum virgatum
  misc_feature: Ceres Clone ID no. 2010191
  misc_feature: Encodes the peptide sequence at SEQ ID NO. 79
agcgccaataatccaagccatttctttgtgttttgcaaaaaaaactagaaagaaatgggaagcaaggatcttaagagtgtaatcatgtgtgtgctgatactagggataatcttggatgtagagggcatgagttgctgcaggaacaccacggcaagaaactgctacaacatgtgtcgtatgaccccgccagcttgtgcagcaagatgtggctgtataatcataagtggcaatcaatgcccatgctaccctagtttgaaccttcttccgaactccggtgaaccagatgccattaagtactgcaacttgggatgtgtgtcttctatgtgcgacaccaagaacaatgctccagaatttgtcggtgaagagatgaaaatcgacatggaacactgcagtgatgcatgtgaccgtttctgcaatgggtatgcccgcatggcatccgttgctgcttaatcatgcatgtgcatgccatgggatttgttgtcgaaggccaaggtctcatcatgatggatgatattctaaataaaggatctcatgggacagatccaagtcagtgtgtgtcatcttgtacatatgtacgtgtgtgctctttttttgtttctttgttacaataaaggtaaccacacgatggatgccatgttattacctgtatgtgctcatctctatcgagatgtatgcatgtagccttggccagttaatataataactataaattatac

SEQ ID NO: 79 - protein, 131 aa, Panicum virgatum
  misc_feature (25)..(67): Pfam Name: Thionin Pfam Description: Plant thionin
  misc_feature: Ceres Clone ID no. 2010191
  misc_feature: Bit score of 322.5 for HMM based on sequences of Figure 48
  misc_feature: Functional Homolog Of SEQ ID NO. 79
  misc_feature: in Figure 48
MGSKDLKSVIMCVLILGIILDVEGMSCCRNTTARNCYNMCRMTPPACAARCGCIIISGNQCPCYPSLNLLPNSGEPDAIKYCNLGCVSSMCDTKNNAPEFVGEEMKIDMEHCSDACDRFCNGYARMASVAA

SEQ ID NO: 80 - protein, 137 aa, Hordeum jubatum
  misc_feature (29)..(74): Pfam Name: Thionin Pfam Description: Plant thionin
  misc_feature: Public GI ID no. 246215
  misc_feature: Bit score of 363.2 for HMM based on sequences of Figure 48
  misc_feature: Functional Homolog Of SEQ ID NO. 79
  misc_feature: in Figure 48
MATSKSIKSVVICVLILGLVLEQVQVEGKSCCKNTTGRNCYNACRLPGTPRPVCANLCGCKIISGPTCPRDYPKLNLLPESGEPDATEYCTIGCKTSVCDNMDNVFRGQEMKIDMGLCSNACVRFCNDGTVIQSVEA

SEQ ID NO: 81 - protein, 137 aa, Avena sativa
  misc_feature (29)..(74): Pfam Name: Thionin Pfam Description: Plant thionin
  misc_feature: Public GI ID no. 21069037
  misc_feature: Bit score of 355.2 for HMM based on sequences of Figure 48
  misc_feature: Functional Homolog Of SEQ ID NO. 79
  misc_feature: in Figure 48
MGSIKGLKSVVICVLVLGIVLEQVQVEGKSCCKDIMARNCYNVCRIPGTPRPVCATTCRCKIISGNKCPKDYPKLHGDPDAGTPNAIEFCNTGCMSSICDNMNNAYNVEDKEIDVELCGNACTSFCNQIIVRASVAA

SEQ ID NO: 82 - protein, 137 aa, Triticum aestivum
  misc_feature (28)..(72): Pfam Name: Thionin Pfam Description: Plant thionin
  misc_feature: Public GI ID no. 4007850
  misc_feature: Bit score of 342.1 for HMM based on sequences of Figure 48
  misc_feature: Functional Homolog Of SEQ ID NO. 79
  misc_feature: in Figure 48
MGSKGFKGVIVCLLILGLVLEQLQVEGKSCCRSTLGRNCYNLCRARGAQKLCAGVCRCKISSGLSCPKGFPKLALESNSDEPDTIEYCNLGCRSSVCDYMVNAAADDEEMKLYVENCADACVSFCNGDAGLPSLDAY

SEQ ID NO: 83 - protein, 136 aa, Secale cereale
  misc_feature (28)..(72): Pfam Name: Thionin Pfam Description: Plant thionin
  misc_feature: Public GI ID no. 4007745
  misc_feature: Bit score of 343.2 for HMM based on sequences of Figure 48
  misc_feature: Functional Homolog Of SEQ ID NO. 79
  misc_feature: in Figure 48
MGSKGLKGVMVCLLILGLVLEQVQVEGKSCCKSTLGRNCYNLCRTRGAQKLCANFCRCKLISSTSCPKEFPKLALESNSDEPDTVEYCNLGCRSSVCDYMVSAAADEEEMKLYVERCGDACVSFCNGDAGLPSLSA

SEQ ID NO: 84 - protein, 135 aa, Oryza sativa subsp. japonica
  misc_feature (28)..(72): Pfam Name: Thionin Pfam Description: Plant thionin
  misc_feature: Public GI ID no. 54290571
  misc_feature: Bit score of 326.4 for HMM based on sequences of Figure 48
  misc_feature: Functional Homolog Of SEQ ID NO. 79
  misc_feature: in Figure 48
MKAVKSPIMCVLVLGLVLQQETIKVEAKSCCPTTTARNIYNACRFALGTRERCSKLSGCKIVDGKCKPPYIHHTLYPEAEESDVLDFCMLGCTSSMCSNMNTCADNEEGNVVVERCNEACYHFCNKKADIVTVVS

SEQ ID NO: 85 - protein, 131 aa, Aegilops tauschii
  misc_feature (32)..(77): Pfam Name: Thionin Pfam Description: Plant thionin
  misc_feature: Public GI ID no. 1052551
  misc_feature: Bit score of 286.5 for HMM based on sequences of Figure 48
  misc_feature: Functional Homolog Of SEQ ID NO. 79
  misc_feature: in Figure 48
MGGGQKGLESAIVCLLVLGLVLEQVQVEGVDCGANPFKVACFNSCLLGPSTVFQCADFCACRLPAGLASVRSSDEPNAIEYCSLGCRSSVCDNMINRADNSTEEMKLYVKRCGVACDSFCKGDTLLASLDD

SEQ ID NO: 86 - protein, 134 aa, Crambe abyssinica
  misc_feature (25)..(70): Pfam Name: Thionin Pfam Description: Plant thionin
  misc_feature: Public GI ID no. 802168
  misc_feature: Bit score of 303.8 for HMM based on sequences of Figure 48
  misc_feature: Functional Homolog Of SEQ ID NO. 79
  misc_feature: in Figure 48
MEGKSVILSVLIISLVMAQNQVEAKSCCPSITARNTYNICRLPGTPRPVCATLSGCIIQSDSTCKPPYPYGDLKNSGDAVNEYCKLGCASSVCGSLATFQNSDASKIVDGAVAQCTNACSNFCTKGSANAVETA

SEQ ID NO: 87 - DNA, 687 bp, Panicum virgatum
  misc_feature: Ceres Clone ID no. 2047875
  misc_feature: Encodes the peptide sequence at SEQ ID NO. 88
agcgccaataatccaagccatttctttgtgttttgcaagaaagctagaaagaaatgggaagcaaggatcttaagagtgtaatcatgtgtgtgctgatactagggataatcttggatgtagagggcatgagttgctgcaggaacactacggcaagaaactgctacaacatgtgtcgtatgaccccgccagcttgtgcagcaagatgtggctgtataatcataagtggcaatcaatgcccatgctaccctagtttgaaccttcttccgaactccggtgaaccagatgccattaagtactgcaacatgggatgtgtgtcttctatgtgcgacaccatgaacaatgaatctgtcggtgaagagatgaaaatcgacagggaacactgcagtgatgcatgtgaccgtttttgcaatggggatgcccgcattgcatccgttgctgcttaatcatgcatgtgcatgccatgggatatgttgtcgaaggccaaggtctcatcatgatggatggtattctaaataaaggatctcatgggacagaatcaagtcagtgtgtgtcatcttgtacatatgtacgtgtgtgctcttttatttgtttctttgttacaataaaggtaacctcacgatggatgccatgttattacctgtatgtgctcatctctatcgacatgtatgcatgtagccttggccagtt

SEQ ID NO: 88 - protein, 129 aa, Panicum virgatum
  misc_feature (25)..(67): Pfam Name: Thionin Pfam Description: Plant thionin
  misc_feature: Ceres Clone ID no. 2047875
  misc_feature: Bit score of 305.1 for HMM based on sequences of Figure 48
  misc_feature: Functional Homolog Of SEQ ID NO. 79
MGSKDLKSVIMCVLILGIILDVEGMSCCRNTTARNCYNMCRMTPPACAARCGCIIISGNQCPCYPSLNLLPNSGEPDAIKYCNMGCVSSMCDTMNNESVGEEMKIDREHCSDACDRFCNGDARIASVAA

SEQ ID NO: 89 - DNA, 647 bp, Panicum virgatum
  misc_feature: Ceres Clone ID no. 2024838
  misc_feature: Encodes the peptide sequence at SEQ ID NO. 90
aatgggaagcaagggtcttcagagtgtaatcatgtgtgtgctgatactaggaataatcttggaagtagagggaaagagttgttgcaagaccaccctggcaagaatctgctacaacgtatgtcgtcggaggtttcccccgccagtttgtgcactaggatgtcgctgtaaaatcgtaaaaggcaacaaatgcccgcctggctatcctaaattgaaccttcttccgaactccgcaggtgaaccagctgatgccatttcgtcgtactgcaacttgggatgtgtgtcttctatgtgcgacaacatcagcaatgctccagaatttgtcggcgaagagacgaacatcgacatggaacgttgcagtgatgcatgtgaccgtatttgcaatggggatgccagcatcgcgtccgttgctgcataatcatgcatgtgcatgacatcggatagtacgtgttccacaaaaaggatctcatgggtcagatccaagccagtgtttcatcttatatatgtatacgtgtgctcttttttttctttgttacaataaaggtaaccacacgagggatgccatgttcctacctgtatgtgcccatctctatcgagatgtatccgtgtacccttggccagttaatataattaatcactataaattatat

SEQ ID NO: 90 - protein, 137 aa, Panicum virgatum
  misc_feature (25)..(69): Pfam Name: Thionin Pfam Description: Plant thionin
  misc_feature: Ceres Clone ID no. 2024838
  misc_feature: Bit score of 257.9 for HMM based on sequences of Figure 48
  misc_feature: Functional Homolog Of SEQ ID NO. 79
MGSKGLQSVIMCVLILGIILEVEGKSCCKTTLARICYNVCRRRFPPPVCALGCRCKIVKGNKCPPGYPKLNLLPNSAGEPADAISSYCNLGCVSSMCDNISNAPEFVGEETNIDMERCSDACDRICNGDASIASVAA

SEQ ID NO: 91 - protein, 137 aa, Hordeum vulgare
  misc_feature (29)..(74): Pfam Name: Thionin Pfam Description: Plant thionin
  misc_feature: Public GI ID no. 246217
  misc_feature: Bit score of 324.2 for HMM based on sequences of Figure 48
  misc_feature: Functional Homolog Of SEQ ID NO. 79
MAPSKSIKSVVICVLILGLVLEQVQVEGKSCCKDTLARNCYNTCRFAGGSRPVCAGACRCKIISGPKCPSDYPKLNLLPESGEPDVTQYCTIGCRNSVCDNMDNVFRGQEMKFDMGLCSNACARFCNDGAVIQSVEA

SEQ ID NO: 92 - protein, 137 aa, Hordeum vulgare
  misc_feature (29)..(74): Pfam Name: Thionin Pfam Description: Plant thionin
  misc_feature: Public GI ID no. 1351242
  misc_feature: Bit score of 319.3 for HMM based on sequences of Figure 48
  misc_feature: Functional Homolog Of SEQ ID NO. 79
MAPSKSIKSVVICVLILGLVLEQVQVEGKSCCKDTLARNCYNTCHFAGGSRPVCAGACRCKIISGPKCPSDYPKLNLLPESGEPDVTQYCTIGCRNSVCDNMDNVFRGQEMKFDMGLCSNACARFCNDGAVIQSVEA

SEQ ID NO: 93 - protein, 137 aa, Hordeum vulgare
  misc_feature (29)..(74): Pfam Name: Thionin Pfam Description: Plant thionin
  misc_feature: Public GI ID no. 2507457
  misc_feature: Bit score of 316.5 for HMM based on sequences of Figure 48
  misc_feature: Functional Homolog Of SEQ ID NO. 79
MAPSKSIKSVVICVLILVLVLEQVQVEGKSCCKDTLARNCYNTCRFAGGSRPVCAGACRCKIISGPKCPSDYPKLNLLPESGEPDVTQYCTIGCTNSVCDNMDNVFRGQEMKFDMGLCSNACARFCNDGAVIQSVEA

SEQ ID NO: 94 - protein, 137 aa, Hordeum vulgare
  misc_feature (29)..(74): Pfam Name: Thionin Pfam Description: Plant thionin
  misc_feature: Public GI ID no. 44888362
  misc_feature: Bit score of 334.4 for HMM based on sequences of Figure 48
  misc_feature: Functional Homolog Of SEQ ID NO. 79
MATNKSIKSVVICVLILGLVLEQVQVEGKSCCKNTTGRNCYNACRFAGGSRPVCATACGCKIISGPTCPRDYPKLNLLPESGEPNVTEYCTIGCRTSVCDNMDNVSRGQEMKFDMGLCSNACARFCNDGEVIQSVEA

SEQ ID NO: 95 - protein, 137 aa, Hordeum vulgare subsp. vulgare
  misc_feature (29)..(74): Pfam Name: Thionin Pfam Description: Plant thionin
  misc_feature: Public GI ID no. 225958
  misc_feature: Bit score of 316.5 for HMM based on sequences of Figure 48
  misc_feature: Functional Homolog Of SEQ ID NO. 79
MAPSKSIKSVVICVLILGLVLEQVQVEGKSCCKATLARNCYNTCHFAGGSRPVCAGACRCKIISGPKCPSDYPKLNLLPESGEPDVTQYCTIGCRNSVCDNMDNVFRGQEMKFDMGLCSNACARFCNDGAVIQSVEA

SEQ ID NO: 96 - protein, 137 aa, Hordeum vulgare
  misc_feature (29)..(74): Pfam Name: Thionin Pfam Description: Plant thionin
  misc_feature: Public GI ID no. 44888508
  misc_feature: Bit score of 329.8 for HMM based on sequences of Figure 48
  misc_feature: Functional Homolog Of SEQ ID NO. 79
MATNKSIKSVVICVLILGLVLEQVQVEGKSCCKNTTGRNCYNACHFAGGSRPVCATACGCKIISGPTCPRDYPKLNLLPESGEPNATEYCTIGCRTSVCDNMDNVSRGQEMKFDMGLCSNACARFCNDGDVIQSVEA

SEQ ID NO: 97 - protein, 136 aa, Hordeum vulgare
  misc_feature (28)..(72): Pfam Name: Thionin Pfam Description: Plant thionin
  misc_feature: Public GI ID no. 401185
  misc_feature: Bit score of 316.5 for HMM based on sequences of Figure 48
  misc_feature: Functional Homolog Of SEQ ID NO. 79
MGSKGLKGVMVCLLILGLVLEHVQVEGKSCCRSTLGRNCYNLCRVRGAQKLCANACRCKLTSGLKCPSSFPKLALVSNSDEPDTIDYCNLGCRASMCDYMVNAAADDEEMKLYVEHCSDACVNFCNGDVGLTSLTA

SEQ ID NO: 98 - protein, 137 aa, Avena sativa
  misc_feature (29)..(74): Pfam Name: Thionin Pfam Description: Plant thionin
  misc_feature: Public GI ID no. 21069039
  misc_feature: Bit score of 317.1 for HMM based on sequences of Figure 48
  misc_feature: Functional Homolog Of SEQ ID NO. 79
MGSIKGLKSVVICVLVLGIVLEHVQVEGKSCCKDTTARNCYNVCRIPGTPRPVCATTCRCKIISGNKCPKDYPKLHGDLDAGTPNAIEFCNMGCMSSVRDNMNNAYNIEEKEIDVELCGTAYASFCNQIIARLSVAA

SEQ ID NO: 99 - protein, 136 aa, Triticum aestivum
  misc_feature (28)..(72): Pfam Name: Thionin Pfam Description: Plant thionin
  misc_feature: Public GI ID no. 401184
  misc_feature: Bit score of 336.1 for HMM based on sequences of Figure 48
  misc_feature: Functional Homolog Of SEQ ID NO. 79
MGSKGLKGVMVCLLILGLVLEQVQVEGKSCCRTTLGRNCYNLCRSRGAQKLCSTVCRCKLTSGLSCPKGFPKLALESNSDEPDTIEYCNLGCRSSVCDYMVNAAADDEEMKLYVENCGDACVNFCNGDAGLTSLDA

SEQ ID NO: 100 - protein, 133 aa, Hordeum vulgare subsp. vulgare
  misc_feature (25)..(69): Pfam Name: Thionin Pfam Description: Plant thionin
  misc_feature: Public GI ID no. 514332
  misc_feature: Bit score of 304.7 for HMM based on sequences of Figure 48
  misc_feature: Functional Homolog Of SEQ ID NO. 79
MGLKGVMVCLLILGLVLEQVQVEGKSCCRSTLGRNCYNLCRVRGAQKLCAGVCRCKLTSSGKCPTGFPKLALVSNSDEPDTVKYCNLGCRASMCDYMVNAAADDEEMKLYLENCGDACVNFCNGDAGLTSLTA

SEQ ID NO: 101 - protein, 136 aa, Triticum aestivum
  misc_feature (28)..(72): Pfam Name: Thionin Pfam Description: Plant thionin
  misc_feature: Public GI ID no. 1304262
  misc_feature: Bit score of 331.2 for HMM based on sequences of Figure 48
  misc_feature: Functional Homolog Of SEQ ID NO. 79
MGSKGLKGVMVCLLILGLVLEQVQVEGKSCCRTTLGRNCYNLCRSRGAQKLCSTVCRCKLTSGLSCPKGFPKLALESNSDEPDTIEYCNLGCRSSVCDYMVNAAADDEEMKLYVENCGDACVNFCNGDAGLTSPDA

SEQ ID NO: 102 - protein, 136 aa, Avena sativa
  misc_feature (29)..(73): Pfam Name: Thionin Pfam Description: Plant thionin
  misc_feature: Public GI ID no. 21069045
  misc_feature: Bit score of 287.9 for HMM based on sequences of Figure 48
  misc_feature: Functional Homolog Of SEQ ID NO. 79
MATTKGLKCVVLCVLVLGLVLGQVQVEGKSCCPSTSARNCYNVCRLTGTSRPRCASLCGCKIVDGTCPDGYSKLHLLLESGEPDVTEYCTIGCMTSVCDNMDNVIHGQEMKIDMLLCNKECVRFCNKGAVIPSFQA

SEQ ID NO: 103 - protein, 127 aa, Hordeum vulgare subsp. vulgare
  misc_feature (19)..(63): Pfam Name: Thionin Pfam Description: Plant thionin
  misc_feature: Public GI ID no. 225008
  misc_feature: Bit score of 280.5 for HMM based on sequences of Figure 48
  misc_feature: Functional Homolog Of SEQ ID NO. 79
MVCLLILGLVLEHVQVEGKSCCRSTLGRNCYNLCRVRGAQKLCANACRCKLTSGLKCPSSFPKLALVSNSDEPDTIDYCNLGCRASMCDYMVNAAADDEEMKLYVEHCSDACVNFCNGDVGLTSLTA

SEQ ID NO: 104 - protein, 137 aa, Avena sativa
  misc_feature (29)..(74): Pfam Name: Thionin Pfam Description: Plant thionin
  misc_feature: Public GI ID no. 21069041
  misc_feature: Bit score of 249.9 for HMM based on sequences of Figure 48
  misc_feature: Functional Homolog Of SEQ ID NO. 79
MGSIKGLRSLIMCVLIVGIVLEQVQVEGNTCCKDDIARNCYNVCRIPGTPTFICANMCRCIITRRNECPNDYPKLQSDLDAGTPNAIEFCNMGCMSSICGNMKNAYPGEEKENDKEFCSIACARFCNKITVSTSVAA

SEQ ID NO: 105 - protein, 136 aa, Triticum aestivum
  misc_feature (28)..(72): Pfam Name: Thionin Pfam Description: Plant thionin
  misc_feature: Public GI ID no. 2851607
  misc_feature: Bit score of 324.4 for HMM based on sequences of Figure 48
  misc_feature: Functional Homolog Of SEQ ID NO. 79
MGSKGLKGVMVCLLILGLVLEQVQVEGKSCCKSTLGRNCYNLCRARGAQKLCANVCRCKLTSGLSCPKDFPKLVLESNSDEPDTMEYCNLGCRSSLCDYIVNAAADDEEMKLYVEQCGDACVNFCNADAGLTSLDA

SEQ ID NO: 106 - protein, 127 aa, Hordeum vulgare
  misc_feature (19)..(63): Pfam Name: Thionin Pfam Description: Plant thionin
  misc_feature: Public GI ID no. 135788
  misc_feature: Bit score of 279.9 for HMM based on sequences of Figure 48
  misc_feature: Functional Homolog Of SEQ ID NO. 79
MVCLLILGLVLEQVQVEGKSCCRSTLGRNCYNLCRVRGAQKLCAGVCRCKLTSSGKCPTGFPKLALVSNSDEPDTVKYCNLGCRASMCDYMVNAAADDEEMKLYLENCGDACVNFCNGDAGLTSLTA

SEQ ID NO: 107 - protein, 142 aa, Avena sativa
  misc_feature (29)..(74): Pfam Name: Thionin Pfam Description: Plant thionin
  misc_feature: Public GI ID no. 21069043
  misc_feature: Bit score of 271.6 for HMM based on sequences of Figure 48
  misc_feature: Functional Homolog Of SEQ ID NO. 79
MATSKGIKSAVICFLMLGLVLEQVQVEGKSCCKSTTAINCYNVCRLAGAPRPVCAGPCGCKLLDVTTCPSDWPKQHLLSEYGEADAAEYCTIGCMTSVCDNIGNAMFAPIVRGQEMNIDMQVCNNACVRFCNKGAVNPSVGA

SEQ ID NO: 108 - protein, 136 aa, Triticum aestivum
  misc_feature (28)..(72): Pfam Name: Thionin Pfam Description: Plant thionin
  misc_feature: Public GI ID no. 4007846
  misc_feature: Bit score of 320.2 for HMM based on sequences of Figure 48
  misc_feature: Functional Homolog Of SEQ ID NO. 79
MGSKGLKGVMVCLLILGLVLEQVQVEGKSCCKSTLGRNCYNLCRARGAQKLCANVCRCKLTSGLSCPKDFPKLVLESNSDEPDTMEYCNLECRSSLCDYMVNAAADDEEMKLYVEQCGDACVNFCNADAGLTSLDA

SEQ ID NO: 109 - protein, 135 aa, Oryza sativa subsp. japonica
  misc_feature (28)..(73): Pfam Name: Thionin Pfam Description: Plant thionin
  misc_feature: Public GI ID no. 115468270
  misc_feature: Bit score of 270.7 for HMM based on sequences of Figure 48
  misc_feature: Functional Homolog Of SEQ ID NO. 79
MEGVKSLIMCMLVLGLVLQQEKIQVEAKSCCPSTTARNVYNSCRFAGGSRDTCAKLSGCKIVDGNCKPPYVHHTLHPEAEESEVVDFCKLGCASSVCSTMSTLFANEEANHAVDRCNEACRRFCTKEAETVTVVS

SEQ ID NO: 110 - protein, 135 aa, Oryza sativa subsp. indica
  misc_feature (28)..(73): Pfam Name: Thionin Pfam Description: Plant thionin
  misc_feature: Public GI ID no. 125555528
  misc_feature: Bit score of 265.4 for HMM based on sequences of Figure 48
  misc_feature: Functional Homolog Of SEQ ID NO. 79
MEGVKSLIMCMLVLGLVLQQEKIQVEAKSCCPSTTARNVYNSCRFAGGSRDTCAKLSGCKIVDGNCKPPYVHHTLHPEAEESEVVDFCKLGCASSVCSTMSTLFANEEANHAVDRCNEACRRFCSKEAETVTVLS

SEQ ID NO: 111 - protein, 135 aa, Oryza sativa subsp. japonica
  misc_feature (28)..(73): Pfam Name: Thionin Pfam Description: Plant thionin
  misc_feature: Public GI ID no. 115468266
  misc_feature: Bit score of 271.4 for HMM based on sequences of Figure 48
  misc_feature: Functional Homolog Of SEQ ID NO. 79
MEGVKSLIMCMLVLGLVLQQEKIQVEAKSCCPSTTARNVYNSCRFAGGSRDTCAKLSGCKIVDGNCKPPYVHHTLHPEAEESEVLDFCKLGCASSVCSTMSTLSSNEEANYAVDRCNDACHRFCTKEAETVTVVS

SEQ ID NO: 112 - protein, 135 aa, Oryza sativa subsp. japonica
  misc_feature (28)..(72): Pfam Name: Thionin Pfam Description: Plant thionin
  misc_feature: Public GI ID no. 54291433
  misc_feature: Bit score of 277.8 for HMM based on sequences of Figure 48
  misc_feature: Functional Homolog Of SEQ ID NO. 79
MEAVKSLIVCVLVLGLVLQHEHIQVEAKSCCPSTTARNIYNSCRFTGASRDKCCKISGCKIVDGKCKPPFIHHTLHPDSEESDVLDFCKLGCTSSVCSNMNTFAGNEEGNHAVDRCNEACYRFCTNEAEIVTVAS

SEQ ID NO: 113 - protein, 130 aa, Triticum aestivum
  misc_feature (32)..(77): Pfam Name: Thionin Pfam Description: Plant thionin
  misc_feature: Public GI ID no. 1052819
  misc_feature: Bit score of 274.4 for HMM based on sequences of Figure 48
  misc_feature: Functional Homolog Of SEQ ID NO. 79
MGGGKKGLESAIVCLLVLGLVLEQVQVEGVDCGANPFKVACFNSCLLGPSTVFQCADFCACRLPAGLASLRSSDEPNAIEYCSLGCRSSVCDNVISTADNTEEMKLYVKRCGDACDSFCKGDTLLASLDD

SEQ ID NO: 114 - DNA, 1830 bp, Panicum virgatum
  misc_feature: Ceres Clone ID no. 1788820
  misc_feature: Encodes the peptide sequence at SEQ ID NO. 115
ctctcctcccctgcgtgcgagagcaccagcagcttccgcttccaattccgccgcccccgccgccgtgcctctcctccattggctcgccgtcgccgcggcctcgaccgcctcgcctcacccgtcgccaccggcctcgtcacctcctgtgctactccgtgccatcggggcctgacagggacggcctacccgcacagcggaggacggcgtcaggacaagcgctcccgagcaacaagtatcccggcagcgcttcgctgccgctcggcgctcgagctccacatacaccagcagcagcagcacgccagcacgagcggaagcgggagggagcgctggctgcttgattcggtcaactcccgcgcgctcgcggcaggatcaaggccaatggggcgggagaggaggccgtggccggcggcggccgccgccgttcttctgctcgtcgcctcctgcgtcgccgcggcgccgctgcagcagcaccagcgcgccaggatcacaggggacgccggcggcgtgctggacgacaacccggtggggaagctgaaggtgttcgtgtacgagatgccgcgcaagtacaaccagatgctgctgtccaaggacagccggtgcctgcaccacatgttcgcggccgagatcttcacgcaccagttcctgctgtccagcgcggtgcggacgctggacccggaggaggccgactggttctacacccccgtgtacaccacctgcgacctcacgccgcagggcttccccctcccgttccgggcgccacgaatcatgcgcagcgccgtcaagtacgtcgccaccacgtggccctactggaacaggaccgagggcgccgaccacttcttcctaacaccccacgacttcggcgcctgcttccactaccaggaggagagggcgatggagaggggcatcctgccgctgctccggcgcgcgacgctggtgcagacgttcgggcagcggaaccacgtgtgcctgcaggaggggtccatcaccatcccgccctacgccaacccgcacaagatgcaggcgcacctcatcaaccccggcacgccgcgctccatcttcgtctacttccgcggcctcttctacgacatgggcaacgaccccgagggtggctactacgccaggggcgcgcgcgcgtcagtgtgggagaacttcaaggacaacccgctgttcgacatttcgacggaacacccgtcaacgtactacgaggacatgcagcgcgccatcttctgcctgtgcccgctggggtgggcgccgtggagcccgcggctggtggaggcggtggtgttcggttgcatcccggtgatcatcgccgacgacatcgtactgcccttcgcggacgccatcccctgggagcagatcagcgtgttcgtggcggagcgcgacgtaccgcgcctcgactccattctcacctccatcccgctccaggacatcctcaggaagcagcgcctgctcgccggcgcgtccgtcaagcaggcgctgctcttccaccagcccgcaaggcccggggacgccttcgaccagatactcaacgggctggcgcgcaagctgccgcacggcaagggcgtgttcctccagcccggggagaaggtgctcgactgggacgctgggctcgagagcgacctcaagccttggtaggcgcagcagcgcctgccttcacatttgttcatgttcttttgttttgttcttttatttaaatctttcgatcgatggatggatggatcacgcattagtttttgcacgaccagtttacacgcagcagcaatatagagcgagatttctcgggatatttgtgagaggcagcccttgtgtgatttaaatttagtgttcact

SEQ ID NO: 115 - protein, 418 aa, Panicum virgatum
  misc_feature (54)..(358): Pfam Name: Exostosin Pfam Description: Exostosin family
  misc_feature: Ceres Clone ID no. 1788820
  misc_feature: Bit score of 1138.8 for HMM based on sequences of Figure 27
  misc_feature: Functional Homolog Of SEQ ID NO. 115
  misc_feature: in Figure 27
MGRERRPWPAAAAAVLLLVASCVAAAPLQQHQRARITGDAGGVLDDNPVGKLKVFVYEMPRKYNQMLLSKDSRCLHHMFAAEIFTHQFLLSSAVRTLDPEEADWFYTPVYTTCDLTPQGFPLPFRAPRIMRSAVKYVATTWPYWNRTEGADHFFLTPHDFGACFHYQEERAMERGILPLLRRATLVQTFGQRNHVCLQEGSITIPPYANPHKMQAHLINPGTPRSIFVYFRGLFYDMGNDPEGGYYARGARASVWENFKDNPLFDISTEHPSTYYEDMQRAIFCLCPLGWAPWSPRLVEAVVFGCIPVIIADDIVLPFADAIPWEQISVFVAERDVPRLDSILTSIPLQDILRKQRLLAGASVKQALLFHQPARPGDAFDQILNGLARKLPHGKGVFLQPGEKVLDWDAGLESDLKPW

SEQ ID NO: 116 - DNA, 1248 bp, Sorghum bicolor
  misc_feature: Ceres Annot ID no. 8670354
  misc_feature: Encodes the peptide sequence at SEQ ID NO. 117
atggggccgtgcgtcgccgccgtggtcgctattctgctcgtcgccacctgcgtcgcggcggcgccgccgcagcagcagccgcgcaagcccggcaggatctcagggaacgcggtgggcgtgctggacgacgaccccgtggggaagctgaaggtgttcgtgtacgagatgccgcgcaagtacaacaagatgctgctggacaaggacagccgttgcctgcaccacatgttcgccgcggagatcttcatgcaccagttcctgctgtcgagcgcggtgcggacgctggaccccgaggaggccgactggttctacacgcccgtgtacacgacctgcgacctgacgccgcagggcttcccgctgccgttccgcgcgccgcggatcatgcggagcgcgatccggtacgtggcgacgacgtggccgttctggaaccggacggacggcgcggaccacttcttcctcaccccgcacgacttcggcgcgtgcttccactaccaggaggagcgcgccatggagcgcggcatcctgccgctgctccgtcgcgccacgctggtgcagacgttcgggcagcggaaccacgtgtgcctccaggacgggtccatcacggtgccaccctacgccgacccgcacaagatgcaggcgcacctcatcagccccggcacgccgcgctccatcttcgtctacttccgcggcctcttctacgacatgggcaacgaccccgaaggcgggtactacgccaggggcgcgcgcgcgtcggtgtgggagaacttcaaggacaacccgctgttcgacatctcgacggagcacccctacacgtactacgaggacatgcagcgggccatcttctgcctgtgcccgctggggtgggcgccgtggagccccaggctggtggaggcggtggtgttcgggtgcatccccgtcatcatcgccgacgacatcgtgctgccgttcgccgacgccatcccctgggaggacatcagcgtgttcgtggcggagcgggacgtgccgaggctcgactccatcctcacctccatcccgctcgccgacatcctgcggaggcagcgcctgctggccagggaatccgtcaagcaggcgctgctgttccaccagccggcaaggacaggggacgccttccaccaggtgctcaatgggctggcgcgcaagctgccgcacggcgacggcgtgttcctgcagcccggggagaaggtgctcgactgggacgccggactcgacagcgacctcaagccctggtag

SEQ ID NO: 117 - protein, 415 aa, Sorghum bicolor
  misc_feature (51)..(355): Pfam Name: Exostosin Pfam Description: Exostosin family
  misc_feature: Ceres Annot ID no. 8670354
  misc_feature: Bit score of 1134.9 for HMM based on sequences of Figure 27
  misc_feature: Functional Homolog Of SEQ ID NO. 115
  misc_feature: in Figure 27
MGPCVAAVVAILLVATCVAAAPPQQQPRKPGRISGNAVGVLDDDPVGKLKVFVYEMPRKYNKMLLDKDSRCLHHMFAAEIFMHQFLLSSAVRTLDPEEADWFYTPVYTTCDLTPQGFPLPFRAPRIMRSAIRYVATTWPFWNRTDGADHFFLTPHDFGACFHYQEERAMERGILPLLRRATLVQTFGQRNHVCLQDGSITVPPYADPHKMQAHLISPGTPRSIFVYFRGLFYDMGNDPEGGYYARGARASVWENFKDNPLFDISTEHPYTYYEDMQRAIFCLCPLGWAPWSPRLVEAVVFGCIPVIIADDIVLPFADAIPWEDISVFVAERDVPRLDSILTSIPLADILRRQRLLARESVKQALLFHQPARTGDAFHQVLNGLARKLPHGDGVFLQPGEKVLDWDAGLDSDLKPW

SEQ ID NO: 118 - DNA, 1472 bp, Zea mays
  misc_feature: Ceres Clone ID no. 363483
  misc_feature: Encodes the peptide sequence at SEQ ID NO. 119
ggccgctctctctgccacactcgggtgcctccaccaccaccagtagcagcagcagcaggatcaaaaggccaatgggggcgcacgccaccgcggccgcggccgccgtcctgctcgtcgccacctgcgttgcggcggtggcggcggcggcggcggcggcgctgctgcagcacgagcccggcaggatctcaggggacgcggtgggcgtgctggacgacgaccccgtggggaagctgaaggtgttcgtgtacgagatgccgcgcaagtacaacaggatgctgctggacaaggacagccggtgcctgcaccacatgttcgcggcggagatcttcatgcaccagttcctgctgtcgagcgcggtgcggacgctggacccggaggaggccgactggttctacacgcccgcgtacaccacctgcgacctcacgccgcagggcttcccgctgccgttccgggcgccgcggatcatgcgcagcgccatccgctacgtggccaccacgtggcccttctggaaccgcaccgacggcgccgaccacttcttcctcacgccgcacgacttcggcgcctgcttccactaccaggaggagcgcgccatggagcggggcatcctgccgctgctccgccgcgccacgctggtgcagacgttcggccagcgcaaccacgtgtgcctgcaggacggctccatcaccgtcccgccctacgccgacccgcgcaagatgcaggcgcacctcatcagccccggcacgccgcgctccatcttcgtctacttcaggggcctcttctacgacatgggcaacgaccccgagggcggctactacgccaggggcgctcgcgcgtcggtgtgggagaacttcaaggacaacccgctgttcgacatctcgacggagcacccgtcgacgtactacgaggacatgcagcgcgccatcttctgcctgtgcccgctggggtgggcgccctggagcccccggctggtggaggcggtggtgttcgggtgcatccccgtcatcatcgccgacgacatcgtgctgccgttcgcggacgccatcccctgggaggacatcagcgtgttcgtggcggagcgggacgtgccgcgcctcgactccatcctcacctccatcccgctgcccgacatcctgcggaggcagcgcctgctggcgcgggactccgtcaagcaggcgctgctgttccaccagcccgccaggcccggggacgccttccaccaggtgctcaacgggctggcgcggaagctgccgcacggcgagggcgtgttcctgcagcccggggagaaggcgctcgactgggacgccggactccagagcgacctcaagccctggtagtggactggactcgttgtacatctcttcgtgttcctttgtactctttcatttgacatgacatggatggatcacgcattagtttttgtaccacggcccgtttacatgcagcagcaatatactaatatatagtgtatttcc

SEQ ID NO: 119 - protein, 420 aa, Zea mays
  misc_feature (56)..(360): Pfam Name: Exostosin Pfam Description: Exostosin family
  misc_feature: Ceres Clone ID no. 363483
  misc_feature: Bit score of 1142.7 for HMM based on sequences of Figure 27
  misc_feature: Functional Homolog Of SEQ ID NO. 115
  misc_feature: in Figure 27
MGAHATAAAAAVLLVATCVAAVAAAAAAALLQHEPGRISGDAVGVLDDDPVGKLKVFVYEMPRKYNRMLLDKDSRCLHHMFAAEIFMHQFLLSSAVRTLDPEEADWFYTPAYTTCDLTPQGFPLPFRAPRIMRSAIRYVATTWPFWNRTDGADHFFLTPHDFGACFHYQEERAMERGILPLLRRATLVQTFGQRNHVCLQDGSITVPPYADPRKMQAHLISPGTPRSIFVYFRGLFYDMGNDPEGGYYARGARASVWENFKDNPLFDISTEHPSTYYEDMQRAIFCLCPLGWAPWSPRLVEAVVFGCIPVIIADDIVLPFADAIPWEDISVFVAERDVPRLDSILTSIPLPDILRRQRLLARDSVKQALLFHQPARPGDAFHQVLNGLARKLPHGEGVFLQPGEKALDWDAGLQSDLKPW

SEQ ID NO: 120 - protein, 422 aa, Oryza sativa subsp. japonica
  misc_feature (58)..(362): Pfam Name: Exostosin Pfam Description: Exostosin family
  misc_feature: Public GI ID no. 115441965
  misc_feature: Bit score of 1126.6 for HMM based on sequences of Figure 27
  misc_feature: Functional Homolog Of SEQ ID NO. 115
  misc_feature: in Figure 27
MGTRPCAGVASAVAAAVAVLLLAVSCFAAAATTTQKHGRMSGKGGDVLEDDPTGKLKVFVYEMPRKYNLNLLAKDSRCLQHMFAAEIFMHQFLLSSPVRTLDPEEADWFYTPAYTTCDLTPQGFPLPFRAPRIMRSAVRYVAATWPYWNRTDGADHFFLAPHDFGACFHYQEERAIERGILPVLRRATLVQTFGQRHHPCLQPGSITVPPYADPRKMEAHRISPATPRSIFVYFRGLFYDMGNDPEGGYYARGARASVWENFKDNPLFDISTEHPATYYEDMQRAIFCLCPLGWAPWSPRLVEAVVFGCIPVIIADDIVLPFADAIPWGEISVFVAEEDVPRLDTILASVPLDEVIRKQRLLASPAMKQAVLFHQPARPGDAFHQILNGLARKLPHPKGVFLEPGEKGIDWDQGLENDLKPW

SEQ ID NO: 121 - protein, 416 aa, Vitis vinifera
  misc_feature (52)..(356): Pfam Name: Exostosin Pfam Description: Exostosin family
  misc_feature: Public GI ID no. 225456511
  misc_feature: Bit score of 1151.6 for HMM based on sequences of Figure 27
  misc_feature: Functional Homolog Of SEQ ID NO. 115
  misc_feature: in Figure 27
MELCRWVFCVLLLIASSLRVGAEQLRRGQRTERISGSAGDVLEDNPVGRLKVFVYELPSKYNKKILQKDPRCLTHMFAAEIFMHRFLLSSPVRTLNPEEADWFYTPVYTTCDLTPNGLPLPFKSPRMMRSAIQLISSNWPYWNRTEGADHFFVVPHDFGACFHYQEEKAIERGILHLLQRATLVQTFGQRNHVCLKEGSITIPPYAPPQKMQSHLIPPDTPRSIFVYFRGLFYDVGNDPEGGYYARGARAAVWENFKDNPLFDISTEHPMTYYEDMQRAVFCLCPLGWAPWSPRLVEGVIFGCIPVIIADDIVLPFADAIPWEEIGVFVAEEDVPNLDTILTSIPPEVILRKQRLLANPSMKQAMLFPQPAQPGDAFHQILNGLARKLPHGRNIYLKPGEKILNWTAGPVGDLKPW

SEQ ID NO: 122 - protein, 420 aa, Triticum aestivum
  misc_feature (56)..(360): Pfam Name: Exostosin Pfam Description: Exostosin family
  misc_feature: Public GI ID no. 150246869
  misc_feature: Bit score of 1145.1 for HMM based on sequences of Figure 27
  misc_feature: Functional Homolog Of SEQ ID NO. 115
  misc_feature: in Figure 27
MARRVLVAIAVLAAAAALLVAAEAQQAPAQQGHQTERISGSAGDVLDDDPVGRLKVFIYDLPGKYNKKLLKKDPRCLNHMFAAEIFMHRFLLSSAVRTTNPEEADWFYTPVYPTCDLTPSGLPLPFKSPRMMRSAIELIATKWPYWNRSEGADHFFVTPHDFGACFHYQEEKAIGRGILPLLQRATLVQTFGQKNHVCLKEGSITIPPFAPPQKMQNHLIPGETPRSIFVYFRGLFYDTGNDPEGGYYARGARASVWENFKNNPLFDISTDHPPTYYEDMQRSVFCLCPLGWAPWSPRLVEAVVFGCIPVIIADDIVLPFADAIPWEEIGVFVPEEDVPRLDSILTSIPTEDILRKQRLLANPSMKQAMLFPQPAQAGDAFHQILNGLARKLPHGEDVFLKPGQVRLNWTAGPVGDLKPW

SEQ ID NO: 123 - protein, 420 aa, Picea sitchensis
  misc_feature (56)..(360): Pfam Name: Exostosin Pfam Description: Exostosin family
  misc_feature: Public GI ID no. 116793780
  misc_feature: Bit score of 1148.9 for HMM based on sequences of Figure 27
  misc_feature: Functional Homolog Of SEQ ID NO. 115
  misc_feature: in Figure 27
MRRKRELPQRSFFVLFLFLLIVPAFGQKQQEHQRSERIAGSAGDVLEDDPVGRLKVFIYELPSKYNKKILAKDPRCLTHMFATEIFMNRFLLGSPVRTLNPEEADWFYTPVYTTCDLTPNGLPLPFKSPRMMRSAIQYISTNWPYWNRTEGADHFFVVPHDFGACFHYQEEKAIERGILPLLQRATLVQTFGQRYHVCLKKGSITVPPYAPPQKMQAHLIPPSTPRSIFVYFRGLFYDVGNDPEGGYYARGARASVWENFKDNPLFDISTEHPATYYEDMQRAIFCLCPLGWAPWSPRLVEGVIFGCIPVIIADDIVLPFADAIPWEEIGVFVAEKDVPNLDTILTSIPPEVILRKQRLLANPAMKQAMLFPQPAQPGDAFHQILNGLARKLPHDSSIYLKPNQKILNWTAGPPGDLKPW

SEQ ID NO: 124 - protein, 415 aa, Arabidopsis thaliana
  misc_feature (51)..(355): Pfam Name: Exostosin Pfam Description: Exostosin family
  misc_feature: Public GI ID no. 18424516
  misc_feature: Bit score of 1138.1 for HMM based on sequences of Figure 27
  misc_feature: Functional Homolog Of SEQ ID NO. 115
  misc_feature: in Figure 27
MKLSSCVLIFLLCNTFSSISAFRLSRSQPTERISGSAGDVLEDDPVGRLKVFVYELPSKYNKKILQKDPRCLNHMFAAEIYMQRFLLSSPVRTLNPEEADWFYVPVYTTCDLTPNGLPLPFKSPRMMRSAIQLIASNWPYWNRTEGADHFFVVPHDFGACFHYQEEKAIGRGILPLLQRATLVQTFGQRNHVCLKEGSITVPPYAPPQKMQSHLIPEKTPRSIFVYFRGLFYDVGNDPEGGYYARGARAAVWENFKDNPLFDISTEHPTTYYEDMQRAIFCLCPLGWAPWSPRLVEAVIFGCIPVIIADDIVLPFADAIPWEDIGVFVDEKDVPYLDTILTSIPPEVILRKQRLLANPSMKQAMLFPQPAQPGDAFHQVLNGLARKLPHERSVYLRPGEKLLNWTAGPVADLKPW

SEQ ID NO: 125 - DNA, 1242 bp, Populus balsamifera subsp. trichocarpa
  misc_feature: Ceres Annot ID no. 1447833
  misc_feature: Encodes the peptide sequence at SEQ ID NO. 126
atgagggtgtgcttgtggttttttgttgtggttattgttttcggttttggtgatggaaaaaatgctgatcaaaggctacgcacagagaggatttcaggaagtgctggggatgtgttggaagataatccagtgggaagattgaaagtctttgtttatgagcttcctagtaaatacaacaagaaattactgcagaaggaccccagatgtctcactcatatgtttgctgctgaaattttcatgcatagatttctcttatccagcccagtccgaacccttaatccagaagaagcagattggttttatacccctatataccccacttgtgacctcacacctactggcttgccgttgcccttcaattctccaaggatgatgagaagtgcaatacagcttctctcctccaattggccttactggaatcgtacagaaggggctgatcacttctttgttgtgccccatgactttggagcctgcttccactatcaggaagagaaagccattgagcggggcattcttccactactccggcgtgctactttagttcaaacttttgggcagcgaaaccatgtgtgcttgaatgaggggtcaattacaattcctccgtatgctcctcctcaaaagatgcaggcccaccagattccccttgacactccgcggtcaatttttgtttacttccgcggattgttttatgatgtaaataatgatccggaaggtggttattatgcaagaggagcaagggctgcagtttgggagaatttcaaaaacaatccactctttgacatctccaccgatcatccaacaacatattatgaagacatgcaacgagctatattttgcttgtgcccactcggttgggccccatggagtcctagactggtcgaagcagtggtattcggatgcattcctgtaattatagcagatgatattgttttaccatttgccgatgctatcccatgggaggagattggagtgtttgtagcagaggaagatgtccctcacctggacacattcctgacatctataccaccagaagtgattttaaggaaacaaaggcttcttgcaaacccttccatgaaacgtgcaatgttattcccacaacctgcacaacctggtgatgctttccaccaaatactgaatgggttggctcgtaagttgccgcatgacaggactgtttacttgaaacctggtcagaaggttttgaattggacagcaggaccagctggggacctgaaaccttggtaa

SEQ ID NO: 126 - protein, 413 aa, Populus balsamifera subsp. trichocarpa
  misc_feature (49)..(353): Pfam Name: Exostosin Pfam Description: Exostosin family
  misc_feature: Ceres Annot ID no. 1447833
  misc_feature: Bit score of 1132.7 for HMM based on sequences of Figure 27
  misc_feature: Functional Homolog Of SEQ ID NO. 115
  misc_feature: in Figure 27
MRVCLWFFVVVIVFGFGDGKNADQRLRTERISGSAGDVLEDNPVGRLKVFVYELPSKYNKKLLQKDPRCLTHMFAAEIFMHRFLLSSPVRTLNPEEADWFYTPIYPTCDLTPTGLPLPFNSPRMMRSAIQLLSSNWPYWNRTEGADHFFVVPHDFGACFHYQEEKAIERGILPLLRRATLVQTFGQRNHVCLNEGSITIPPYAPPQKMQAHQIPLDTPRSIFVYFRGLFYDVNNDPEGGYYARGARAAVWENFKNNPLFDISTDHPTTYYEDMQRAIFCLCPLGWAPWSPRLVEAVVFGCIPVIIADDIVLPFADAIPWEEIGVFVAEEDVPHLDTFLTSIPPEVILRKQRLLANPSMKRAMLFPQPAQPGDAFHQILNGLARKLPHDRTVYLKPGQKVLNWTAGPAGDLKPW

SEQ ID NO: 127 - DNA, 1848 bp, Panicum virgatum
  misc_feature: Ceres Clone ID no. 1904977
  misc_feature: Encodes the peptide sequence at SEQ ID NO. 128
tttttcccttttttctcctcgtcttccttcccccgcccgctgctctcctcccctgcgtgcgagagagcaccagcagctcccgcttccaattccgccgcccccgcccccgtgcctctcctccattggctcgccgtcgccgcggcctcgaccgcctcgcctcacccgtcgccaccggcctcgtcacctcctgtgctactccgtgccatcggggcctgacagggacggcctacccgcacagcggaggacggcgtcaggacaagcgctcccgagcaacaagtatcccggcagcgcttcgcggccgctcggcgctcgagctccacatacaccagcagcagcagcagcagcacgccagcacgagcgaaagcgggagggagcgctagctgcttgattcggtcaactcctgcgcgctcgcggcaggatcgaggccaatggggcgggagaggaggccgtggccggcggcggccgccgccgttcttctgctcgtcgcctcctgcgtcgccgcggcgccgctgcagcagcaccagcgcgccaggatcacaggggacgccggcggcgtgctggacgacaacccggtggggaagctgaaggtgttcgtgtacgagatgccgcgcaagtacaaccagatgctgctgtccaaggacagccggtgcctgcaccacatgttcgcggccgagatcttcatgcaccagttcctgctgtccagcgcggtgcggacgctggacccggaggaggccgactggttctacacccccgtgtacaccacctgcgacctcacgccgcagggcttccccctcccgttccgggcgccgcggatcatgcgcagcgccatcaagtacgtcgccaccacgtggccctactggaacaggaccgagggcgccgaccacttcttcctaacaccccacgacttcggcgcctgcttccactaccaggaggagcgggcgatggagaggggcatcctgccgctgctccggcgcgcgacgctggtgcagacgttcgggcagcggaaccacgtgtgcctgcaggaggggtccatcaccatcccgccctacgccaacccgcacaagatgcaggcgcacctcatcaaccccggcacgccgcgctccatcttcgtctacttccgcggcctcttctacgacatgggcaacgaccccgagggtggctactacgccaggggcgcgcgcgcgtcagtgtgggagaacttcaaggacaacccgctgttcgacatttcgacggagcacccgtcaacgtactacgaggacatgcagcgcgccatcttctgcctgtgcccgctggggtgggcgccgtggagcccgcggctggtggaggcggtggtgttcggttgcatcccggtgatcatcgccgacgacatcgtactgcccttcgcggacgccatcccctgggagcagatcagcgtgttcgtggcggagcgcgacgtgccgcgcctcgactccattctcacctccatcccgctccaggacatcctcaggaagcagcgcctgctcgccggcgcgtccgtcaagcaggcgctgctcttccaccagcccgcaaggcccggggacgccttcgaccagatactcaacgggctggcgcgccagctgccgcacggcaagggcgtgttcctccagcccggggagaaggtgctcgactgggacgctgggctcgagagcgacctcaagccttggtaggcgcagcagcgcctgccttcacatttgttcatgttcttttgttttgttcttttatttaaatctttcgatcgatggatggatggatcacgcattagtttttgcacgaccagtttacacgcagcagcaatatagagcgagatttctcgggatatttgtgagaggc

SEQ ID NO: 128 - protein, 418 aa, Panicum virgatum
  misc_feature (54)..(358): Pfam Name: Exostosin Pfam Description: Exostosin family
  misc_feature: Ceres Clone ID no. 1904977
  misc_feature: Bit score of 1139.3 for HMM based on sequences of Figure 27
  misc_feature: Functional Homolog Of SEQ ID NO. 115
MGRERRPWPAAAAAVLLLVASCVAAAPLQQHQRARITGDAGGVLDDNPVGKLKVFVYEMPRKYNQMLLSKDSRCLHHMFAAEIFMHQFLLSSAVRTLDPEEADWFYTPVYTTCDLTPQGFPLPFRAPRIMRSAIKYVATTWPYWNRTEGADHFFLTPHDFGACFHYQEERAMERGILPLLRRATLVQTFGQRNHVCLQEGSITIPPYANPHKMQAHLINPGTPRSIFVYFRGLFYDMGNDPEGGYYARGARASVWENFKDNPLFDISTEHPSTYYEDMQRAIFCLCPLGWAPWSPRLVEAVVFGCIPVIIADDIVLPFADAIPWEQISVFVAERDVPRLDSILTSIPLQDILRKQRLLAGASVKQALLFHQPARPGDAFDQILNGLARQLPHGKGVFLQPGEKVLDWDAGLESDLKPW

SEQ ID NO: 129 - protein, 422 aa, Oryza sativa subsp. indica
  misc_feature (58)..(362): Pfam Name: Exostosin Pfam Description: Exostosin family
  misc_feature: Public GI ID no. 125528940
  misc_feature: Bit score of 1122.4 for HMM based on sequences of Figure 27
  misc_feature: Functional Homolog Of SEQ ID NO. 115
MGTRPCAGVASAVAAAVAVLLLAVSCFAAAATTTQKHGSMSGKGGDVLEDDPTGKLKVFVYEMPRKYNLNLLAKDSRCLQHMFAAEIFMHQFLLSSPVRTLDPEEADWFYTPAYTTCDLTPQGFPLPFRAPRIMRSAVRYVAATWPYWNRTDGADHFFLAPHDFGACFHYQEERAIERGILPVLRRATLVQTFGQRHHPCLQPGSITVPPYADPRKMEAHRISPATPRSIFVYFRGLFYDMGNDPEGGYYARGARASVWENFKDNPLFDISTEHPATYYEDMQRAIFCLCPLGWAPWSPRLVEAVVFGCIPVIIADDIVLPFADAIPWGEISVFVAEEDVPRLDTILASVPLDEVIRKQRLLASPAMKQAVLFHQPARPGDAFHQILNGLARKLPHPKGVFLEPGEKGIDWDQGLENDLKPW

SEQ ID NO: 130 - DNA, 1254 bp, Sorghum bicolor
  misc_feature: Ceres Annot ID no. 8670355
  misc_feature: Encodes the peptide sequence at SEQ ID NO. 131
atggggacggggagcgcgcgggcgatggccgccgcgctcgccgtcttgcttctcgcctgctctggcgccgtcgctgtcgccagggcgcaggacaccgagcggatcgaaggaagtgctggtgatgtgctcgaagatgatcctgttgggaggctcaaggtatatgtctacgagttgccaaccaagtacaacaagaagatggtggctaaagattctcggtgtctcagccacatgtttgctgcagagatcttcatgcaccgcttcctgttgtctagtgcgatccggactttaaatccagaagaagctgattggttctatactccagtatacacaacatgtgatctcacaccatggggtcatcccttgccctttaagtctccacgaataatgagaagcgcaattcagttcatttccaaccgttggccatactggaacaggacagagggagcagatcacttctttgttgtgccacatgactttggtgcatgcttccattatcaggaagagaaggctatcgagcgaggagtccttccattgcttcgccgtgctacactagtccagacttttgggcagaaggatcatgtctgcctaaaggaaggctccatcaccatcccgccatatgctcctcctcagaagatgaaaacccaccttgttcccccagggacccctaggtcaatctttgtctatttccgtgggttgttttatgacactgcaaatgatcctgagggtggttactatgcaaggggcgcccgtgcatcagtatgggagaacttcaagaacaacccgcttttcgacatctcaactgaccacccaccaacctactatgaggacatgcagcgtgccgtcttctgcctgtgcccactgggctgggccccatggagcccccgcttggtggaggcggtggtgttcggctgcatcccagtgatcatcgccgacgacatcgtccttccctttgcggacgcaatcccatgggaggagattggtgtctttgtggctgaggacgacgtcccgaagctggacaccatcctgacatccataccgatggaggtgatcctccggaagcagaggctcctcgcgaatccatccatgaagcaggccatgctgttcccgcagcccgcccagcctggggatgccttccaccagatcctgaacgggttggcacggaagctgccgcacggcgaggacgtgttcctgaagcccgggctgaaggtgctgaactggaccgagggcccccgtggcgacctgaagccatggtag

SEQ ID NO: 131 - protein, 417 aa, Sorghum bicolor
  misc_feature (53)..(357): Pfam Name: Exostosin Pfam Description: Exostosin family
  misc_feature: Ceres Annot ID no. 8670355
  misc_feature: Bit score of 1099.6 for HMM based on sequences of Figure 27
  misc_feature: Functional Homolog Of SEQ ID NO. 115
MGTGSARAMAAALAVLLLACSGAVAVARAQDTERIEGSAGDVLEDDPVGRLKVYVYELPTKYNKKMVAKDSRCLSHMFAAEIFMHRFLLSSAIRTLNPEEADWFYTPVYTTCDLTPWGHPLPFKSPRIMRSAIQFISNRWPYWNRTEGADHFFVVPHDFGACFHYQEEKAIERGVLPLLRRATLVQTFGQKDHVCLKEGSITIPPYAPPQKMKTHLVPPGTPRSIFVYFRGLFYDTANDPEGGYYARGARASVWENFKNNPLFDISTDHPPTYYEDMQRAVFCLCPLGWAPWSPRLVEAVVFGCIPVIIADDIVLPFADAIPWEEIGVFVAEDDVPKLDTILTSIPMEVILRKQRLLANPSMKQAMLFPQPAQPGDAFHQILNGLARKLPHGEDVFLKPGLKVLNWTEGPRGDLKPW

SEQ ID NO: 132 - DNA, 1763 bp, Zea mays
  misc_feature: Ceres Clone ID no. 313262
  misc_feature: Encodes the peptide sequence at SEQ ID NO. 133
atctcttcttcctcccccagagcccctgccctcttccgccgacagcgagaaagcacgcggcgcacagcaacacgtccctgccgttccttttgactccggggatccctctcctccttgcctgccgaggaacccactagcttcctactacttcccctccgtcctctcgatccctctccccgttcccttgaccacccgagcatcaagtggcggggagggaacgcggcggcgcgggcgaggaccgatggagaaggggagcgcgccggcgatggccctggcgctcgccatgcttctcgcctgctccagcatcgctgccgtcacggcgcaggagaccgagcggatcgaaggaagcgctggtgatgtgttagaagataaccctgttgggaggctcaaggtctttgtctatgatctccccagcaaatacaacaagaagctgctgaagaaggatcctaggtgcctgaaccacatgtttgccgccgagatcttcatgcacaggttcctgttgtcgagtgctgtccgaacttttaatcctgaggaagcagattggttctacacgcccgtatacacgacatgcgatctcacccccaagggtcttcccttgcctttcaagtctcctcgaatgatgcgcagcgcgatccagctgattgctacgaattggccttactggaatagatcagagggcgctgatcatttctttgtcacgccccatgactttggtgcttgctttcattatcaggaagaaaaagcaatcggacggggaatccttcccttgcttcagcgtgctacgctggttcagaccttcggacagaagaaccatgtctgcctgaaggatgggtccatcaccatcccaccatacgcgcctcctcagaagatgcagactcaccttatccctgcagacacccctcgatccatcttcgtgtacttccgaggtctgttctatgacaccggcaatgaccccgagggtggttattatgcgagaggtgctcgcgcgtcggtctgggagaacttcaagaacaacccgctgtttgacatctcgaccgaccacccaccgacatactacgaagacatgcagcgctccgtgttctgcctctgcccgttgggctgggcaccgtggagtcccaggctggtggaggccgtggtcttcggctgcatcccggtgatcatcgcagacgacatcgtccttcccttcgcggacgccatcccgtgggaggagatcggcgtctttgtcgccgaggaggatgtcccgcggctggacagcatcctgacgtccattcccacggacgtcgtgctgaggaagcaacggctcctcgcgaacccgtctatgaagcaggccatgctgttcccacagcctgctcaagcaggagacgcgttccaccagattctgaacggtctcgcgcgcaagctcccgcacggtagcaatgtgttcctgaagcccggtgagagggccctgaactggacagccggaccaccaggcgacctcaagccttggtagcgtcttgtggatggatatgacctcttctctggaaaggaagtatggacaacatgattaatatacctgtgcctttgaactgccatgggtgcacatagtgctgaccacaagccaaatgtacattttttttgtatgtttttttcttctatctacaactgttacatatatatcttcatttctttttttctctttcccatttgcttgatgatataagagttccaaaccctgtcgaccatgtgtggatatatcataaatggaatttacaagattgtactac

SEQ ID NO: 133 - protein, 415 aa, Zea mays
  misc_feature (51)..(355): Pfam Name: Exostosin Pfam Description: Exostosin family
  misc_feature: Ceres Clone ID no. 313262
  misc_feature: Bit score of 1117.7 for HMM based on sequences of Figure 27
  misc_feature: Functional Homolog Of SEQ ID NO. 115
MEKGSAPAMALALAMLLACSSIAAVTAQETERIEGSAGDVLEDNPVGRLKVFVYDLPSKYNKKLLKKDPRCLNHMFAAEIFMHRFLLSSAVRTFNPEEADWFYTPVYTTCDLTPKGLPLPFKSPRMMRSAIQLIATNWPYWNRSEGADHFFVTPHDFGACFHYQEEKAIGRGILPLLQRATLVQTFGQKNHVCLKDGSITIPPYAPPQKMQTHLIPADTPRSIFVYFRGLFYDTGNDPEGGYYARGARASVWENFKNNPLFDISTDHPPTYYEDMQRSVFCLCPLGWAPWSPRLVEAVVFGCIPVIIADDIVLPFADAIPWEEIGVFVAEEDVPRLDSILTSIPTDVVLRKQRLLANPSMKQAMLFPQPAQAGDAFHQILNGLARKLPHGSNVFLKPGERALNWTAGPPGDLKPW

SEQ ID NO: 134 - DNA, 1806 bp, Panicum virgatum
  misc_feature: Ceres Clone ID no. 1807519
  misc_feature: Encodes the peptide sequence at SEQ ID NO. 135
ggcgggcattgactattgagggaggggaacttgccacccaccacctcctctgctccgccgacagcgagagcccgcgagcaagcggcggctaccaccaccgcctcccaggttcccacgtccctgccatcctttttgactccgggatccccctcctccccgcctgccgaggatcccacaaccttcctactacttcccccgtaccttccgatctcgccacattcctagccgagcgtgaagtggtagggaggggagggaggcggcggcgcgggtgaggaccgatggggaaggggagcgggcgggggctggccctggcgctcgccgtgctcctcgcctgctccggcgtcgttgtcgtcacggcgcaggacaccgagcggatcgaaggaagtgctggcgatgtgctggaagataaccctgttgggaggctcaaggtctttgtctatgatctccctagcaaatacaacaagaaactgctgaagaaggaccctaggtgcctgaaccacatgtttgctgctgagatcttcatgcaccggttcctgttgtcaagcgctgttcgaacttttaatcccgaggaagcagattggttctacacacctgtatacacaacatgcgatctgactccttcgggtcttcccttgcctttcaagtctcctcgaatgatgcgtagtgcaatccagctgattgccacaaactggccttactggaatagatcagaaggcgcagatcatttctttgtcacaccacatgactttggtgcttgctttcattatcaggaagagaaagcaattgcccggggaatcctccccttgcttcagcgtgctacgctggttcaaacctttggacagaagaaccatgtctgcctgaaggatggatccattaccatacctccatttgcgcctccccagaaaatgcaaactcaccttatacccccagatacccctcgatccatcttcgtgtacttccgcggtctgttctatgacaatggcaatgatcccgaaggcggctactatgctagaggagctcgcgcgtcagtctgggagaacttcaagaacaatccgctctttgacatctcgaccgatcacccaccaacatactatgaagacatgcagcgttcagtgttctgcctgtgcccattgggctgggcaccatggagtcccaggctagtggaagcagtggtcttcggctgcatcccggtgatcatcgcagatgacatcgtcctgccctttgcggatgccatcccatgggaggagatcggtgtgttcgttgctgaggaggatgtaccgaggctggacagcatcctgacatccattcccacagatgttatactgaggaagcaacggctccttgcgaacccgtcgatgaagcaggccatgctgttcccccagcctgctcagccaggagatgcattccaccagattctaaacggacttgcacgcaagctcccacatggtgataatgtcttcttgaagcctggggagaggatcctgaactggaccgctggaccaccaggcgacctaaagccttggtagcatcttgcggatctgagatggataaaaactttctggaaaggaaatactgaggacatgatgatatagtgcaccttcgaattaccatggatgcatagtgctgaccacaagccaaatgtacattttttatatgctctttcttctatagctgttatatacacctcatatcttcttctcttcttttttttgtccctctttatccaattcattagatgatgagaatgccaggccttgtcaatcatatgtggatatatcatcataataaagtttaaagattttactc

SEQ ID NO: 135 - protein, 415 aa, Panicum virgatum
  misc_feature (51)..(355): Pfam Name: Exostosin Pfam Description: Exostosin family
  misc_feature: Ceres Clone ID no. 1807519
  misc_feature: Bit score of 1111.6 for HMM based on sequences of Figure 27
  misc_feature: Functional Homolog Of SEQ ID NO. 115
MGKGSGRGLALALAVLLACSGVVVVTAQDTERIEGSAGDVLEDNPVGRLKVFVYDLPSKYNKKLLKKDPRCLNHMFAAEIFMHRFLLSSAVRTFNPEEADWFYTPVYTTCDLTPSGLPLPFKSPRMMRSAIQLIATNWPYWNRSEGADHFFVTPHDFGACFHYQEEKAIARGILPLLQRATLVQTFGQKNHVCLKDGSITIPPFAPPQKMQTHLIPPDTPRSIFVYFRGLFYDNGNDPEGGYYARGARASVWENFKNNPLFDISTDHPPTYYEDMQRSVFCLCPLGWAPWSPRLVEAVVFGCIPVIIADDIVLPFADAIPWEEIGVFVAEEDVPRLDSILTSIPTDVILRKQRLLANPSMKQAMLFPQPAQPGDAFHQILNGLARKLPHGDNVFLKPGERILNWTAGPPGDLKPW

SEQ ID NO: 136 - DNA, 1263 bp, Sorghum bicolor
  misc_feature: Ceres Annot ID no. 8670356
  misc_feature: Encodes the peptide sequence at SEQ ID NO. 137
atgaggcggtgggtcttggccatcgccattctttccgctgcttcggcggcggcgctcttccttggggctgaggcccaggcggtccagcagcagggccaccagacagagaggatctcagggagtgctggtgacgtgttagaagataaccctgttgggaggctcaaggtttacgtctatgatctccccagtaaatacaacaagaagctgctgaagaaggatcctaggtgcctgaaccacatgtttgccgcagagatcttcatgcaccggttcctgttgtcaagcgctgtccgaacttttaatcctgaagaagcagattggttctacacgcctgtgtacaccacatgtgacctgactccttcgggtcttccccttcccttcaaatctcctcgcatgatgcgcagcgcaattgagctgattgccacgaactggccttactggaacagatcagagggtgcagatcatttctttgtcacaccacatgactttggtgcttgcttccattatcaggaagagaaagcaatcggacggggaatccttcccttgcttcagcgtgctacactggttcagacctttggacagaagaaccatgtctgcctgaaggacgggtccatcacaatcccaccatttgcacctccccagaaaatgcaggctcaccttatccccgcagacacccctcggtccatcttcgtgtacttccgtggtctgttctatgacaccagcaacgatcctgagggtggttactatgcaagaggtgctcgtgcatcagtctgggagaacttcaagaacaacccgctctttgacatctcaaccgatcacccaccgacttactacgaagacatgcagcgttcagtgttctgcctgtgcccattgggttgggctccatggagtcccaggctggtggaagccgtggttttcggctgcatcccggtgatcattgccgatgacattgtcctgcccttcgcggatgccatcccgtgggaggagatcggtgtgtttgtcgctgaggaggatgtcccaaagctggacagcatcttgacgtcaatcccaacagatgttatactgaggaaacagcgtctcctcgcaaacccatcgatgaagcaggccatgctgttcccccagcctgctcaggcgggtgatgcattccaccagatcctgaatgggctcgcacgcaagctcccgcatggtgacaacgtcttcttgaagcccggggagagggtcctgaactggaccgccgggccgccaggcgacctgaagccttggtag

SEQ ID NO: 137 - protein, 420 aa, Sorghum bicolor
  misc_feature (56)..(360): Pfam Name: Exostosin Pfam Description: Exostosin family
  misc_feature: Ceres Annot ID no. 8670356
  misc_feature: Bit score of 1123.2 for HMM based on sequences of Figure 27
  misc_feature: Functional Homolog Of SEQ ID NO. 115
MRRWVLAIAILSAASAAALFLGAEAQAVQQQGHQTERISGSAGDVLEDNPVGRLKVYVYDLPSKYNKKLLKKDPRCLNHMFAAEIFMHRFLLSSAVRTFNPEEADWFYTPVYTTCDLTPSGLPLPFKSPRMMRSAIELIATNWPYWNRSEGADHFFVTPHDFGACFHYQEEKAIGRGILPLLQRATLVQTFGQKNHVCLKDGSITIPPFAPPQKMQAHLIPADTPRSIFVYFRGLFYDTSNDPEGGYYARGARASVWENFKNNPLFDISTDHPPTYYEDMQRSVFCLCPLGWAPWSPRLVEAVVFGCIPVIIADDIVLPFADAIPWEEIGVFVAEEDVPKLDSILTSIPTDVILRKQRLLANPSMKQAMLFPQPAQAGDAFHQILNGLARKLPHGDNVFLKPGERVLNWTAGPPGDLKPW

SEQ ID NO: 138 - DNA, 1248 bp, Sorghum bicolor
  misc_feature: Ceres Annot ID no. 8733886
  misc_feature: Encodes the peptide sequence at SEQ ID NO. 139
atggggacggggagcgtgcgggcgctggccctggcgctcgccgtgtttctcgcctgctccggcatcgccgtcgtcacggcgcaggagaccgagcggatcgaaggaagcgctggtgatgtgttggaagataaccctgttgggagactcaaggtctatgtctatgatctccccagcaaatacaacaagaagctgctgaagaaggatcctaggtgcctgaaccacatgtttgccgctgagatcttcatgcaccggttcctgttgtcaagcgctgtccgaacttttaatcctgaggaagcagattggttctacacacccgtatacacaacttgcgatctgacccctaagggtcttcccttgcctttcaagtctcctcgaatgatgcgtagcgcaatccagctgattgctacaaattggccttactggaatagatcagagggcgctgatcatttctttgtcacgccccatgactttggtgcttgctttcattatcaggaagagaaagcaatcggacggggaatccttcccttgcttcagcgtgctacgctggttcagacctttggacagaagaaccatgtctgcctgaaggatgggtccatcaccatcccgccatatgcgcctcctcagaaaatgcagactcaccttatccctgccgacacccctcgatccatctttgtgtacttccgaggtctgttctatgacactggcaatgatcctgagggcggttactatgcaagaggtgctcgtgcgtcagtctgggagaacttcaagaacaacccgctctttgacatctcgaccgatcacccaccaacatactatgaagacatgcagcgctcagtgttctgcctctgcccattgggctgggcaccatggagtcccaggctagtggaagccgtggtctttggctgcatcccagtgatcatcgcagatgacattgtccttccctttgcggacgccatcccatgggaggagatcggcgtttttgttgctgaggaggatgtcccgcagctggacagcatcctgacatccattcccacagatgttgtactgaggaagcaacggctccttgcgaacccatcgatgaagcaggccatgttgttcccccagcctgctcagccaggagatgcattccaccagattcttaatggtctcgcgcgcaagctccctcacggcagcaatgttttcctgaagcccggcgagagggtcctgaactggaccgctggaccaccaggcgacctgaagccttggtag

SEQ ID NO: 139 - protein, 415 aa, Sorghum bicolor
  misc_feature (51)..(355): Pfam Name: Exostosin Pfam Description: Exostosin family
  misc_feature: Ceres Annot ID no. 8733886
  misc_feature: Bit score of 1116.6 for HMM based on sequences of Figure 27
  misc_feature: Functional Homolog Of SEQ ID NO. 115
MGTGSVRALALALAVFLACSGIAVVTAQETERIEGSAGDVLEDNPVGRLKVYVYDLPSKYNKKLLKKDPRCLNHMFAAEIFMHRFLLSSAVRTFNPEEADWFYTPVYTTCDLTPKGLPLPFKSPRMMRSAIQLIATNWPYWNRSEGADHFFVTPHDFGACFHYQEEKAIGRGILPLLQRATLVQTFGQKNHVCLKDGSITIPPYAPPQKMQTHLIPADTPRSIFVYFRGLFYDTGNDPEGGYYARGARASVWENFKNNPLFDISTDHPPTYYEDMQRSVFCLCPLGWAPWSPRLVEAVVFGCIPVIIADDIVLPFADAIPWEEIGVFVAEEDVPQLDSILTSIPTDVVLRKQRLLANPSMKQAMLFPQPAQPGDAFHQILNGLARKLPHGSNVFLKPGERVLNWTAGPPGDLKPW

SEQ ID NO: 140 - protein, 415 aa, Zea mays
  misc_feature (51)..(355): Pfam Name: Exostosin Pfam Description: Exostosin family
  misc_feature: Public GI ID no. 212276027
  misc_feature: Bit score of 1115.3 for HMM based on sequences of Figure 27
  misc_feature: Functional Homolog Of SEQ ID NO. 115
MGKGSARALALALAVILACSDVAVVTAQETERIEGSAGDVLEDDPVGRLKVYVYDLPSKYNKKLLKKDPRCLNHMFAAEIFMHRFLLSSAVRTFNPEEADWFYTPVYTTCDLTPKGLPLPFKSPRMMRSAIQLIATNWPYWNRSEGADHFFVTPHDFGACFHYQEEKAIGRGILPLLQRATLVQTFGQKNHVCLKDGSITIPPYAPPQKMQTHLIPPDTPRSIFVYFRGLFYDTGNDPEGGYYARGARASVWENFKNNPLFDISTDHPPTYYEDMQRSVFCLCPLGWAPWSPRLVEAVVFGCIPVIIADDIVLPFADAIPWEEIGVFVAEDDVPQLDSILTSIPTDVVLRKQRLLANPSMKQAMLFPQPAQPGDAFHQILNGLARKLPHGSNVFLKPGERALNWTAGPPGDLKPW

SEQ ID NO: 141 - protein, 420 aa, Oryza sativa subsp. japonica
  misc_feature (56)..(360): Pfam Name: Exostosin Pfam Description: Exostosin family
  misc_feature: Public GI ID no. 115458146
  misc_feature: Bit score of 1100.8 for HMM based on sequences of Figure 27
  misc_feature: Functional Homolog Of SEQ ID NO. 115
MGSRTVGWWLLAAAVVLAAAAADSGEAERAAEQHSERISGSAGDVLEDNPVGRLKVFIYDLPRKYNKKMVNKDPRCLNHMFAAEIFMHRFLLSSAVRTLNPKEADWFYTPVYTTCDLTPAGLPLPFKSPRVMRSAIQYISHKWPFWNRTDGADHFFVVPHDFGACFHYQEEKAIERGILPLLQRATLVQTFGQENHVCLKEGSITIPPYAPPQKMQAHLIPPDTPRSIFVYFRGLFYDTGNDPEGGYYARGARASLWENFKNNPLFDISTDHPPTYYEDMQRAVFCLCPLGWAPWSPRLVEAVVFGCIPVIIADDIVLPFADAIPWEEIGVFVEEKDVPKLDTILTSMPIDDILRKQRLLANPSMKQAMLFPQPAQPRDAFHQILNGLARKLPHPEGVYLQPSDKRLNWTAGPVGDLKAW

SEQ ID NO: 142 - protein, 419 aa, Zea mays
  misc_feature (55)..(359): Pfam Name: Exostosin Pfam Description: Exostosin family
  misc_feature: Public GI ID no. 194708308
  misc_feature: Bit score of 1096.9 for HMM based on sequences of Figure 27
  misc_feature: Functional Homolog Of SEQ ID NO. 115
MGTGAGSARALAVAFAVSLLACSGAVAVARAQDTERIEGSAGDVLEDDPVGRLKVYVYELPTKYNKKMVAKDSRCLSHMFAAEIFMHRFLLSSAIRTLNPEVADWFYTPVYTTCDLTPWGHPLPFRSPRIMRSAIQFISNRWPYWNRTEGADHFFVVPHDFGACFHYQEEKAIERGVLPLLRRATLVQTFGQKDHVCLKEGSITIPPYAPPQKMKTHLVPPGTPRSIFVYFRGLFYDTANDPEGGYYARGARASVWENFKNNPLFDISTDHPPTYYEDMQRAVFCLCPLGWAPWSPRLVEAVVFGCIPVIIADDIVLPFADAIPWEEIGVFVAEDDVPRLDTILTSIPMEVILRKQRLLANPSMKQAMLFPQPAQAGDAFHQILNGLARKLPHGEDVFLKPGQKVLNWTEGPRGDLKPW

SEQ ID NO: 143 - DNA, 1919 bp, Zea mays
  misc_feature: Ceres Clone ID no. 1471197
  misc_feature: Encodes the peptide sequence at SEQ ID NO. 144
cctttcttcccgaagctgtctgtcctgctcctgcgcgcgttggaggaaggaagcctaggaaagccaccgctcaccttctcgctcgctcccccaccgaacgcctcttggtgggagaagaattggccgaaaagcttccggttggctggccgggatctcttcgtctttaattaccggacccctggggggattgcctgctgcctcattagaccagaccagacagggagagggttgagttgagggggaggagaggagagagacacagacaacgggtggtcgctgggaagaggaagaagaggcccgcggggaagcggagggatccagaagaagatgaggcagtgggtcctggccgtcgccattctcgccgctgcttcggcggcggcgctcctcctcggggccgaggcccagcagcagggccaccagacagagaggatctcaggaagcgccggcgacgtgctggaagacaaccccgtcgggaggctgaaggtgtacgtgtacgacctccccagcaagtacaacaagaagctgctgaagaaggaccccaggtgcctgaaccacatgttcgccgcggagatcttcatgcaccggttcctgctgtcgagcgccgtccggaccttcaaccccgaggaggcggactggttctacacgcccgtgtacaccacctgcgacctgaccccgtccggcctcccgctccccttcaagtccccccggatgatgcgcagcgccatcgagctggtcgccaccaactggccgtactggaacaggtcggagggcgccgaccacttcttcgtcacgccacatgactttggcgcttgcttccattatcaggaagagaaagcgatcggacgcgggatccttcccttgctccagcgtgccacgctggtccagaccttcggacagaagaaccatgtctgcctcaaggacgggtccatcacaatcccgccgttcgcgcctccccagaagatgcaggctcaccttatccctgcggacaccccgcgctccatcttcgtctacttccgcggtctgttctacgacaccagcaacgatcccgagggcggttactacgcgagaggcgcacgcgcgtcggtctgggagaacttcaagaacaacccgctcttcgacatctcgacggaccacccggcgacgtactacgaggacatgcagcggtcggtgttctgcctgtgcccgctgggctgggcgccgtggagcccgaggctggtggaggcggtggtgttcggctgcatccccgtgatcgtcgccgacgacatcgtgctgcccttcgcggacgccatcccgtgggaggacatcggcgtgttcgtcgcggaggaggacgtccccaggctcgacaccatcctcacgtccatccccaccgacgtcgtcctgcggaagcagcgcctcctcgccaacccgtccatgaagcaggccatgctgttcccgcagcccgcccaggcgggagacgcgttccaccagatcctcaacggcctcgcccgcaagctaccgcacggggacggcgtcttccttaagcccggggacgagagggtcctcaactggaccgctggaccgcccggcgacctcaagccttggacttggatcgacgactcgttcacaggcataggacactacaggcaggtgaacatggtccttggtaatcttgttcgtctgcactggcctggtcttgtgactttgcctactggcgagtctgtccccgccaccacttgggagcattatcgctatggtgtttgtagaacgtttggcaacacacaggcactagtttgggatgcattctggaaacggtacaagttgccgaacgatggatcatatgatatgaacgctcgttacgtgtttgagtataacgcgaacgatgtcgttgcagatgcaatgtactatgcacgaattcaggctataaaggcatggtacagagc

SEQ ID NO: 144 - protein, 530 aa, Zea mays
  misc_feature (53)..(357): Pfam Name: Exostosin Pfam Description: Exostosin family
  misc_feature: Ceres Clone ID no. 1471197
  misc_feature: Bit score of 1114.1 for HMM based on sequences of Figure 27
  misc_feature: Functional Homolog Of SEQ ID NO. 115
MRQWVLAVAILAAASAAALLLGAEAQQQGHQTERISGSAGDVLEDNPVGRLKVYVYDLPSKYNKKLLKKDPRCLNHMFAAEIFMHRFLLSSAVRTFNPEEADWFYTPVYTTCDLTPSGLPLPFKSPRMMRSAIELVATNWPYWNRSEGADHFFVTPHDFGACFHYQEEKAIGRGILPLLQRATLVQTFGQKNHVCLKDGSITIPPFAPPQKMQAHLIPADTPRSIFVYFRGLFYDTSNDPEGGYYARGARASVWENFKNNPLFDISTDHPATYYEDMQRSVFCLCPLGWAPWSPRLVEAVVFGCIPVIVADDIVLPFADAIPWEDIGVFVAEEDVPRLDTILTSIPTDVVLRKQRLLANPSMKQAMLFPQPAQAGDAFHQILNGLARKLPHGDGVFLKPGDERVLNWTAGPPGDLKPWTWIDDSFTGIGHYRQVNMVLGNLVRLHWPGLVTLPTGESVPATTWEHYRYGVCRTFGNTQALVWDAFWKRYKLPNDGSYDMNARYVFEYNANDVVADAMYYARIQAIKAWYR

SEQ ID NO: 145 - DNA, 1608 bp, Zea mays
  misc_feature: Ceres Clone ID no. 244622
  misc_feature: Encodes the peptide sequence at SEQ ID NO. 146
aacaaaatctctccttagtttccccaacctgcttctgtttaccgaattcctaaatccaatccccttgccaagctctctctttgctgcgggaggtcgaggccggagaggtattccgggatgggatcaagaaaggggtggttccccgtggccctcctgctgttggccgcctctgccctctggccgccggtcgccgccgccgccgccggaggmggcgasgccgaacacgccgttcagcagcatagcgagcgcatctcagggagtgctggtgatgtgttagaagataatcctgtgggtaggttgaaggtcttcatttatgacttaccaaggaagtacaacaagaagatggtcaccaaggattcacggtgcctcagtcacatgtttgccgctgaaattttcatgcatcgtttcttgctctcgagtgctgtccggacactaaatcccaaggaagctgattggttctatacaccagtttacactacttgcgatttaactaacgctggactgcccttgccgtttaagtcaccacgggtgatgaggagcgcgatccaatatatttcaaacaaatggcccttctggaataggactgatggagcagatcatttcttcgttgttccgcatgattttgcagcatgcttccactatcaggaagaaaaagctatcgagcgtggaattcttccattgctgcgacgtgctacattggtccaaacctttggacaggagaatcatgtttgcctgaaggagggttccatcattattccaccctatgctcctccgcagaaaatgcaagctcacttgatttccccagacactccacgctcaatcttcgtttacttccggggacttttttatgacacggggaatgaccccgagggcggatactatgcaagaggtgcgcgagcttcgctatgggagaacttcaagagcaaccctctgtttgacatttccacagaccaccctgccacttactatgaagacatgcagcgcgctgtcttctgcctgtgcccattgggctgggcaccgtggagccctaggttggttgaggctgtggtctttggctgcattccagtcatcatagctgatgacatcgtgcttccatttgcagacgcgatcccatgggaggaaatcggcgtctttgtcgaggagaaggatgtcccaaagcttgacacgatcctcacgtcgatgcctatagatgacatcttaaggaagcaaaggttactcgcaaatccatcgatgaagcaggcaatgttgttcccacagccagcgcaaccaagggacgcgttccaccaaatcttgaacggccttgctcggaagctcccgcacccagagggtacgttcttacaacctggcgatcagcgcctcaactggaccgctggtcctgtgggagatctgaagccgtggtagagaagaatagctatcttcttctttgataatccaagctttgccacgagcaccccttaggactaatgcacgcttcatgagatgttatgtaatcaatatgctgtgcgtgctttaggtgcaaaatacaccttggccgtgcttagtccttatgaacgccatgtaacttattgatttcccatggaaatgaaatggtatatttatcttgctgtc

SEQ ID NO: 146 - protein, 427 aa, Zea mays
  misc_feature (63)..(367): Pfam Name: Exostosin Pfam Description: Exostosin family
  misc_feature: Ceres Clone ID no. 244622
  misc_feature: Bit score of 1074.4 for HMM based on sequences of Figure 27
  misc_feature: Functional Homolog Of SEQ ID NO. 115
  misc_feature (31)..(31): Xaa is any aa, unknown, or other
  misc_feature (33)..(33): Xaa is any aa, unknown, or other
MGSRKGWFPVALLLLAASALWPPVAAAAAGXGXAEHAVQQHSERISGSAGDVLEDNPVGRLKVFIYDLPRKYNKKMVTKDSRCLSHMFAAEIFMHRFLLSSAVRTLNPKEADWFYTPVYTTCDLTNAGLPLPFKSPRVMRSAIQYISNKWPFWNRTDGADHFFVVPHDFAACFHYQEEKAIERGILPLLRRATLVQTFGQENHVCLKEGSIIIPPYAPPQKMQAHLISPDTPRSIFVYFRGLFYDTGNDPEGGYYARGARASLWENFKSNPLFDISTDHPATYYEDMQRAVFCLCPLGWAPWSPRLVEAVVFGCIPVIIADDIVLPFADAIPWEEIGVFVEEKDVPKLDTILTSMPIDDILRKQRLLANPSMKQAMLFPQPAQPRDAFHQILNGLARKLPHPEGTFLQPGDQRLNWTAGPVGDLKPW

SEQ ID NO: 147 - protein, 427 aa, Zea mays
  misc_feature (63)..(367): Pfam Name: Exostosin Pfam Description: Exostosin family
  misc_feature: Public GI ID no. 194700342
  misc_feature: Bit score of 1073.4 for HMM based on sequences of Figure 27
  misc_feature: Functional Homolog Of SEQ ID NO. 115
MGSRKGWFPVALLLLADSALWPPVAAAAAGGGEAEHAVQQHSERISGSAGDVLEDNPVGRLKVFIYDLPRKYNKKMVTKDSRCLSHMFAAEIFMHRFLLSSAVRTLNPKEADWFYTPVYTTCDLTNAGLPLPFKSPRVMRSAIQYISNKWPFWNRTDGADHFFVVPHDFAACFHYQEEKAIERGILPLLRRATLVQTFGQENHVCLKEGSIIIPPYAPPQKMQAHLISPDTPRSIFVYFRGLFYDTGNDPEGGYYARGARASLWENFKSNPLFDISTDHPATYYEDMQRAVFCLCPLGWAPWSPRLVEAVVFGCIPVIIADDIVLPFADAIPWEEIGVFVEEKDVPKLDTILTSMPIDDILRKQRLLANPSMKQAMLFPQPAQPRDAFHQILNGLARKLPHPEGTFLQPGDQRLNWTAGPVGDLKPW

SEQ ID NO: 148 - protein, 418 aa, Zea mays
  misc_feature (53)..(357): Pfam Name: Exostosin Pfam Description: Exostosin family
  misc_feature: Public GI ID no. 194704652
  misc_feature: Bit score of 1113.0 for HMM based on sequences of Figure 27
  misc_feature: Functional Homolog Of SEQ ID NO. 115
MRQWVLAVAILAAASAAALLLGAEAQQQGHQTERISGSAGDVLEDNPVGRLKVYVYDLPSKYNKKLLKKDPRCLSHMFAAEIFMHRFLLSSAVRTFNPEEADWFYTPVYTTCDLTPSGLPLPFKSPRMMRSAIELVATNWPYWNRSEGADHFFVTPHDFGACFHYQEEKAIGRGILPLLQRATLVQTFGQKNHVCLKDGSITIPPFAPPQKMQAHLIPADTPRSIFVYFRGLFYDTSNDPEGGYYARGARASVWENFKNNPLFDISTDHPATYYEDMQRSVFCLCPLGWAPWSPRLVEAVVFGCIPVIVADDIVLPFADAIPWEDIGVFVAEEDVPRLDTILTSIPTDVVLRKQRLLANPSMKQAMLFPQPAQAGDAFHQILNGLARKLPHGDGVFLKPGDERVLNWTAGPPGDLKPW

SEQ ID NO: 149 - protein, 417 aa, Oryza sativa subsp. japonica
  misc_feature (53)..(357): Pfam Name: Exostosin Pfam Description: Exostosin family
  misc_feature: Public GI ID no. 115441969
  misc_feature: Bit score of 1126.3 for HMM based on sequences of Figure 27
  misc_feature: Functional Homolog Of SEQ ID NO. 115
MRRWVLAIAILAAAVCFFLGAQAQEVRQGHQTERISGSAGDVLEDDPVGRLKVYVYDLPSKYNKKLLKKDPRCLNHMFAAEIFMHRFLLSSAVRTFNPEEADWFYTPVYTTCDLTPSGLPLPFKSPRMMRSAIELIATNWPYWNRSEGADHFFVTPHDFGACFHYQEEKAIGRGILPLLQRATLVQTFGQKNHVCLKDGSITIPPYAPPQKMQAHLIPPDTPRSIFVYFRGLFYDTSNDPEGGYYARGARASVWENFKNNPLFDISTDHPPTYYEDMQRSVFCLCPLGWAPWSPRLVEAVVFGCIPVIIADDIVLPFADAIPWEEIGVFVAEEDVPKLDSILTSIPTDVILRKQRLLANPSMKQAMLFPQPAQAGDAFHQILNGLARKLPHGENVFLKPGERALNWTAGPVGDLKPW

SEQ ID NO: 150 - protein, 434 aa, Oryza sativa subsp. japonica
  misc_feature (69)..(373): Pfam Name: Exostosin Pfam Description: Exostosin family
  misc_feature: Public GI ID no. 49389081
  misc_feature: Bit score of 1091.1 for HMM based on sequences of Figure 27
  misc_feature: Functional Homolog Of SEQ ID NO. 115
MVGARAGRVPAAAAAAAAVLIVAACVFSSLAGAAAAAEVVGGAAQGNTERISGSAGDVLEDNPVGRLKVFVYDLPSKYNKRIVAKDPRCLNHMFAAEIFMHRFLLSSAVRTLNPEQADWFYAPVYTTCDLTHAGLPLPFKSPRMMRSAIQFLSRKWPFWNRTDGADHFFVVPHDFGACFHYQEEKAIERGILPLLRRATLVQTFGQKNHVCLKEGSITIPPYAPPQKMQAHLIPPDTPRSIFVYFRGLFYDNGNDPEGGYYARGARASLWENFKNNPLFDISTEHPATYYEDMQRSVFCLCPLGWAPWSPRLVEAVVFGCIPVIIADDIVLPFADAIPWDEIGVFVDEEDVPRLDSILTSIPIDDILRKQRLLANPSMKQAMLFPQPAQPRDAFHQILNGLARKLPHPDSVYLKPGEKHLNWTAGPVADLKPWK

SEQ ID NO: 151 - DNA, 1791 bp, Panicum virgatum
  misc_feature: Ceres Clone ID no. 1788372
  misc_feature: Encodes the peptide sequence at SEQ ID NO. 152
agccgcggacagccttcctaccctgctttctcagtcatccctttcttccttccaagtaaggagagaacatgacctctatttcttcccgaagctgggtgtgcgttggaggaaggaggaaggaagcctaggaaagccaccgctcaccttctcgctggctccccaccaaacgctgcttggtaggagaaaaattggcggaaaagcttccctttggctgggatctcttcttttaattacccctgggggttggcgggctcataagagcggacagggagagggtcgcgagaggcgagtagagacacagacaacgggtgctcgctggggaaggggcttgtggccttgtgaggaggatcgagaagaagatgaggcggcgggccttggccatagccattcttgctgcagtgctcttccttggagctgaggcacaggcggtgcagcagggccaccagactgagaggatctcaggaagtgctggtgatgtgttagaagataaccctgttgggaggctgaaggtttatatctatgatctccccagcaaatacaataagaaactgctgaagaaggatcccaggtgcttaaaccacatgtttgccgctgagatctttatgcaccgtttcctgttgtccagcgctgttcgaactttcaatcctgaggaagcagattggttctacacgcctgtatacacaacatgcgatctgactccttcaggtcttcctttgccgttcaagtctcctcgaatgatgcgcagcgcaattgagctgattgccacaaactggccttattggaatagatcagagggtgcagaccatttctttgtcacaccacatgactttggtgcttgcttccactaccaggaagagaaagcaatcggacggggaatccttcccttgcttcagcgtgctacactggttcagacatttggacagaagaaccatgtctgcctgaaggacggatccatcacaatcccaccgtttgcacctccccagaaaatgcaggctcaccttatccccccagacacgcctcgatccatctttgtgtacttccgtggtctgttctatgacaccagcaatgatcccgagggtggttactacgcaagaggtgctcgtgcgtctgtctgggagaacttcaagaacaacccactctttgacatctcgaccgatcacccgccgacctactatgaagacatgcaacgttccgttttctgcttatgcccattgggctgggcaccatggagtcccaggctagtggaagccgtggtctttggctgcatcccggtgatcatcgcagatgacattgtcctgcccttcgcggacgccatcccttgggaggagatcggtgtgtttgtcgccgaggaggatgtcccaaagctggacagcatcctgacgtccattcccacagatgttatactgaggaagcaaagacttctcgccaatccgtccatgaagcaggccatgctgttcccccagcctgctcaggcgggagatgcattccaccagatcctgaacgggctcgcgcgcaagctcccgcacgatgacaacgtcttcctcaaggctggggagagggtcctgaactggaccgccggaccaccgggcgacctgaagccttggtagcacctggtgttttactagaactttttataaaaggaaggttgggtacatgatgatatacgtgcgcctttgatattacctatagctgaattaccagtgctgaccacaagccaaatgtacatttttgtatgttctttacttatagctgttatacgatatattttcttctcaattttattaggtgatg

SEQ ID NO: 152 - protein, 415 aa, Panicum virgatum
  misc_feature (51)..(355): Pfam Name: Exostosin Pfam Description: Exostosin family
  misc_feature: Ceres Clone ID no. 1788372
  misc_feature: Bit score of 1119.9 for HMM based on sequences of Figure 27
  misc_feature: Functional Homolog Of SEQ ID NO. 115
MRRRALAIAILAAVLFLGAEAQAVQQGHQTERISGSAGDVLEDNPVGRLKVYIYDLPSKYNKKLLKKDPRCLNHMFAAEIFMHRFLLSSAVRTFNPEEADWFYTPVYTTCDLTPSGLPLPFKSPRMMRSAIELIATNWPYWNRSEGADHFFVTPHDFGACFHYQEEKAIGRGILPLLQRATLVQTFGQKNHVCLKDGSITIPPFAPPQKMQAHLIPPDTPRSIFVYFRGLFYDTSNDPEGGYYARGARASVWENFKNNPLFDISTDHPPTYYEDMQRSVFCLCPLGWAPWSPRLVEAVVFGCIPVIIADDIVLPFADAIPWEEIGVFVAEEDVPKLDSILTSIPTDVILRKQRLLANPSMKQAMLFPQPAQAGDAFHQILNGLARKLPHDDNVFLKAGERVLNWTAGPPGDLKPW

SEQ ID NO: 153 - DNA, 1299 bp, Sorghum bicolor
  misc_feature: Ceres Annot ID no. 8679199
  misc_feature: Encodes the peptide sequence at SEQ ID NO. 154
atgacgcgggcgagggcggtgtggcgccccgctgcggtcgtcctcctcgcggtcgcttccctctcctgcgtcctcacgccgccgctggtctccgcagccgcgggagcagaggtggccggcggggtggctcgtcggaataccgagcgcatcgcaggaagtgctggtgatgtgctagaggacaatcctattggaaggttgaaggttttcatctatgacttgccaagcaagtacaacaagaggattgtcaccaaggatccacgatgcctccatcacatgtttgctgccgagatattcatgcaccggttcttgctctctagtgcggtgcgaacactcaacccagaagaagctgattggttctacacgccggtttacactacatgtgatcttactcctgctggacttccacttccattcaagtccccaaggatgatgagaagtgcaatcaaatttatttcaaacaagtggcctttctggaacagaactgatggagctgatcacttctttgttgttccacatgattttggtgcatgctttcactatcaggaagaaaaagctaccgaacgtggaattctcccaatgctccgccgtgctacattggtccaaacatttgggcagaagaaccatgtctgcctgaaagagggttctatcattataccgccatatgcacctccacagaaaatgcaggctcacttggttccccctgacactccccgttcaatctttgtttacttcaggggactgttttatgacaatggtaatgaccctgagggtgggtattatgcgagaggtgcccgagcatcactgtgggagaacttcaagaacaatcctctctttgatatctccacagatcaccctgtcacttactatgaagatatgcagcgcgcagtcttctgcttgtgcccactgggatgggcaccatggagcccgaggctggtggaggccgtggttttcggctgcattccagtcatcatagctgatgacattgtcctaccatttgctgatgctatcccatgggaggacattggagtttttgttgacgaagaggatgttccaaagctagattcaatcctcacttccattccaatcgaaaatattctacggaagcaaagattgctggccaatccatctatgaagaaggccatgttgttcccacagccagcccaacctagggatgcattccatcagatcctaaatggccttgctcgcaagttgccacacatgcagagtgtatacttgcaaccaggagagaagcacctcaactggactgctggacctgctggagatctgaagccttggtag

SEQ ID NO: 154 - protein, 432 aa, Sorghum bicolor
  misc_feature (68)..(372): Pfam Name: Exostosin Pfam Description: Exostosin family
  misc_feature: Ceres Annot ID no. 8679199
  misc_feature: Bit score of 1085.1 for HMM based on sequences of Figure 27
  misc_feature: Functional Homolog Of SEQ ID NO. 115
MTRARAVWRPAAVVLLAVASLSCVLTPPLVSAAAGAEVAGGVARRNTERIAGSAGDVLEDNPIGRLKVFIYDLPSKYNKRIVTKDPRCLHHMFAAEIFMHRFLLSSAVRTLNPEEADWFYTPVYTTCDLTPAGLPLPFKSPRMMRSAIKFISNKWPFWNRTDGADHFFVVPHDFGACFHYQEEKATERGILPMLRRATLVQTFGQKNHVCLKEGSIIIPPYAPPQKMQAHLVPPDTPRSIFVYFRGLFYDNGNDPEGGYYARGARASLWENFKNNPLFDISTDHPVTYYEDMQRAVFCLCPLGWAPWSPRLVEAVVFGCIPVIIADDIVLPFADAIPWEDIGVFVDEEDVPKLDSILTSIPIENILRKQRLLANPSMKKAMLFPQPAQPRDAFHQILNGLARKLPHMQSVYLQPGEKHLNWTAGPAGDLKPW

SEQ ID NO: 155 - protein, 434 aa, Oryza sativa subsp. japonica
  misc_feature (69)..(373): Pfam Name: Exostosin Pfam Description: Exostosin family
  misc_feature: Public GI ID no. 125582313
  misc_feature: Bit score of 1090.9 for HMM based on sequences of Figure 27
  misc_feature: Functional Homolog Of SEQ ID NO. 115
MVGARAGRVPAAAASAAAVLIVAACVFSSLAGAAAAAEVVGGAAQGNTERISGSAGDVLEDNPVGRLKVFVYDLPSKYNKRIVAKDPRCLNHMFAAEIFMHRFLLSSAVRTLNPEQADWFYAPVYTTCDLTHAGLPLPFKSPRMMRSAIQFLSRKWPFWNRTDGADHFFVVPHDFGACFHYQEEKAIERGILPLLRRATLVQTFGQKNHVCLKEGSITIPPYAPPQKMQAHLIPPDTPRSIFVYFRGLFYDNGNDPEGGYYARGARASLWENFKNNPLFDISTEHPATYYEDMQRSVFCLCPLGWAPWSPRLVEAVVFGCIPVIIADDIVLPFADAIPWDEIGVFVDEEDVPRLDSILTSIPIDDILRKQRLLANPSMKQAMLFPQPAQPRDAFHQILNGLARKLPHPDSVYLKPGEKHLNWTAGPVADLKPWK

SEQ ID NO: 156 - DNA, 1293 bp, Sorghum bicolor
  misc_feature: Ceres Annot ID no. 8699946
  misc_feature: Encodes the peptide sequence at SEQ ID NO. 157
atgggatcacgaaagaggtggctccccgtggccctcctgctcttggccgcctctgccctctggccgccggtcgcagcagcagccgcagccggcggcggcggcggagaggccgaacacgccgttcagcagcatagcgagcgcatctcagggagtgctggtgatgtgttagaggataatcctgtggggaggttgaaggtcttcatttatgacttaccaaggaagtacaacaagaagatggtcactaaagatccacggtgcctcagtcacatgtttgccgccgaaattttcatgcaccgtttcttgctctcaagtgctgtccggacactaaatcccaaggaagctgattggttctatacaccagtttacactacttgtgatttaactaatgctggtctgcccttgccatttaagtcaccacgggtgatgaggagtgcaatccaatatatttcaaacaaatggcccttctggaataggactgatggagcggatcacttctttgttgttcctcatgattttgcagcatgcttccactatcaggaagaaaaggctattgagcgtggaattcttccattgctgcgacgtgctacattggtccaaacttttggacaggagaatcatgtttgtctgaaggagggttccatcattattccaccctttgctccaccgcagaaaatgcaagctcacttgatttcccctgacactccacgctcaatctttgtttacttccggggacttttctatgacactgggaacgaccctgagggcgggtactatgcaagaggtgcgcgagcttcgctatgggagaacttcaagagcaaccctctatttgacatttccacggaccaccctgccacttactacgaagacatgcaacgtgctgtcttctgcctctgcccattgggctgggcaccatggagccctcggttggttgaggctgtggtctttggctgcattccagtcatcatagctgatgatattgtgcttccatttgcggatgcaatcccatgggaggaaattggtgtctttgtcgaggagaaggatgtcccaaagctagacacaatcctcacgtcgatgcctatagatgacatcttaagaaagcaaaggttacttgcaaatccatcaatgaagcaggccatgctgttcccgcagccagcgcaaccaagggatgcgttccaccaaatcctgaacggccttgctcggaagctccctcacccggagggtacgtacttacaacctggcgatcagcatctcaactggactgccggacctgtgggagatctgaagccgtggtag

SEQ ID NO: 157 - protein, 430 aa, Sorghum bicolor
  misc_feature (66)..(370): Pfam Name: Exostosin Pfam Description: Exostosin family
  misc_feature: Ceres Annot ID no. 8699946
  misc_feature: Bit score of 1072.3 for HMM based on sequences of Figure 27
  misc_feature: Functional Homolog Of SEQ ID NO. 115
MGSRKRWLPVALLLLAASALWPPVAAAAAAGGGGGEAEHAVQQHSERISGSAGDVLEDNPVGRLKVFIYDLPRKYNKKMVTKDPRCLSHMFAAEIFMHRFLLSSAVRTLNPKEADWFYTPVYTTCDLTNAGLPLPFKSPRVMRSAIQYISNKWPFWNRTDGADHFFVVPHDFAACFHYQEEKAIERGILPLLRRATLVQTFGQENHVCLKEGSIIIPPFAPPQKMQAHLISPDTPRSIFVYFRGLFYDTGNDPEGGYYARGARASLWENFKSNPLFDISTDHPATYYEDMQRAVFCLCPLGWAPWSPRLVEAVVFGCIPVIIADDIVLPFADAIPWEEIGVFVEEKDVPKLDTILTSMPIDDILRKQRLLANPSMKQAMLFPQPAQPRDAFHQILNGLARKLPHPEGTYLQPGDQHLNWTAGPVGDLKPW

SEQ ID NO: 158 - protein, 418 aa, Zea mays
  misc_feature (53)..(357): Pfam Name: Exostosin Pfam Description: Exostosin family
  misc_feature: Public GI ID no. 212275360
  misc_feature: Bit score of 1104.6 for HMM based on sequences of Figure 27
  misc_feature: Functional Homolog Of SEQ ID NO. 115
MRQWVLAVAILAAASAAALLLGAEAQQQGHQTERISGSAGDVLEDNPVGRLKVYVYDLPSKYNKKLLKKDPRCLSHMFAAEIFMHRFLLSSAVRTFNPEEADWFYTPVYTTCDLTPSGLPLPFKSPRMMRSAIERVATNWPYWNRSEGADHFFVTPHDFGACFHYQEEKAIGRGIPPLLQRATLVQTFGQKNHVCLKDGSITIPPFAPPQKMQAHLIPADTPRSIFVYFRGLFYDTSNDPEGGYYARGARASVWENFKNNPLFDISTDHPATYYEDMQRSVFCLCPLGWAPWSPRLVEAVVFGCIPVIVADDIVLPFADAIPWEDIGVFVAEEDVPRLDTILTSIPTDVVLRKQRLLANPSMKQAMLFPQPAQAGDAFHQILNGLARKLPHGDGVFLKPGDERVLNWTAGPPGDLKPW

SEQ ID NO: 159 - DNA, 1714 bp, Zea mays
  misc_feature: Ceres Clone ID no. 246342
  misc_feature: Encodes the peptide sequence at SEQ ID NO. 160
aaccctcctttctatctcacccgtttcttctctgcaagtagtactatttctccgtcatactgaagctctgctgtgtgtgcgcgcgcgcgttggaggaaggaggaagtaagcctaggaaagccatcgcccaccttctcgctacccaccaaacgccgcttggtaggagaagaattgcccgaaaagcttcccgttggccgggatctcttcttctttaattacccctggggattgcctggctcattagaccagacagggggagagagggagcgagctggccggctaggccaggagaggagaggggagacacagacaacgagcgctcgctgggaagaggaagaggttcgtggggacgcagggatccagaggaagatgaggcggtgggtcttagccatcgccattcccattctcgccgctgcttcggcggcggcgctgttccttggggctgaggcccaggcggtccagcagggccaccagacagagaggatctcaggaagtgctggtgacgtgttggaagataaccctgttgggaggctcaaggtttacgtgtatgatctccccagtaaatacaacaagaagctggtgaagaaggatcctaggtgcctgaaccacatgtttgctgctgagatcttcatgcaccggttcctgttgtcaagtgctgtccgaacatttaatcctgaagaagcagattggttctacactcccgtatacgccacatgtgatctgactccttcgggtcttccccttcccttcaaatctccacgcatgatgcgcagcgcaattgagctgattgccacgaactggccttactggaacagatcagagggtgcagatcatttctttgtcacgccacatgactttggtgcttgcttccattatcaggaagagaaagcaatcgggcggggaatccttcccttgcttcagcgtgctacactggttcagacctttggacagaagaaccatgtctgcctgaagggcgggtccatcrcaatcccaccatttgcacctccccagaaaatgcaggctcaccttatccccttggacacccctcggtctatcttcgtgtacttccgtggtctgttctacgacaccagcaacgatcctgagggtggttactatgcgagaggtgctcgtgcatcagtctgggagaacttcaagaacaacccgctcttcgacatctcgactgatcacccaccgacttactacgaagacatgcagcgttcagtgttctgcctgtgccccttgggctgggctccatggagccccaggctggtggaagctgtggttttcggctgcatcccggtgatcatcgccgacgacattgtcctgccctttgcggacgccatcccgtgggaggagattggtgtgtttgtcgccgaggaggatgtcccgaagctggacagcatcctgacgtccatcccaacagatgttatactgaggaagcagcgtctcctcgcgaacccggccatgaagcaggccatgctgttcccccagcctgctcaggcgggagatgcattccaccagatcctaaacgggctcgcgcgcaagctcccacatggtgacaacgtcttcttgaagcccggggagagggtcctgaactggaccgccggaccgccaggcgacctgaagccttggtagcatctgcctgcctagaacctttttgtgaaaaaaagcaagaacgagaacatggtgatatacatacatgcgcctttaagtc

SEQ ID NO: 160 - protein, 421 aa, Zea mays
  misc_feature (57)..(361): Pfam Name: Exostosin Pfam Description: Exostosin family
  misc_feature: Ceres Clone ID no. 246342
  misc_feature: Bit score of 1108.8 for HMM based on sequences of Figure 27
  misc_feature: Functional Homolog Of SEQ ID NO. 115
  misc_feature (206)..(206): Xaa is any aa, unknown, or other
MRRWVLAIAIPILAAASAAALFLGAEAQAVQQGHQTERISGSAGDVLEDNPVGRLKVYVYDLPSKYNKKLVKKDPRCLNHMFAAEIFMHRFLLSSAVRTFNPEEADWFYTPVYATCDLTPSGLPLPFKSPRMMRSAIELIATNWPYWNRSEGADHFFVTPHDFGACFHYQEEKAIGRGILPLLQRATLVQTFGQKNHVCLKGGSIXIPPFAPPQKMQAHLIPLDTPRSIFVYFRGLFYDTSNDPEGGYYARGARASVWENFKNNPLFDISTDHPPTYYEDMQRSVFCLCPLGWAPWSPRLVEAVVFGCIPVIIADDIVLPFADAIPWEEIGVFVAEEDVPKLDSILTSIPTDVILRKQRLLANPAMKQAMLFPQPAQAGDAFHQILNGLARKLPHGDNVFLKPGERVLNWTAGPPGDLKPW

SEQ ID NO: 161 - DNA, 1651 bp, Panicum virgatum
  misc_feature: Ceres Clone ID no. 1875736
  misc_feature: Encodes the peptide sequence at SEQ ID NO. 162
atcctctctcctctctcctctctcctctccatttgtcctaccaaaatctctcctttgcatagctcctcaattcctcttcctcctctttgtcgagttccccaaatccaatcccctcgtgaagctctcctcccttcgcccctagaggtcgagaccggcgcaggcgtcccctccgggatgggatcaggagcggggtggctccccgtggccctcctgctgctggccgcctccgtcctctcgccgcgggtcgccgcagccgccgccgccggcggcggcgaggccgagcatgccgttcagcagcacagcgagcgcatctcagggagtgctggtgatgtgttagaagataatcctgtggggaggttgaaggttttcatttatgacttgccgaggaagtacaacaagaagatggtcaccaaggatccacggtgcctcaatcacatgtttgctgcagaaattttcatgcatcgtttcttgctctcaagtgctgtgcggactctaaatcccaaggaggcggactggttctatacgccagtttatactacttgtgatttaactaatgctggactgcccttgccatttaagtcaccacgggtgatgaggagtgcaatccaatatatttcaaacaaatggcccttctggaacagaactgatggagcagatcacttctttgttgttccgcatgattttgcagcatgcttccattaccaggaagaaaaggctattgagcgtggaattcttccattgctgcgacgtgctactttggttcaaacttttggacaggaaaatcatgtctgtctgaaggagggttctatcattatcccaccctatgctcctccacagaaaatgcaagctcatctgatttcccctgacactccacgctcaatctttgtttacttccggggacttttctatgatacagggaatgaccctgagggcgggtactatgccagaggtgcacgagcttccctgtgggagaatttcaagagcaaccctctatttgatatttccacagatcaccctgccacttactatgaagacatgcagcgtgctgtcttctgcctgtgcccattgggctgggcaccatggagccctagattggttgaggctgtggtctttggctgcattccagttatcatagctgatgatattgtgctaccatttgcggatgcaattccatgggaggaaattggtgtctttgtcgaggagaaggatgtcccgaagttagacacaatcctcacatcaatgccaatcgatgacattttaagaaagcaaaggttacttgcaaatccatcaatgaagcaggccatgttgttcccgcatccagcccaaccgagggatgcattccaccaaatcttgaacggtcttgctcgcaagctgccacaccctgagggaacatacttacaacctggcgataggcatctcaactggactgctggacctgtgggagatctgaagccctggtagcgaagagcaatcttcttctcggataagcttttccatggaaaccccataggagtagtatatacttcatgaagtgtgatgtaatcgaaatgttgtgctttaggtgcaaaatacaccctggccttgtctagtccttatgaacaccatgtaacttattatctttcgatagaaatgaaatggtgtttatcttgcc

SEQ ID NO: 162 - protein, 428 aa, Panicum virgatum
  misc_feature (64)..(368): Pfam Name: Exostosin Pfam Description: Exostosin family
  misc_feature: Ceres Clone ID no. 1875736
  misc_feature: Bit score of 1075.9 for HMM based on sequences of Figure 27
  misc_feature: Functional Homolog Of SEQ ID NO. 115
MGSGAGWLPVALLLLAASVLSPRVAAAAAAGGGEAEHAVQQHSERISGSAGDVLEDNPVGRLKVFIYDLPRKYNKKMVTKDPRCLNHMFAAEIFMHRFLLSSAVRTLNPKEADWFYTPVYTTCDLTNAGLPLPFKSPRVMRSAIQYISNKWPFWNRTDGADHFFVVPHDFAACFHYQEEKAIERGILPLLRRATLVQTFGQENHVCLKEGSIIIPPYAPPQKMQAHLISPDTPRSIFVYFRGLFYDTGNDPEGGYYARGARASLWENFKSNPLFDISTDHPATYYEDMQRAVFCLCPLGWAPWSPRLVEAVVFGCIPVIIADDIVLPFADAIPWEEIGVFVEEKDVPKLDTILTSMPIDDILRKQRLLANPSMKQAMLFPHPAQPRDAFHQILNGLARKLPHPEGTYLQPGDRHLNWTAGPVGDLKPW

SEQ ID NO: 163 - protein, 415 aa, Oryza sativa subsp. japonica
  misc_feature (51)..(355): Pfam Name: Exostosin Pfam Description: Exostosin family
  misc_feature: Public GI ID no. 115441967
  misc_feature: Bit score of 1092.4 for HMM based on sequences of Figure 27
  misc_feature: Functional Homolog Of SEQ ID NO. 115
MAMRLSSAAVALALLLAATALEDVARGQDTERIEGSAGDVLEDDPVGRLKVYVYELPTKYNKKMVAKDSRCLSHMFAAEIFMHRFLLSSAIRTLNPEEADWFYTPVYTTCDLTPWGHPLPFKSPRIMRSAIQFISSHWPYWNRTDGADHFFVVPHDFGACFHYQEEKAIERGILPLLRRATLVQTFGQKDHVCLKEGSITIPPYAPPQKMKTHLVPPETPRSIFVYFRGLFYDTANDPEGGYYARGARASVWENFKNNPLFDISTDHPPTYYEDMQRSIFCLCPLGWAPWSPRLVEAVVFGCIPVIIADDIVLPFADAIPWDEIGVFVAEDDVPKLDTILTSIPMDVILRKQRLLANPSMKQAMLFPQPAQPGDAFHQILNGLGRKLPHPKSVYLDPGQKVLNWTQGPVGDLKPW

SEQ ID NO: 164 - DNA, 1251 bp, Sorghum bicolor
  misc_feature: Ceres Annot ID no. 8733887
  misc_feature: Encodes the peptide sequence at SEQ ID NO. 165
atggggagggggagcgcgatggcgcaagcccttgcgctcgtcgccttgctcctcgcctgctccgacgtcgccgtcgtcgcggcgcaggagactgagaggatccaagggagtgctggtgatgtgcttgaagatgatcctgtcggaaggctcaaggtatatgtctatgagctgccccccaagtacaacaagaatatactggcaaaggattcgagatgcctcagccacatgtttgctacagagatattcatgcatcgcttcctcttgacgagcgcggtccggactctaaatccggacgaagctgattggttctatactccagtatacacaacgtgcgaccttacaccatggggtcatcccttgactacaaagtctccacgaatgatgagaagtgcgattcagtatatttccaagcgttggccctactggaacaggacggagggagcagaccatttctttgtcacaccacatgactttggagcatgcttctatttccaggaagagacggccatccagcgaggtgtccttccggtgctgcgccgtgctacactggtccagacttttgggcagaagcatcatgtgtgcctgaaggaaggctccatcaccatcccgccgtatgctcctcctcataagatcagaactcacattgttccaccagagacccctcgttcaatctttgtctacttccgtggtctgttctatgacaccgcaaatgatcccgagggtggttactatgcaaggggtgcccgtgcgtcagtatgggagaacttcaagaacaatgctctgttcgacatctccacagaacacccgccaacctactatgaggacatgcagcgtgccatcttctgcctgtgcccactggggtgggcgccatggagtccccgtctagtggaggccgtggtgtttggctgcatccccgtgatcatcgcggacgacatcgtgctcccctttgcggacgcgatcccatgggaggagatcgccgtgttcgtggccgaggacgacgtcctgaagctggacaccatcctgacgtccatacccatggaggagatcctccgcaaacagcggctgctggcgaacccgtcgatgaagcaggcgatgctgttcccgcagcccgcggagccccgggacgcgttccaccaggtgctcaacgggctggcgcggaagctcccccacggcaagggcgtgttcctcaagcccgggcagaaggtgctcaactggaccgaggggacccgggaagacctcaagccgtggtag

SEQ ID NO: 165 - protein, 416 aa, Sorghum bicolor
  misc_feature (52)..(356): Pfam Name: Exostosin Pfam Description: Exostosin family
  misc_feature: Ceres Annot ID no. 8733887
  misc_feature: Bit score of 1046.1 for HMM based on sequences of Figure 27
  misc_feature: Functional Homolog Of SEQ ID NO. 115
MGRGSAMAQALALVALLLACSDVAVVAAQETERIQGSAGDVLEDDPVGRLKVYVYELPPKYNKNILAKDSRCLSHMFATEIFMHRFLLTSAVRTLNPDEADWFYTPVYTTCDLTPWGHPLTTKSPRMMRSAIQYISKRWPYWNRTEGADHFFVTPHDFGACFYFQEETAIQRGVLPVLRRATLVQTFGQKHHVCLKEGSITIPPYAPPHKIRTHIVPPETPRSIFVYFRGLFYDTANDPEGGYYARGARASVWENFKNNALFDISTEHPPTYYEDMQRAIFCLCPLGWAPWSPRLVEAVVFGCIPVIIADDIVLPFADAIPWEEIAVFVAEDDVLKLDTILTSIPMEEILRKQRLLANPSMKQAMLFPQPAEPRDAFHQVLNGLARKLPHGKGVFLKPGQKVLNWTEGTREDLKPW

SEQ ID NO: 166 - DNA, 1777 bp, Panicum virgatum
  misc_feature: Ceres Clone ID no. 2008277
  misc_feature: Encodes the peptide sequence at SEQ ID NO. 167
accaccaacctcccagcgcgctcccacacctctgccatcctctttgactccgcgtccctattctccctgcctgcctgccaagaatcctgctagctcccacctccacaccctcccgactcgagcctccatctctccccgctgctcctgagtcctgagccgccgagcgtggagggaaggcgcggaggcagaggtgcggacggcagactaatggggacggggagggcgcgggcgctgcccctggcgctcgccttgctcctcgcctgctccgacgtcgccgtcgtcgcggcgcagggcaccgagcggatccaaggaagtgctggtgatgtgctagaagatgatcctgttggaaggctcaaggtatatgtctatgagttgccgcccaagtacaacaagaatattttggcaaaagattcaagatgcctcaagcacatgtttgctacagagatcttcatacatcgcttcctactgtcgagtgcagtccggacattaaatccagaagaagccgattggttctatactccagtatacacaacatgcgaccttacaccatggggccatcccttgaccaccaagtctccacgtatgatgagaagtgcgattcagtacatttccaagcgttggccctactggaacaggacagagggagcagatcatttctttgtcacaccacatgactttggagcatgcttctatttccaggaagcaaaggctattgagcgaggtgtccttccggtgctgcgccgtgctacgctggtccagacttttgggcagaagcatcatgtgtgcctcaaggaaggctccatcaccatcccaccatatactcctcctcataagatgagaactcacctcattccaccagagacccctcggtcaatctttgtctattttcgtggtttgttctatgatacttcaaatgatcctgagggtggttactatgcaaggggcgcccgtgcctcagtgtgggagaacttcaagaacaacccgatgttcgacatctcgacagaccacccaccaacctactatgaggacatgcagcgttctgtcttctgcttgtgcccactgggctgggccccatggagcccccgtttggtggaggctgtggtgtttggctgcatccccgtgatcatcgccgatgacattgttcttccctttgcggacgcgataccatgggaggagattggtgtctttgtggccgaggatgacgtcacgaagctggacaccatcctgacctccataccgatggaggagatccttcggaagcagaggctgctcgcaaacccatccatgaagcaggccatgctcttcccacagcctgctgaacccagggacgccttccaccagatcctgaacgggctcgcacggaagctgccgcatggtaagggcgtgttcctgaagcccgggcagaaggtgctgaactggactgagggagacccggccgatatgaagccgtggtaggtataaacatatagtggcatggaaccatcaccattcgccatggctggtattcttttgtaaacgacacaaccatacgagaggctgatcatacagttgacgatgatgctgatgagtgaaccacagcattaaatgtaaagctccttcccttcctcctactacctgcttctttttgagggaatgtgcctgtcttgtctgtatggccatacctgctttgaccttttagtttaattttagcattttatagatgatagatggtggatcatgtaatgtatgaccgtgtattatattatacagttgctggtttacaatggaggaagtagct

SEQ ID NO: 167 - protein, 415 aa, Panicum virgatum
  misc_feature (51)..(355): Pfam Name: Exostosin Pfam Description: Exostosin family
  misc_feature: Ceres Clone ID no. 2008277
  misc_feature: Bit score of 1047.7 for HMM based on sequences of Figure 27
  misc_feature: Functional Homolog Of SEQ ID NO. 115
MGTGRARALPLALALLLACSDVAVVAAQGTERIQGSAGDVLEDDPVGRLKVYVYELPPKYNKNILAKDSRCLKHMFATEIFIHRFLLSSAVRTLNPEEADWFYTPVYTTCDLTPWGHPLTTKSPRMMRSAIQYISKRWPYWNRTEGADHFFVTPHDFGACFYFQEAKAIERGVLPVLRRATLVQTFGQKHHVCLKEGSITIPPYTPPHKMRTHLIPPETPRSIFVYFRGLFYDTSNDPEGGYYARGARASVWENFKNNPMFDISTDHPPTYYEDMQRSVFCLCPLGWAPWSPRLVEAVVFGCIPVIIADDIVLPFADAIPWEEIGVFVAEDDVTKLDTILTSIPMEEILRKQRLLANPSMKQAMLFPQPAEPRDAFHQILNGLARKLPHGKGVFLKPGQKVLNWTEGDPADMKPW

SEQ ID NO: 168 - DNA, 1512 bp, Populus balsamifera subsp. trichocarpa
  misc_feature: Ceres Annot ID no. 1522137
  misc_feature: Encodes the peptide sequence at SEQ ID NO. 169
atggagatttggaaatgggtttttgttggggttctttggtatgctggttttgtattgagtactggtgctgtggagctgggcaggagtcaacacactgagaggatttcaggtagggttctgctatggcaccaagcaacccacaatgaaccagacttcaacagcaaactccatatatttctggcaatacaagccacattctgttctttaggcttcttaatacccaagcctccctcctgttcaggcaaggtggccatagtgtatgatgaaagagctattctagttcttagtttctgtttgtgctttgtcctatattacatgcactatgaaaaggaaccgcccaagtctggaaagctagatcacattgaaggaagtgctggtgatgttttggaagatgatcctgttggaaggctgaaagtttttgtctatgaacttccaagaaaatacaataaaaagattctacaaaaggacccaagatgcctcacccacatgttcgcagctgagatctttatgcatcggtttctattatctagccctgttagaaccctaaaccccgatgaagctgattggttttatactcctgtatatacaacctgtgatttgacaacaaatggccttcctttgcctttcaaatcaccgcgaatgatgagaagtgctatacagcttatttcttcaaactggccctattggaatcggacggaaggtgctgaccacttttttgtagtgccacacgactttggagcatgcttccattatcaagaagagaaggctattgaaagaggaattcttcccttgctccaacgtgccaccttggtgcaaacttttggacaaagaaatcatgtttgcttaaaagatggttccattactgttcctccatatgctcctccacagaaaatgcaaacccacctgattcctgagaaaactcctaggtcaatttttgtgtacttcagaggattgttttatgatgtaggaaatgacccagaaggtggctattatgcaagaggtgctagagcagcggtctgggagaacttcaaggacaatccgctttttgacatttccacagagcacccagcaacatattacgaagatatgcagcgggctgttttctgtttgtgtccccttggctgggccccatggagtccaagattggttgaagcagtgatatttggctgtatccctgttattatagcagacgacattgttttaccctttgccgatgcaatcccatgggaagaaattggggtgtatgtagatgaggaagatgttccaaatttggacaccatactcacttccattccacctgaagtaatattgaggaagcagagactgctagctaacccttcaatgaagcaggctatgctattcccacaacctgctcaaccaggagatgctttccatcaagtattgaatggacttgcacgaaaattgcctcatgatagaagtgtttacctaagaccaggtgagaagatcttaaactggactgcaggtccagttggtgacctgaaaccttggtag

SEQ ID NO: 169 - protein, 398 aa, Populus balsamifera subsp. trichocarpa
  misc_feature (34)..(338): Pfam Name: Exostosin Pfam Description: Exostosin family
  misc_feature: Ceres Annot ID no. 1522137
  misc_feature: Bit score of 1083.3 for HMM based on sequences of Figure 27
  misc_feature: Functional Homolog Of SEQ ID NO. 115
MHYEKEPPKSGKLDHIEGSAGDVLEDDPVGRLKVFVYELPRKYNKKILQKDPRCLTHMFAAEIFMHRFLLSSPVRTLNPDEADWFYTPVYTTCDLTTNGLPLPFKSPRMMRSAIQLISSNWPYWNRTEGADHFFVVPHDFGACFHYQEEKAIERGILPLLQRATLVQTFGQRNHVCLKDGSITVPPYAPPQKMQTHLIPEKTPRSIFVYFRGLFYDVGNDPEGGYYARGARAAVWENFKDNPLFDISTEHPATYYEDMQRAVFCLCPLGWAPWSPRLVEAVIFGCIPVIIADDIVLPFADAIPWEEIGVYVDEEDVPNLDTILTSIPPEVILRKQRLLANPSMKQAMLFPQPAQPGDAFHQVLNGLARKLPHDRSVYLRPGEKILNWTAGPVGDLKPW

SEQ ID NO: 170 - DNA, 1639 bp, Zea mays
  misc_feature: Ceres Clone ID no. 280575
  misc_feature: Encodes the peptide sequence at SEQ ID NO. 171
tgatttctctctgcctgcccagaatcccgccagttgccttccacttccgccagactccgcgttcctcctgagcagctgccgccggcccgagagtggagggggaggcaggcgcccaggcggccaatggggacggggagcgcgacggcggcgcaggccctggcgctcgccgccttgctcctcgcctgctctggcgtcgcagtcgtcacggcgcaggacatcgagcggatccaaggaagtgccggcgacgtgctggaggacgaccccgtcgggcggctcaaggtgtacgtgtacgagctgccccccaagtacaacaagaacgtggtggcgaaggactcgcggtgcctgagccacatgttcgccacggagatcttcatgcaccgcttcctgctggcgagcgcggtccggaccctgaacccggacgaggcggactggttctacaccccggtctacaccacgtgcgacctcacgccgtggggccatcccctcaccgtcaagtccccgcggatgatgaggagcgccatccagtacgtctccaagcgctggccctactggaacaggacggagggggccgaccatttcttcgtcactccacatgactttggagcgtgcttctacttccaggaagagaaggccatccagcgaggtgtcctcccggtgctgcgccgcgctacgctggtccagacgtttgggcagaagaaccatgtctgcctcagggaaggctccatcaccatcccgccatacgctccgcctcacaagataagagctcatatcgtcccgccagagacgcctcggtcgatcttcgtctacttccgcggcctgttctacgacaccgcgaacgaccccgagggtggttactatgcaaggggcgcccgtgcgtcggtgtgggagaacttcaagaacaacgcgctgttcgacatctcgacggagcacccgccgacgtactacgaggacatgcagcgcgccatcttctgcctgtgcccgctgggctgggcgccgtggagcccgcgcctggtggaggccgtggtgttcggctgcatccccgtcatcatcgccgacgacatcgtgctgcccttcgcggacgccatcccgtgggaggagatcgccgtgttcgtgcccgaggacgacgtcctgaggctggacaccatcctcacgtccatccccatggacgagatcctccgcaagcagaggctgctggccaacccgtccatgaagcaggcgatgctgttcccgcagcccgcggagccgagggacgccttccaccaggtcctcaacgggctggcgcgcaagctgccccacgccaaggacgtcttcctcaagcccggccagaaggtgctcaactggacagagggcacccaggatgacctcaagccgtggtaggccgtggctgctgctcttttggaaacgacacaaccagatcgatgatggtgaggctgatgaatgaacgacacaacaaccattggttaaatgtaaagctcttaatcctcttgctcctccaacctttcttctttttgaggcaatgtgcatgtcttgcctgtatatattacatgacaatcagggtggccggccggggcaagacaagttgaggtgccaacatactaatagtattagtattatattctagcatgtatgttttgacgac

SEQ ID NO: 171 - protein, 417 aa, Zea mays
  misc_feature (53)..(357): Pfam Name: Exostosin Pfam Description: Exostosin family
  misc_feature: Ceres Clone ID no. 280575
  misc_feature: Bit score of 1043.2 for HMM based on sequences of Figure 27
  misc_feature: Functional Homolog Of SEQ ID NO. 115
MGTGSATAAQALALAALLLACSGVAVVTAQDIERIQGSAGDVLEDDPVGRLKVYVYELPPKYNKNVVAKDSRCLSHMFATEIFMHRFLLASAVRTLNPDEADWFYTPVYTTCDLTPWGHPLTVKSPRMMRSAIQYVSKRWPYWNRTEGADHFFVTPHDFGACFYFQEEKAIQRGVLPVLRRATLVQTFGQKNHVCLREGSITIPPYAPPHKIRAHIVPPETPRSIFVYFRGLFYDTANDPEGGYYARGARASVWENFKNNALFDISTEHPPTYYEDMQRAIFCLCPLGWAPWSPRLVEAVVFGCIPVIIADDIVLPFADAIPWEEIAVFVPEDDVLRLDTILTSIPMDEILRKQRLLANPSMKQAMLFPQPAEPRDAFHQVLNGLARKLPHAKDVFLKPGQKVLNWTEGTQDDLKPW

SEQ ID NO: 172 - DNA, 1356 bp, Populus balsamifera subsp. trichocarpa
  misc_feature: Ceres Annot ID no. 1522133
  misc_feature: Encodes the peptide sequence at SEQ ID NO. 173
atggagatttggaaatgggtttttgttggggttctttggtatgctggttttgtattgagtactggtgctgtggagctgggcaggagtcaacacactgagaggatttcaggcacttctccatatgttttaagcagttcctgcgggaggaatactgatccgattatcttaaattggcttctttatacccaagcctccctcctgttgaggcaaggaagtgctggtgatgttttggaagatgatcctgttggaaggctgaaagtttttgtctatgaacttccaagaaaatacaataaaaagattctgcaaaaggacccaagatgcctcacccacatgttcgcagctgagatctttatgcatcggtttctattatctagccctgttagaaccctcaatcccgatgaagctgattggttttatactcctgtatatacaacctgtgatttgacaacaaatggccttcctttgcctttcaaatcaccacgaatgatgagaagtgctatacagcttatttcttcaaactggccctattggaatcggacggaaggtgctgaccacttttttgtagtgccacacgactttggagcatgcttccattatcaagaagagaaggctattgaaagaggaattcttcccttgctccaacgtgccaccttggtgcaaacttttggacaaagaaatcatgtttgcttaaaagatggttccattactgttcctccatatgctcctccacagaaaatgcaaacccacctgattcctgagaaaactcctaggtcaatttttgtgtacttcagaggattgttttatgatgtaggaaatgacccagaaggtggctattatgcaagaggtgctagggcagcggtctgggagaacttcaaggacaatccgctttttgacatttccacagagcacccagcaacatattacgaagatatgcagcgagctgttttctgtttgtgtccccttggctgggccccatggagtccaagattggttgaagcagtgatatttggctgtatccctgttattatagcagatgacattgttttaccctttgctgatgcaatcccatgggaagaaattggggtatatgtagatgaggaagatgttccaaatttggacaccatactcacttccattccacctgaagtaatattgaggaagcagagactgctcgctaacccttcaatgaagcaggctatgctattcccacaacctgcccaaccaggagatgctttccatcaagtattgaatggacttgcacgaaaattacctcatgatagaagtgtttaccttaggccaggtgagaagatcttgaactggactgcaggtccagttggtgacctgaaaccttggtag

SEQ ID NO: 173 - protein, 451 aa, Populus balsamifera subsp. trichocarpa
  misc_feature (87)..(391): Pfam Name: Exostosin Pfam Description: Exostosin family
  misc_feature: Ceres Annot ID no. 1522133
  misc_feature: Bit score of 1093.7 for HMM based on sequences of Figure 27
  misc_feature: Functional Homolog Of SEQ ID NO. 115
MEIWKWVFVGVLWYAGFVLSTGAVELGRSQHTERISGTSPYVLSSSCGRNTDPIILNWLLYTQASLLLRQGSAGDVLEDDPVGRLKVFVYELPRKYNKKILQKDPRCLTHMFAAEIFMHRFLLSSPVRTLNPDEADWFYTPVYTTCDLTTNGLPLPFKSPRMMRSAIQLISSNWPYWNRTEGADHFFVVPHDFGACFHYQEEKAIERGILPLLQRATLVQTFGQRNHVCLKDGSITVPPYAPPQKMQTHLIPEKTPRSIFVYFRGLFYDVGNDPEGGYYARGARAAVWENFKDNPLFDISTEHPATYYEDMQRAVFCLCPLGWAPWSPRLVEAVIFGCIPVIIADDIVLPFADAIPWEEIGVYVDEEDVPNLDTILTSIPPEVILRKQRLLANPSMKQAMLFPQPAQPGDAFHQVLNGLARKLPHDRSVYLRPGEKILNWTAGPVGDLKPW

SEQ ID NO: 174 - DNA, 1365 bp, Solanum lycopersicum
  misc_feature: Ceres Annot ID no. 8460007
  misc_feature: Encodes the peptide sequence at SEQ ID NO. 175
atgaagagttggactttgggtatttttgttcttctttatctggctttgttgttgaaaattgaaggcttgaaatttcataggtctgaacatactgagagaatatcaggcaatgtaggaggttacaagtatctggtcttagaggcactattgaaaattcatgttagtgagattgacgatattagctttcattcctgtttttccttctatttccaaaatttaggaagtgcgggtgatgtcttggaagataatccagttgggagattaaaagtttttgtctatgagcttcctagcaaatataacaagaaaattctgcagaaagaccagcgatgcctcaaccacatgtttgctgctgaaatctttatgcatcgtttcctattatctagcgctgttcgaacctttaatcccgaggaagcagattggttctacacccctgtttacagtacttgtgaccttacaccaaatggccttcctttacccttcaagtcaccacgtatgatgaggagtgcaatacaacttatttcttctaactggccttactggaataggacagagggagctgatcacttctttattgtgccacatgattttggtgcttgttttcactatcaagaagaaaaagctattgagaggggaattcttccattgctccaacgtgctaccttggttcaaacttttggacaaagaaatcatgtttgtttgaaggatggttcaattacaattcctccatatgctcccccacagaaaatgcagtcccacttgatccctccagatactccccggtctatctttgtttatttccgaggcttgttttatgatgttggaaatgatccagagggtggttactatgctagaggtgcccgagcagcagtgtgggagaactttaaaaacaatcctctctttgatatttctactgagcatccaactacttactatgaagacatgcagcgagccatcttttgcttgtgccctctaggatgggcaccatggagtccgagattggttgaagcagttatatttggatgcatccctgttattatagcagatgacattgtcttgccatttgctgacgcaatcccttgggaagatataggcgtgtttgtagcagagaaagatgttccaaatttggacaccattctcacttctattcgaccagaagaaatattaaggaagcagagactgcttgccaatccttcaatgaagcaggcaatgttgtttccaacacctgctcaatcaggtgatgcttttcatcagattttgaatggacttgcacggaaactgccacatgacaagaccaattacttgaagccgggggagaagtccttaaactggactgctggtccagttggtgacctcaaaccttggtag

SEQ ID NO: 175 - protein, 454 aa, Solanum lycopersicum
  misc_feature (90)..(394): Pfam Name: Exostosin Pfam Description: Exostosin family
  misc_feature: Ceres Annot ID no. 8460007
  misc_feature: Bit score of 1082.2 for HMM based on sequences of Figure 27
  misc_feature: Functional Homolog Of SEQ ID NO. 115
MKSWTLGIFVLLYLALLLKIEGLKFHRSEHTERISGNVGGYKYLVLEALLKIHVSEIDDISFHSCFSFYFQNLGSAGDVLEDNPVGRLKVFVYELPSKYNKKILQKDQRCLNHMFAAEIFMHRFLLSSAVRTFNPEEADWFYTPVYSTCDLTPNGLPLPFKSPRMMRSAIQLISSNWPYWNRTEGADHFFIVPHDFGACFHYQEEKAIERGILPLLQRATLVQTFGQRNHVCLKDGSITIPPYAPPQKMQSHLIPPDTPRSIFVYFRGLFYDVGNDPEGGYYARGARAAVWENFKNNPLFDISTEHPTTYYEDMQRAIFCLCPLGWAPWSPRLVEAVIFGCIPVIIADDIVLPFADAIPWEDIGVFVAEKDVPNLDTILTSIRPEEILRKQRLLANPSMKQAMLFPTPAQSGDAFHQILNGLARKLPHDKTNYLKPGEKSLNWTAGPVGDLKPW

SEQ ID NO: 176 - protein, 418 aa, Zea mays
  misc_feature (54)..(358): Pfam Name: Exostosin Pfam Description: Exostosin family
  misc_feature: Public GI ID no. 194706890
  misc_feature: Bit score of 1041.9 for HMM based on sequences of Figure 27
  misc_feature: Functional Homolog Of SEQ ID NO. 115
MGGTGSATAPQALALAALLLACSGVAVVTAQDIERIQGSAGDVLEDDPVGRLKVYVYELPPKYNKNVVAKDSRCLSHMFATEIFMHRFLLASAVRTLNPDEADWFYTPVYTTCDLTPWGHPLTVKSPRMMRSAIQYVSKRWPYWNRTEGADHFFVTPHDFGACFYFQEEKAIQRGVLPVLRRATLVQTFGQKNHVCLREGSITIPPYAPPHKIRAHIVPPETPRSIFVYFRGLFYDTANDPEGGYYARGARASVWENFKNNALFDISTEHPPTYYEDMQRAIFCLCPLGWAPWSPRLVEAVVFGCIPVIIADDIVLPFADAIPWEEIAVFVPEDDVLRLDTILTSIPMDEILRKQRLLANPSMKQAMLFPQPAEPRDAFHQVLNGLARKLPHPKDVFLKPGQKVLNWTEGAQDDLKPW

SEQ ID NO: 177 - DNA, 1670 bp, Arabidopsis thaliana
  misc_feature: Ceres Clone ID no. 34861
  misc_feature: Encodes the peptide sequence at SEQ ID NO. 178
atcttcaaatgaaaatcgctgggctctcgctgtcaacgctgggcgtgagtgagatctaacaatcggtagcgaattttgtaaattttgttccggttttgaagtctcaatctcggggttccggttttagcaactacttcttctgacatttcagctgttctagttgatctttatatactttatatgatctgggattttgaagagtttttagggaggaaccaaaatttctgagagagaaaaatgaagttatcgagctgcgttttgatcttccttctatgtaacacattctcctcgatttctgctttccgtctgagtcggagtcaaccaactgagcgaatttcaggtagtgctggtgatgtgttggaagatgatcccgtgggaagactgaaagtctttgtttatgagcttccaagtaaatacaacaagaagatacttcagaaggatccgagatgtctaaaccacatgtttgctgctgagatatatatgcaacggtttcttttatctagcccagttcgaacacttaatcccgaggaagctgattggttctacgtacctgtgtacaccacttgtgatctcacgcctaatgggcttcctcttccttttaaatctccacgaatgatgagaagtgccattcagcttattgcttccaattggccatactggaatcgcacagaaggagcagaccacttctttgttgtgcctcatgactttagagcctgtttccattatcaagaagagaaggcaataggaagaggaatactacccttgcttcaacgagctacactggtgcagacatttggacaaaggaatcatgtttgcttgaaagaaggttcaatcactgttcctccatatgctccaccacagaagatgcagtcacacttaattcccgaaaaaactcctcgatccatcttcgtttatttcagaggattgttttatgatgtgggaaatgaccctgagggtggttattatgcgaggggtgcaagagcagctgtatgggaaaacttcaaagacaatccgctgtttgacatctcaacagagcacccaacaacatattatgaggacatgcagagagcaatcttctgcctatgcccacttggatgggccccatggagtccaagactggtggaagcagtgatattcggttgcatccctgtgatcatagcagacgacatcgtgttaccttttgcagatgcaatcccttgggaagatattggtgtgtttgtggatgagaaagatgtcccttacctggacacaatactcacatcgatcccaccagaggttatactgagaaaacagaggttgttggcaaacccgtcgatgaaacaagccatgctgttcccgcaaccggctcaaccaggggatgcgtttcatcaagtattgaatgggttggctcgtaagctgcctcatgagaggagtgtgtatctgagaccaggtgagaagctgttgaactggacggcaggaccggtcgctgatctgaaaccttggtaaggaccagtgttggaatttgattgaatgagctattgtttggttggtttctgtcttctcgtgtctgtattttgtagaatcataacttttttttgctatgtagaagggaaaaagctttgtcattgtaatgtaactagaatccttttgacatctcacgagaaagacaagtaaaagaaaaattattgtcc

SEQ ID NO: 178 - protein, 415 aa, Arabidopsis thaliana
  misc_feature (51)..(355): Pfam Name: Exostosin Pfam Description: Exostosin family
  misc_feature: Ceres Clone ID no. 34861
  misc_feature: Bit score of 1132.7 for HMM based on sequences of Figure 27
  misc_feature: Functional Homolog Of SEQ ID NO. 115
MKLSSCVLIFLLCNTFSSISAFRLSRSQPTERISGSAGDVLEDDPVGRLKVFVYELPSKYNKKILQKDPRCLNHMFAAEIYMQRFLLSSPVRTLNPEEADWFYVPVYTTCDLTPNGLPLPFKSPRMMRSAIQLIASNWPYWNRTEGADHFFVVPHDFRACFHYQEEKAIGRGILPLLQRATLVQTFGQRNHVCLKEGSITVPPYAPPQKMQSHLIPEKTPRSIFVYFRGLFYDVGNDPEGGYYARGARAAVWENFKDNPLFDISTEHPTTYYEDMQRAIFCLCPLGWAPWSPRLVEAVIFGCIPVIIADDIVLPFADAIPWEDIGVFVDEKDVPYLDTILTSIPPEVILRKQRLLANPSMKQAMLFPQPAQPGDAFHQVLNGLARKLPHERSVYLRPGEKLLNWTAGPVADLKPW

SEQ ID NO: 179 - DNA, 1488 bp, Arabidopsis thaliana
  misc_feature: Ceres Clone ID no. 206413
  misc_feature: Encodes the peptide sequence at SEQ ID NO. 180
gcgatccaaaccttcaaacacatctccggtagatatgaaaatccactcttgcctctccgccattcttctgttcctcttcttctctgcttcttccgctaaacaaaatgttcggacagagcgaatttcaggaagtgctggtgatgttttggaggatgatccagtgggaaagcttaaggtttatgtatatgagcttccaagcaagtacaacaagaaattactgcaaaaggatcctcgatgtcttacacacatgtttgctgctgagatttttatgcacaggttccttttatctagtcctgttcgaacgcgtaatcctgatgaagctgattggttttacacgccaatttatcctacttgcgacctcactcctaccggcttgccattaccgtttaaatcgccgcgtatgatgagaagttcgatacaactaatctcatcaaattggccttattggaatcggactgaaggagctgatcacttctttgttgtgccccatgactttggagcttgcttccattatcaggaggaaaaagccattgaaagagggatacttccactactccagcgtgccactttggttcagacatttggtcaaaggaaccatgtctgtttggacgaaggctcgatcactattcctccttttgcacctccacagaagatgcaggcccattttattcctccagatattccacgctctatctttgtctacttccgcggtttattttatgatgttaacaacgaccccgaaggtggatattatgcaagaggtgcaagagcagcggtgtgggagaacttcaagaacaaccctttgtttgacatctcaacagatcacccgacaacatactacgaagacatgcagagagccatcttctgtctatgtcctctaggatgggctccatggagccctaggttagttgaagcagttgtgtttgggtgcattccagttatcatagcagacgacatagtactgcctttcgcagacgccatcccctgggaagaaataggagtctttgttgcggaaaaagacgtccctgaactagacacgatcctaacctcaataccaacagaagtgatcctcagaaaacagagactcctcgcaaatccttcgatgaaacgagccatgcttttccctcaacctgcacaaccaggggatgcattccatcagatacttaacgggctagctcggaagttaccccacgacaaaagcatatacttgaagacaggtgagaaggcactgaactggactgctggtccggttgctgacctgaaaccttggtaaagtcagaaagagaggaatctttttgtatatcttgggtttcacctagagcatacgttgttgcctttctatagcacttcaaaaacattagaagtccaagtcctccgagtggattttttttgtagataacattagtacatttactcgaggtacatgtaccaagtttgttgtacattttctcttcgattgatcatataatactgtacactccttttgtc

SEQ ID NO: 180 - protein, 412 aa, Arabidopsis thaliana
  misc_feature (48)..(352): Pfam Name: Exostosin Pfam Description: Exostosin family
  misc_feature: Ceres Clone ID no. 206413
  misc_feature: Bit score of 1107.5 for HMM based on sequences of Figure 27
  misc_feature: Functional Homolog Of SEQ ID NO. 115
MKIHSCLSAILLFLFFSASSAKQNVRTERISGSAGDVLEDDPVGKLKVYVYELPSKYNKKLLQKDPRCLTHMFAAEIFMHRFLLSSPVRTRNPDEADWFYTPIYPTCDLTPTGLPLPFKSPRMMRSSIQLISSNWPYWNRTEGADHFFVVPHDFGACFHYQEEKAIERGILPLLQRATLVQTFGQRNHVCLDEGSITIPPFAPPQKMQAHFIPPDIPRSIFVYFRGLFYDVNNDPEGGYYARGARAAVWENFKNNPLFDISTDHPTTYYEDMQRAIFCLCPLGWAPWSPRLVEAVVFGCIPVIIADDIVLPFADAIPWEEIGVFVAEKDVPELDTILTSIPTEVILRKQRLLANPSMKRAMLFPQPAQPGDAFHQILNGLARKLPHDKSIYLKTGEKALNWTAGPVADLKPW

SEQ ID NO: 181 - DNA, 1239 bp, Populus balsamifera subsp. trichocarpa
  misc_feature: Ceres Annot ID no. 1491074
  misc_feature: Encodes the peptide sequence at SEQ ID NO. 182
atgaggacatgcttgtgggtttttgccgtggttcttgttttcggttttgttgatggaaaagaaattgaaaggttgcgcacggagaggatttcaggaagcgctggggatgtgttggatgatgatccagtgggaaggttgaaggtctatgtttatgagcttccgagtaaatacaacaagaaactgctgcagaaggaccccagatgtctcacccatatgtttgctgctgaaatcttcatgcatagatttctcttatccagcccagttcgaacccttaatccagatgaagcagattggttttattcccctatataccccacttgtgatctcacacccatgggcttgccgttgcccttcaaatctcctaggatgatgagaagtgcgatacagctaatctcctccaattggccttactggaatcgtacggaaggggctgatcacttttttgttgtgccccatgactttggagcctgcttccactatcaggaagagaaagccattgagcggggcattctcccgttactccagcgttctactttggttcaaacttttgggcaacgaaatcatgtgtgcttgaatgaggggtcaattacaattcctccttttgctcctcctcaaaagatgcaggcccaccagattccccctgacattccacggtccatttttgtctatttccgtggattgttttatgatgtaaataatgatccagaaggtggttattatgcaagaggagcaagggctgcagtttgggagaatttcaagaacaatccactcttcgacatctccactgaccatccaacaacatattatgaagacatgcagcgagctatattttgcttgtgcccgctcggttgggccccgtggagtcctagattagttgaagcagtggtatttggatgcattcctgtcatcatagcagatgatattgttttgccatttgccgatgctatcccatgggaggaaattggggtgtttgtagcagaggaagatgtccctaacctggacacaatcctaacatctataccaccagaagtgattttaaggaaacaaaggcttcttgcaaatccttctatgaaacgtgcaatgttattcccacaacctgcacaaccaggtgatgctttccaccaaatactaaacgggctggctcgtaagttgccgcacgacaggagtgtttacttgaagtctggtcaaaatattttgaattggacagcaggaccagttggggacctgaaaccttggtaa

SEQ ID NO: 182 - protein, 412 aa, Populus balsamifera subsp. trichocarpa
  misc_feature (48)..(352): Pfam Name: Exostosin Pfam Description: Exostosin family
  misc_feature: Ceres Annot ID no. 1491074
  misc_feature: Bit score of 1109.6 for HMM based on sequences of Figure 27
  misc_feature: Functional Homolog Of SEQ ID NO. 115
MRTCLWVFAVVLVFGFVDGKEIERLRTERISGSAGDVLDDDPVGRLKVYVYELPSKYNKKLLQKDPRCLTHMFAAEIFMHRFLLSSPVRTLNPDEADWFYSPIYPTCDLTPMGLPLPFKSPRMMRSAIQLISSNWPYWNRTEGADHFFVVPHDFGACFHYQEEKAIERGILPLLQRSTLVQTFGQRNHVCLNEGSITIPPFAPPQKMQAHQIPPDIPRSIFVYFRGLFYDVNNDPEGGYYARGARAAVWENFKNNPLFDISTDHPTTYYEDMQRAIFCLCPLGWAPWSPRLVEAVVFGCIPVIIADDIVLPFADAIPWEEIGVFVAEEDVPNLDTILTSIPPEVILRKQRLLANPSMKRAMLFPQPAQPGDAFHQILNGLARKLPHDRSVYLKSGQNILNWTAGPVGDLKPW

SEQ ID NO: 183 - protein, 412 aa, Populus tremula x Populus tremuloides
  misc_feature (48)..(352): Pfam Name: Exostosin Pfam Description: Exostosin family
  misc_feature: Public GI ID no. 60657598
  misc_feature: Bit score of 1097.7 for HMM based on sequences of Figure 27
  misc_feature: Functional Homolog Of SEQ ID NO. 115
MRTCLWVFALVLVFGFVDGKKIERLRTERISGSAGDVLDDDPVGRLKVYVYELPSKYNKKLLQKDPRCLTHMFAAEIFMHRFLLSSPVRTLNPDEADWFYSPIYPTCDLTPMGLPLPFKSPRMMRSAIQLISSNWPYWNRTEGADHFFVVPHDFGACFHCQEEKAVERGILPLLQRSTLVQTFGRRNHVCLNEGSITIPPFAPPQKMQAHQIPPDIPRSIFVYFRGLFYDVNNDPEGGYYARGARAAVWENFKNNPLFDISTDHPTTYYEDMQRAIFCLCPLGWAPWSPRLVEAVVFGCIPVIIADDIVLPFADAIPWEEIGVFVAEEDVPNLDTILTSIPPEVILRKQRLLANPSMKRAMLFPQPAQPGDAFHQILNGLARKLPHDRSVYLKSGQNILNWTAGPVGDLKPW

SEQ ID NO: 184 - DNA, 1263 bp, Sorghum bicolor
  misc_feature: Ceres Annot ID no. 8733056
  misc_feature: Encodes the peptide sequence at SEQ ID NO. 185
atgaggtcgatcttcgccatcgccattcttgccgccaccactgcagtagtgctcttccatgggtccgacgcgcaggagttgatgcagagccaccatacagagaggatctcaggcagtggcggtgacgttttagaagacgaccctgtgggcaagctcaaggtgttcgtgtacgacctcccggcgaaatacaacacgaagccggtggagaaggacccgcgttgcctgacgcacatgttcgcgacggagatcttcgtgcaccggtccctcctctccagcgccgtccgaaccctggaccccgaggaagcggactggttctacacccccgtgtacaccacctgcgacctgaccgcctccggccacccgatgcccttcgactccccgcggatgatgcgcagcgccatccggctgatcgccgaccgctggccgtactggaacaggtccgagggcgccgaccacttcttcgtcacgccgcacgacttcggtgcctgcttccatttccaggaggagaaggccatggcgcgcgggatcctgcccgtgctccggcgcgccacgctggtgcagacgttcgggcagcggaaccacgtgtgcctcaaggacggcggcggctccatcaccatcccgccgtacgcgccgccgtggaagatggaggcgcagctcctgccgccggccaccccgcggtccatcttcgtctacttccgcggcctcttctacgacgccggcaacgaccccgagggcggctactacgccaggggcgcccgcgcgtccgtgtgggagaacttcaagagcaacccgctgttcgacatctccacggcgcacccgacgacctactaccaggacatgcagcgcgccgtgttctgcctgtgcccgctggggtgggcgccctggagcccccgcctggtggaggccgtcgtcttcggctgcatccccgtggtcatcgccgacgacatcgtgctgcccttcgcggacgccatcccgtgggcggacatcggcgtgttcgtcgccgaggacgacgtcccgaggctggacaccatcctgacgtccatccccgtggaggtggtgctgaggaagcagcggctcctcgcgagtccggcgatgaagcgcgccgtgctgttcccgcagcccgcgcagcccggcgacgcgttccaccagatactcaacgggctcgcacgcaagctcccgcacggcgatgatgccttcttgaggaacggacagacggtcctcaactggacggctggaccgccgagagacctcaagccatggtag

SEQ ID NO: 185 - protein, 420 aa, Sorghum bicolor
  misc_feature (54)..(360): Pfam Name: Exostosin Pfam Description: Exostosin family
  misc_feature: Ceres Annot ID no. 8733056
  misc_feature: Bit score of 1034.2 for HMM based on sequences of Figure 27
  misc_feature: Functional Homolog Of SEQ ID NO. 115
MRSIFAIAILAATTAVVLFHGSDAQELMQSHHTERISGSGGDVLEDDPVGKLKVFVYDLPAKYNTKPVEKDPRCLTHMFATEIFVHRSLLSSAVRTLDPEEADWFYTPVYTTCDLTASGHPMPFDSPRMMRSAIRLIADRWPYWNRSEGADHFFVTPHDFGACFHFQEEKAMARGILPVLRRATLVQTFGQRNHVCLKDGGGSITIPPYAPPWKMEAQLLPPATPRSIFVYFRGLFYDAGNDPEGGYYARGARASVWENFKSNPLFDISTAHPTTYYQDMQRAVFCLCPLGWAPWSPRLVEAVVFGCIPVVIADDIVLPFADAIPWADIGVFVAEDDVPRLDTILTSIPVEVVLRKQRLLASPAMKRAVLFPQPAQPGDAFHQILNGLARKLPHGDDAFLRNGQTVLNWTAGPPRDLKPW

SEQ ID NO: 186 - DNA, 1248 bp, Solanum lycopersicum
  misc_feature: Ceres Annot ID no. 8458833
  misc_feature: Encodes the peptide sequence at SEQ ID NO. 187
atgagaaattggaactttattgtgtttctctgtcttgctttcgtattgagagttgaatccttcaagtttcataggattgatcaacacgttgaaaggatctccggaagtgctggtgatgtgttggaggatgatcctacaggtaggttgaaagtttttgtatatgagcttccaagcaaatataacaagaaaactgtgcagagggactcgcgatgcctcagtcatatgtttgctgctgagatatatatgcatcagtttctgttatccagtcctgttcgaacacttgatccagaggaagcagattggttttacactccagtttacacaacttgtgagtacttgacaccacatggtcatcctttacctttcaactcaccacgtatgatgagaagcgcgattcagcttattgcttctagctggccatactggaacaggacacaagggggtgatcatttcttcattgtaccacatgattttggtgcatgtttccattttcaagaagagaaagctattggaagaggtattcttccgttgctccatcgtgctaccttggttcaaacttttggacaacggaatcatgtttgtttgaaggaaggatcgataactattcctccgtatgctcctccacagaaaattcagtctcatttgatctctcctgatacaccaagatccatatttgtctatttccgtggcttgttttatgacaaaagaaatgatcctaaaggcgggtactatgcaagaggcgctcgagcagcagtgtgggagaactttaaggacaatccactctttgatatttctacagatcatccaactacatactacgaagacatgcaacgagctatcttttgcttgtgccctctcggatgggctccatggagtcctagattggttgaagctgttgtattcggatgcatccccgttataatagcagatgacattgtcttgccatttgctgacgcgatcccatgggaagatataggattgttcgtagcggagaaggatgtcccatatttggataacattcttacttctgttccaccacaagaaatactgaggaagcagagattgctcgccaatccttcaatgaagcaggctatgttatttctacaacctgctcaaccaggtgatgctttccaccaaatcttgaatggacttgctcgtaaattacccaatcatcacaagactatatacggagacaacaacgtcttaaactggactgctggtccagttgctgatctaaaaccttggtag

SEQ ID NO: 187 - protein, 415 aa, Solanum lycopersicum
  misc_feature (51)..(356): Pfam Name: Exostosin Pfam Description: Exostosin family
  misc_feature: Ceres Annot ID no. 8458833
  misc_feature: Bit score of 1030.4 for HMM based on sequences of Figure 27
  misc_feature: Functional Homolog Of SEQ ID NO. 115
MRNWNFIVFLCLAFVLRVESFKFHRIDQHVERISGSAGDVLEDDPTGRLKVFVYELPSKYNKKTVQRDSRCLSHMFAAEIYMHQFLLSSPVRTLDPEEADWFYTPVYTTCEYLTPHGHPLPFNSPRMMRSAIQLIASSWPYWNRTQGGDHFFIVPHDFGACFHFQEEKAIGRGILPLLHRATLVQTFGQRNHVCLKEGSITIPPYAPPQKIQSHLISPDTPRSIFVYFRGLFYDKRNDPKGGYYARGARAAVWENFKDNPLFDISTDHPTTYYEDMQRAIFCLCPLGWAPWSPRLVEAVVFGCIPVIIADDIVLPFADAIPWEDIGLFVAEKDVPYLDNILTSVPPQEILRKQRLLANPSMKQAMLFLQPAQPGDAFHQILNGLARKLPNHHKTIYGDNNVLNWTAGPVADLKPW

SEQ ID NO: 188 - DNA, 1539 bp, Panicum virgatum
  misc_feature: Ceres Clone ID no. 1818144
  misc_feature: Encodes the peptide sequence at SEQ ID NO. 189
accactgtgactattacctagctcatgaacatgtgagaccagacaaggggaggcttgggaaggagacacaggtgctgccaaggggcttgcggggagcataaagatgaggccggtcttggccatcgccattcttgccaccaccgctgcagcagtgctcttccttgggtctgaggcgcaggaggtgaagcaggatcaccatgcagagaggatctcaggcagtgccggcgatgttctggaggacgaccctgtcggccggctcaaggtctacgtgtacgacctcccggccagatacaacacggcgctgctggagaaggacccgcggtgcctgacgcacatgttcgccacggaggtgttcgtgcaccggtccctcctctccagcgccgtccgcaccctggaccccgaggaagccgactggttcttcgtgcccgtgtacaccacctgcgacctcaccgcctcgggccacccgatgcccttcgactcgccgcggatgatgcgcagcgcgatccgcctcgtcgccgagcgctggccgcactggaaccgctccgagggcgccgaccacttcctcgtcacgccgcacgacttcggggcctgcttccacttcaaggaggacaaggccgtggcgcgcgggatcctgccgctgctccggcgcgccacgctggtgcagacgttcgggcagcggcggcacgcgtgcctcaagggcggctccatcaccgtcccaccgtacgcgccgccggcgcgcatggaggcgcggcgcctgccccccgggaccccgcgctccgtcttcgtctacttccgcggcctcttctacgacgccggcaacgaccccgagggcgggcactacgcgaggggcgcccgcgcgtcggtgtgggagaacttccggagcaacccgctgttcgacatctcgacggagcgcccggcgacgtactacgaggacatgcagcgggcggtgttctgcctgtgcccgctggggtgggcgccgtggagcccccggctagtggaggcggtggtgttcggctgcatccccgtggtcatcgcggacgacatcgtgctgcccttcgccgacgccatcccgtgggcggacatcggcgtgttcgtcgccgaggaggacgtcccgaggctggacaccatcctcacctccatcccggcggaggtggtgctgaggaagcagcggctgctcgccaccccggccatgaagcgcgccgtgctgttctcgcagccgtcgcagcccggggacgcgttccaccagatactcaacgggctcgcgcgcaagctcccgcacggcgacggcgtcttcctgaggcccgggcagacggtactcaactggacggctggcccaccgggggacctcaagccgtggtaggtagctggtagccgtcaaatcgccatggctgaatggtgatgatgggctgctggccatcaggcaaatgaactttttttttttgctcttcttccaccatagaagatggctgcgaactgttgtgatacgtacgtgaatgttcagcgtatgtgaatgtcatagccaaaacttgcagagatttt

SEQ ID NO: 189 - protein, 418 aa, Panicum virgatum
  misc_feature (54)..(358): Pfam Name: Exostosin Pfam Description: Exostosin family
  misc_feature: Ceres Clone ID no. 1818144
  misc_feature: Bit score of 1012.4 for HMM based on sequences of Figure 27
  misc_feature: Functional Homolog Of SEQ ID NO. 115
MRPVLAIAILATTAAAVLFLGSEAQEVKQDHHAERISGSAGDVLEDDPVGRLKVYVYDLPARYNTALLEKDPRCLTHMFATEVFVHRSLLSSAVRTLDPEEADWFFVPVYTTCDLTASGHPMPFDSPRMMRSAIRLVAERWPHWNRSEGADHFLVTPHDFGACFHFKEDKAVARGILPLLRRATLVQTFGQRRHACLKGGSITVPPYAPPARMEARRLPPGTPRSVFVYFRGLFYDAGNDPEGGHYARGARASVWENFRSNPLFDISTERPATYYEDMQRAVFCLCPLGWAPWSPRLVEAVVFGCIPVVIADDIVLPFADAIPWADIGVFVAEEDVPRLDTILTSIPAEVVLRKQRLLATPAMKRAVLFSQPSQPGDAFHQILNGLARKLPHGDGVFLRPGQTVLNWTAGPPGDLKPW

SEQ ID NO: 190 - DNA, 1812 bp, Populus balsamifera subsp. trichocarpa
  misc_feature: Ceres Annot ID no. 1468764
  misc_feature: Encodes the peptide sequence at SEQ ID NO. 191
atggagatttggaaatgggtttttgttggggttctttggtatgctggttttgtattgagtactggtgctgtggagctgggcaggagtcaacacactgagaggatttcaggtagggttctgctatggcaccaagcaacccacaatgaaccagacttcaacagcaaactccatatatttctggcaatacaagccacattctgttctttaggcttcttaatacccaagcctccctcctgttcaggcaaggtggccatagtgtatgatgaaagagctattctagttcttagtttctgtttgtgctttgtcctatattacatgcactatgaaaaggaaccgcccaagtctggaaagctagatcacattgaaggaagtgctggtgatgttttggaagatgatcctgttggaaggctgaaagtttttgtctatgaacttccaagaaaatacaataaaaagattctacaaaaggacccaagatgcctcacccacatgttcgcagctgagatctttatgcatcggtttctattatctagccctgttagaaccctaaaccccgatgaagctgattggttttatactcctgtatatacaacctgtgatttgacaacaaatggccttcctttgcctttcaaatcaccgcgaatgatgagaagtgctatacagcttatttcttcaaactggccctattggaatcggacggaaggtgctgaccacttttttgtagtgccacacgactttggagcatgcttccattatcaagaagagaaggctattgaaagaggaattcttcccttgctccaacgtgccaccttggtgcaaacttttggacaaagaaatcatgtttgcttaaaagatggttccattactgttcctccatatgctcctccacagaaaatgcaaacccacctgattcctgagaaaactcctaggtcaatttttgtgtacttcagaggattgttttatgatgtaggaaatgacccagaaggtggctattatgcaagaggtgctagagcagcggtctgggagaacttcaaggacaatccgctttttgacatttccacagagcacccagcaacatattacgaagatatgcagcgggctgttttctgtttgtgtccccttggctgggccccatggagtccaagattggttgaagcagtgatatttggctgtatccctgttattatagcagacgacattgttttaccctttgccgatgcaatcccatgggaagaaattggggtgtatgtagatgaggaagatgttccaaatttggacaccatactcacttccattccacctgaagtaatattgaggaagcagagactgctagctaacccttcaatgaagcaggctatgctattcccacaacctgctcaaccaggagatgctttccatcaagtattgaatggacttgcacgaaaattgcctcatgatagaagtgtttacctaagaccaggcaacaatgttggccttagaggaccaactgatcgttttgctctaaaatcatctttcttttctccttcacttcacctcttgattacttcttataagcatcagcagcagccccttgcacctgctgctccaagattctccatgcgtgctgcagccaagcaagcctacatttgtagagattgcgggagatttagggaatacatgcctgctgtggcaaaaaatgataatgacacagacgttcgaaaagcacgtaaaacacagattcagagagatgaagcaattgggcgagcattgcctatcgcagtcgttgttggagttgtagcttgtttaaagatcctcaaggtggtaaattggcgataa

SEQ ID NO: 191 - protein, 498 aa, Populus balsamifera subsp. trichocarpa
  misc_feature (34)..(338): Pfam Name: Exostosin Pfam Description: Exostosin family
  misc_feature: Ceres Annot ID no. 1468764
  misc_feature: Bit score of 1029.4 for HMM based on sequences of Figure 27
  misc_feature: Functional Homolog Of SEQ ID NO. 115
MHYEKEPPKSGKLDHIEGSAGDVLEDDPVGRLKVFVYELPRKYNKKILQKDPRCLTHMFAAEIFMHRFLLSSPVRTLNPDEADWFYTPVYTTCDLTTNGLPLPFKSPRMMRSAIQLISSNWPYWNRTEGADHFFVVPHDFGACFHYQEEKAIERGILPLLQRATLVQTFGQRNHVCLKDGSITVPPYAPPQKMQTHLIPEKTPRSIFVYFRGLFYDVGNDPEGGYYARGARAAVWENFKDNPLFDISTEHPATYYEDMQRAVFCLCPLGWAPWSPRLVEAVIFGCIPVIIADDIVLPFADAIPWEEIGVYVDEEDVPNLDTILTSIPPEVILRKQRLLANPSMKQAMLFPQPAQPGDAFHQVLNGLARKLPHDRSVYLRPGNNVGLRGPTDRFALKSSFFSPSLHLLITSYKHQQQPLAPAAPRFSMRAAAKQAYICRDCGRFREYMPAVAKNDNDTDVRKARKTQIQRDEAIGRALPIAVVVGVVACLKILKVVNWR

SEQ ID NO: 192 - DNA, 1893 bp, Populus balsamifera subsp. trichocarpa
  misc_feature: Ceres Annot ID no. 1468760
  misc_feature: Encodes the peptide sequence at SEQ ID NO. 193
atggagatttggaaatgggtttttgttggggttctttggtatgctggttttgtattgagtactggtgctgtggagctgggcaggagtcaacacactgagaggatttcaggcacttctccatatgttttaagcagttcctgcgggaggaatactgatccgattatcttaaattggcttctttatacccaagcctccctcctgttgaggcaaggaagtgctggtgatgttttggaagatgatcctgttggaaggctgaaagtttttgtctatgaacttccaagaaaatacaataaaaagattctgcaaaaggacccaagatgcctcacccacatgttcgcagctgagatctttatgcatcggtttctattatctagccctgttagaaccctcaatcccgatgaagctgattggttttatactcctgtatatacaacctgtgatttgacaacaaatggccttcctttgcctttcaaatcaccacgaatgatgagaagtgctatacagcttatttcttcaaactggccctattggaatcggacggaaggtgctgaccacttttttgtagtgccacacgactttggagcatgcttccattatcaagaagagaaggctattgaaagaggaattcttcccttgctccaacgtgccaccttggtgcaaacttttggacaaagaaatcatgtttgcttaaaagatggttccattactgttcctccatatgctcctccacagaaaatgcaaacccacctgattcctgagaaaactcctaggtcaatttttgtgtacttcagaggattgttttatgatgtaggaaatgacccagaaggtggctattatgcaagaggtgctagggcagcggtctgggagaacttcaaggacaatccgctttttgacatttccacagagcacccagcaacatattacgaagatatgcagcgagctgttttctgtttgtgtccccttggctgggccccatggagtccaagattggttgaagcagtgatatttggctgtatccctgttattatagcagatgacattgttttaccctttgctgatgcaatcccatgggaagaaattggggtatatgtagatgaggaagatgttccaaatttggacaccatactcacttccattccacctgaagtaatattgaggaagcagagactgctcgctaacccttcaatgaagcaggctatgctattcccacaacctgcccaaccaggagatgctttccatcaagtattgaatggacttgcacgaaaattacctcatgatagaagtgtttaccttaggccagagattcttagcagcctctccggtagtccttccgacaaagctggtttaatcaaggcggctgtttacctaaagtgtaaatcttggtttttcactttaatatgtcagattaagcatccacctaaagtattattgaaaaataatatattgagattgggtcttttgggtctggttacctgggtctgctctactcttcaaaatccatggctaaaaaacaaaagctcaactccatatccacccaaacagcagaaagaactgccgaagaaacaacaacaacaaaaagagccacaaaaggaagaacctcaacaacaagaagaggaagaggaagaggaagaagaatatgaagaagtggaagaggaggaagaagataatgaagatgatccagatgaagaaaccaatcaaaatgctcagatctcagctgttgagaatctaaacgacgacgatgacgaagatgaggaaccgactgagaaacttcttaaaccgtttggaaaagaccagttgattaatttacttcgtgaagcagcggatggtcaccgagattttgcagataaaatccaacaagtggctgaccttaaaagaaggaccattagggcatga

SEQ ID NO: 193 - protein, 630 aa, Populus balsamifera subsp. trichocarpa
  misc_feature (87)..(391): Pfam Name: Exostosin Pfam Description: Exostosin family
  misc_feature: Ceres Annot ID no. 1468760
  misc_feature: Bit score of 1039.6 for HMM based on sequences of Figure 27
  misc_feature: Functional Homolog Of SEQ ID NO. 115
MEIWKWVFVGVLWYAGFVLSTGAVELGRSQHTERISGTSPYVLSSSCGRNTDPIILNWLLYTQASLLLRQGSAGDVLEDDPVGRLKVFVYELPRKYNKKILQKDPRCLTHMFAAEIFMHRFLLSSPVRTLNPDEADWFYTPVYTTCDLTTNGLPLPFKSPRMMRSAIQLISSNWPYWNRTEGADHFFVVPHDFGACFHYQEEKAIERGILPLLQRATLVQTFGQRNHVCLKDGSITVPPYAPPQKMQTHLIPEKTPRSIFVYFRGLFYDVGNDPEGGYYARGARAAVWENFKDNPLFDISTEHPATYYEDMQRAVFCLCPLGWAPWSPRLVEAVIFGCIPVIIADDIVLPFADAIPWEEIGVYVDEEDVPNLDTILTSIPPEVILRKQRLLANPSMKQAMLFPQPAQPGDAFHQVLNGLARKLPHDRSVYLRPEILSSLSGSPSDKAGLIKAAVYLKCKSWFFTLICQIKHPPKVLLKNNILRLGLLGLVTWVCSTLQNPWLKNKSSTPYPPKQQKELPKKQQQQKEPQKEEPQQQEEEEEEEEEYEEVEEEEEDNEDDPDEETNQNAQISAVENLNDDDDEDEEPTEKLLKPFGKDQLINLLREAADGHRDFADKIQQVADLKRRTIRA

SEQ ID NO: 194 - protein, 417 aa, Oryza sativa subsp. japonica
  misc_feature (53)..(357): Pfam Name: Exostosin Pfam Description: Exostosin family
  misc_feature: Public GI ID no. 115481310
  misc_feature: Bit score of 977.6 for HMM based on sequences of Figure 27
  misc_feature: Functional Homolog Of SEQ ID NO. 115
MGTRRRSARARARPPLAMPLAVLLLFACSSGVAAAAAQGIERIKDDPVGKLKVYVYELPPKYNKNIVAKDSRCLSHMFATEIFMHRFLLSSAIRTSNPDEADWFYTPVYTTCDLTPWGHPLTTKSPRMMRSAIKFISKYWPYWNRTEGADHFFVVPHDFAACFYFQEAKAIERGILPVLRRATLVQTFGQKNHACLKDGSITVPPYTPAHKIRAHLVPPETPRSIFVYFRGLFYDTSNDPEGGYYARGARASVWENFKNNPMFDISTDHPQTYYEDMQRAVFCLCPLGWAPWSPRLVEAVVFGCIPVIIADDIVLPFSDAIPWEEIAVFVAEDDVPQLDTILTSIPTEVILRKQAMLAEPSMKQTMLFPQPAEPGDGFHQVMNALARKLPHGRDVFLKPGQKVLNWTEGTREDLKPW

SEQ ID NO: 195 - protein, 401 aa, Oryza sativa subsp. japonica
  misc_feature (37)..(341): Pfam Name: Exostosin Pfam Description: Exostosin family
  misc_feature: Public GI ID no. 21671946
  misc_feature: Bit score of 968.8 for HMM based on sequences of Figure 27
  misc_feature: Functional Homolog Of SEQ ID NO. 115
MPLAVLLLFACSSGVAAAAAQGIERIKEDDPVGKLKVYVYELPPKYNKNIVAKDSRCLSHMFATEIFMHRFLLSSAIRTSNPDEADWFYTPVYTTCDLTPWGHPLTTKSPRMMRSAIKFISKYWPYWNRTEGADHFFVVPHDFAACFYFQEAKAIERGILPVLRRATLVQTFGQKNHACLKDGSITVPPYTPAHKIRAHLVPPETPRSIFVYFRGLFYDTSNDPEGGYYARGARASVWENFKNNPMFDISTDHPQTYYEDMQRAVFCLCPLGWAPWSPRLVEAVVFGCIPVIIADDIVLPFSDAIPWEEIAVFVAEDDVPQLDTILTSIPTEVILRKQAMLAEPSMKQTMLFPQPAEPGDGFHQVMNALARKLPHGRDVFLKPGQKVLNWTEGTREDLKPW

SEQ ID NO: 196 - protein, 401 aa, Oryza sativa subsp. japonica
  misc_feature (37)..(341): Pfam Name: Exostosin Pfam Description: Exostosin family
  misc_feature: Public GI ID no. 18642697
  misc_feature: Bit score of 960.0 for HMM based on sequences of Figure 27
  misc_feature: Functional Homolog Of SEQ ID NO. 115
MPLAVLLLFACSSGVAAAAAQGIERIKEDDPVGKLKVYVYELPPKYNKNIVAKDSRCLSHMFATEIFMHRFLLSSAIRTSNPDEADWFYTPVYTTCDLTPWGHPLTTKSPRMMRSAIKFISKYWPYWNRTEGADHFFVVPHDFAACFYFQEAKAIERGILPVLRRATLVQTFGQKNHACLKDGSITVPPYTPAHKIRAHLVPPETPRSIFVYFRGLFYDTSNDPEGGYYARGARASVWENFKNNPMFDISTDHPQTYYEDMQRAVFCLCPLGWAPWSPRLVEAVVFGCIPVIIADDIDLPLSDAIPWEEIAVFVAEDDVPQLDTILTSIPTEVILRKQAMLAEPSMKQTMLFPQPAEPGDGFHQVMNALARKLPHGRDVFLKPGQKVLNWTEGTREDLKPW

SEQ ID NO: 197 - protein, 449 aa, Physcomitrella patens subsp. patens
  misc_feature (81)..(385): Pfam Name: Exostosin Pfam Description: Exostosin family
  misc_feature: Public GI ID no. 168000965
  misc_feature: Bit score of 1004.9 for HMM based on sequences of Figure 27
  misc_feature: Functional Homolog Of SEQ ID NO. 115
MEHPLECADSCSLAMSWFCNKKCRGWGLMKRTVVASGLRSVVLLLLFIYFVQDVTAEMGHQRISGSAGDVLEDNPVGRLKVFIYDIPSKYNTDWLKKDPRCLTHMFAVEEYLHDFLTESPVRTLNPEEADWFYTPVYTTCDLTPNGLPLPFKSPRVMRSAISYISSHWPYWNRTDGADHFFVVPHDFAACFHYQEEKAIERGILPLLKRATLIQTFGQNHHVCLKEDSIVIPPYAPPERMQTRLNPPSTPRSIFAYFRGLFYDPGNDPEGGYYARGARAAIWENFKDNPLFDISTEHPATYYEDMQRAIFCLCPLGWAPWSPRLVEGVIFGCIPVIIADDIVLPFADAIPWEKIGVFVEEKDVPILDKILCTINHEEVLEKQRLLANPAMKQAMLFPRPAKPGDAFHQILNGLARKLPHDPSIYLQPGQSFLNWTEGPPGDLYPWGNDL

SEQ ID NO: 198 - protein, 341 aa, Nicotiana plumbaginifolia
  misc_feature (6)..(281): Pfam Name: Exostosin Pfam Description: Exostosin family
  misc_feature: Public GI ID no. 23821292
  misc_feature: Bit score of 889.4 for HMM based on sequences of Figure 27
  misc_feature: Functional Homolog Of SEQ ID NO. 115
MFAAEIYMHRFLLSSAVRTFNPEEADWFYTPVYTTCDLTPNGLPLPFKSPRMMRSAIQLIASNWPYWNRTEGADHFFITPHDFGACFHYQEEKAIERGILPLLQRATLVQTFGQRNHVCLKDGSITIPPYAPPQKMQSHLIPPDTPRSIFVYFRGLFYDVGNDPEGGYYARGARAAVWENFKDNPLFDISTEHPTTYYEDMQRAIFCLCPLGWAPWSPRLVEAVIFGCIPVIIADDIVLPFADAIPWEDIGVFVAEKDVPNLDTILTSIPPEEILRKQRLLANPSMKQAMLFPQPAQSGDAFHQILNGLARKLPHDKSTYLKPGENFLNWTAGPVGDLKPW

SEQ ID NO: 199 - protein, 341 aa, Vitis vinifera
  misc_feature (6)..(281): Pfam Name: Exostosin Pfam Description: Exostosin family
  misc_feature: Public GI ID no. 157359959
  misc_feature: Bit score of 894.9 for HMM based on sequences of Figure 27
  misc_feature: Functional Homolog Of SEQ ID NO. 115
MFAAEIFMHRFLLSSPVRTLNPEEADWFYTPIYTTCDLTPNGLPLPFKSPRMMRSAIQLISSNWPYWNRTEGADHFFVVPHDFGACFHYQEEKAIERGILPLLQRATLVQTFGQRNHVCLNEGSITIPPYAPPQKMQAHLIPQETPRSIFVYFRGLFYDVNNDPEGGYYARGARAAVWENFKDNPLFDISTEHPTTYYEDMQRAIFCLCPLGWAPWSPRLVEAVIFGCIPVIIADDIVLPFADAIPWEEIGVFVAEEDVPNLDTILTSIPPEVILRKQRLLANPSMKQAMLFPQPAQSGDAFHQILNGLARKLPHNKNVYLKPGENALNWTAGPVGDLKPW

SEQ ID NO: 200 - protein, 342 aa, Oryza sativa subsp. indica
  misc_feature (6)..(281): Pfam Name: Exostosin Pfam Description: Exostosin family
  misc_feature: Public GI ID no. 125539672
  misc_feature: Bit score of 860.9 for HMM based on sequences of Figure 27
  misc_feature: Functional Homolog Of SEQ ID NO. 115
MFAAEIFMHRFLLSSAVRTLNPEQADWFYAPVYTTCDLTHAGLPLPFKSPRMMRSAIQFLSRKWPFWNRTDGADHFFVVPHDFGACFHYQEEKAIERGILPLLRRATLVQTFGQKNHVCLKEGSITIPPYAPPQKMQAHLIPPDTPRSIFVYFRGLFYDNGNDPEGGYYARGARASLWENFKNNPLFDISTEHPATYYEDMQRSVFCLCPLGWAPWSPRLVEAVVFGCIPVIIADDIVLPFADAIPWDEIGVFVDEEDVPRLDSILTSIPIDDILRKQRLLANPSMKQAMLFPQPAQPRDAFHQILNGLARKLPHPDSVYLKPGEKHLNWTAGPVADLKPWK

SEQ ID NO: 201 - protein, 341 aa, Arabidopsis thaliana
  misc_feature (6)..(281): Pfam Name: Exostosin Pfam Description: Exostosin family
  misc_feature: Public GI ID no. 10176877
  misc_feature: Bit score of 890.4 for HMM based on sequences of Figure 27
  misc_feature: Functional Homolog Of SEQ ID NO. 115
MFAAEIYMQRFLLSSPVRTLNPEEADWFYVPVYTTCDLTPNGLPLPFKSPRMMRSAIQLIASNWPYWNRTEGADHFFVVPHDFGACFHYQEEKAIGRGILPLLQRATLVQTFGQRNHVCLKEGSITVPPYAPPQKMQSHLIPEKTPRSIFVYFRGLFYDVGNDPEGGYYARGARAAVWENFKDNPLFDISTEHPTTYYEDMQRAIFCLCPLGWAPWSPRLVEAVIFGCIPVIIADDIVLPFADAIPWEDIGVFVDEKDVPYLDTILTSIPPEVILRKQRLLANPSMKQAMLFPQPAQPGDAFHQVLNGLARKLPHERSVYLRPGEKLLNWTAGPVADLKPW

SEQ ID NO: 202 - DNA, 1266 bp, Panicum virgatum
  misc_feature: Ceres Clone ID no. 2013135
  misc_feature: Encodes the peptide sequence at SEQ ID NO. 203
ctattctccctgcctgtcaagaatcctccctaccacctcctccacaccctcccgactcgagcctccatctcctgtctcccggttgctcctgagccgccgagcgtggagggaaggcgacggactaatgaggacggggagggcgcgggcgctgcccctggcgctcgccttgctcctcgcctgctcctacgtcgccgtcgtcgcggcgcagggcaccgagcggatccaaggaagtgctggtgatgtgctagaagatgatcctgttggaaggctcaaggtatatgtctatgagttgccgcccaagtacaacaagaatattttggcaaaagattcaagatgcctcaagcacatgtttgctacagagatcttcatacatcgcttcctactgtcgagtgcagtccggacactaaatccggaagaagccgattggttctatactccagtatacacaacatgcgaccttactccatggggccatcccttgaccaccaagtctccacgtatgatgagaagtgcgattcagtacatttccaagcgttgcccctactggaacaggacagagggagcagatcatttctttgtcacaccacatgactttggagcatgcttctatttccaggaagcaaaggctatcgagcgaggtgtccttccagtgctgtgccgtgccacgctggtccagacttttgggcagaagcatcatgtatgcctcaaggaaggctccatcaccatcccaccatatactcctcctcataagatgagaactcacctcgttccaccagagacccctcggtcaatctttgtctattttcgtggtttgttctatgatacttcaaatgatcctgagggtggttactatgcaaggggcgcccgtgcatcggtgtgggagaacttcaagagcaacccgatgttcgacatctcgacagaccacccaccaacctactatgaggacatgcagcgttctgtattctgcttgtgcccactgggctgggccccatggagcccccgtttggtggaggctgtggtgtttggctgcatccccgtgatcatcgccgacgacattgttcttccctttgcggacgcgatcccatgggaggagatcggtgtctttgtggctgaggatgacgtcacgaagctggacaccatcctgacctccataccaatggaggaaatccttcgaaagcagaggctgctcgcaaacccatccatgaagcaggccatgctcttcccacagccagctgaacccagggatgccttccaccagatcctgaa

SEQ ID NO: 203 - protein, 380 aa, Panicum virgatum
  misc_feature (51)..(355): Pfam Name: Exostosin Pfam Description: Exostosin family
  misc_feature: Ceres Clone ID no. 2013135
  misc_feature: Bit score of 893.5 for HMM based on sequences of Figure 27
  misc_feature: Functional Homolog Of SEQ ID NO. 115
MRTGRARALPLALALLLACSYVAVVAAQGTERIQGSAGDVLEDDPVGRLKVYVYELPPKYNKNILAKDSRCLKHMFATEIFIHRFLLSSAVRTLNPEEADWFYTPVYTTCDLTPWGHPLTTKSPRMMRSAIQYISKRCPYWNRTEGADHFFVTPHDFGACFYFQEAKAIERGVLPVLCRATLVQTFGQKHHVCLKEGSITIPPYTPPHKMRTHLVPPETPRSIFVYFRGLFYDTSNDPEGGYYARGARASVWENFKSNPMFDISTDHPPTYYEDMQRSVFCLCPLGWAPWSPRLVEAVVFGCIPVIIADDIVLPFADAIPWEEIGVFVAEDDVTKLDTILTSIPMEEILRKQRLLANPSMKQAMLFPQPAEPRDAFHQIL

SEQ ID NO: 204 - DNA, 1565 bp, Triticum aestivum
  misc_feature: Ceres Clone ID no. 910275
  misc_feature: Encodes the peptide sequence at SEQ ID NO. 205
ctaaatgctttaatgaaaatggacttccctcatgtactcacatttcgtcggtacaccattagttgtcctatgtacacatgattttcccacctcattagttacttattagcctgtccggttcatcatagttacatgattggtctcctctgtttgtcagtttcatgtggagattgttgtgtgcttctactcaaccaacatcattaacctgcaggaagtgctggtgatgttctagaagacaatcctgttggcaagttgaaggttttcgtctacgacttgccaagcaagtacaacaagaggcttgtcaccaaggatccccgatgcctcaaccacatgtttgccgctgagatattcatgcaccgtttcttgctctctagtgcagtgaggacggttaatcctgaagaggccgattggttctacgctcctgtttacactacttgtgatctaactcgtgctggacttccgttaccgttcaagtctccaaggatgatgagaagcgcgatccagttcatttcaaagaggtggcctttctggaatagaactgatggaggagatcatttctttgtcgctccacatgattttgcggcatgctttcactaccaggaagagaatgctattgcgcgtggaattcttccgttgctacgccgtgctacattggttcaaacatttggacagaagaatcatgtttgcttgaaagaggggtctattacaataccaccatttgcgccaccacagaaaatgcaggcccacttgattcctcctgatactccccgttcaatcttcgtttacttcagaggtttgttctatgacaatgggaacgaccctgagggtgggtattacgcaagaggtgctcgagcttcattgtgggagaacttcaagaataatcctctgtttgatatctccaccgaacaccctgccacttactacgaagatatgcagcgctccgtcttctgcttatgtccgttggggtgggcgccatggagtcctaggttggtggaggctgtggtttttggctgcattccagtcatcatagctgacgacatcgtgctgcctttcgcggatgcaatcccttgggacgaaattggtgtttttgttgatgaggaggatgtgccaaagcttgattcaattctgacatcgattccgattgatgatatcctaaggaagcaaagattgctcgccaacccatcaatgaagaaggccatgctgttcccgcagccagcgcaacctagagatgcattccatcagattctaaatggccttgctcgcaaactcccgcacccagagaccatatacttacaaccaggtgagaagcatctcaactggacagctgggcctgttggagacttgaagccttggtaacataaaagcttccttgcaagacctggctttgttgatcttgtgaaaagttctgtttcttttatcacctttctctgagaagtccgaagatccatagaattatacgatattgaagtgtgttatatcctctgatgtcactctaactaaaaatagtggatcttacataaacggttgtaacgttgtaactgtattaattgtataaagaagtaaag

SEQ ID NO: 205 - protein, 341 aa, Triticum aestivum
  misc_feature (6)..(281): Pfam Name: Exostosin Pfam Description: Exostosin family
  misc_feature: Ceres Clone ID no. 910275
  misc_feature: Bit score of 845.1 for HMM based on sequences of Figure 27
  misc_feature: Functional Homolog Of SEQ ID NO. 115
MFAAEIFMHRFLLSSAVRTVNPEEADWFYAPVYTTCDLTRAGLPLPFKSPRMMRSAIQFISKRWPFWNRTDGGDHFFVAPHDFAACFHYQEENAIARGILPLLRRATLVQTFGQKNHVCLKEGSITIPPFAPPQKMQAHLIPPDTPRSIFVYFRGLFYDNGNDPEGGYYARGARASLWENFKNNPLFDISTEHPATYYEDMQRSVFCLCPLGWAPWSPRLVEAVVFGCIPVIIADDIVLPFADAIPWDEIGVFVDEEDVPKLDSILTSIPIDDILRKQRLLANPSMKKAMLFPQPAQPRDAFHQILNGLARKLPHPETIYLQPGEKHLNWTAGPVGDLKPW

SEQ ID NO: 206 - DNA, 1404 bp, Populus balsamifera subsp. trichocarpa
  misc_feature: Ceres Annot ID no. 1438255
  misc_feature: Encodes the peptide sequence at SEQ ID NO. 207
atggtattgataacaaaatgtgttttgggtttcaataacgcaggaagcgctggggatgtgttggatgatgatccagtgggaaggttgaaggtctatgtttatgagcttccgagtaaatacaacaagaaactgctgcagaaggaccccagatgtctcacccatatgtttgctgctgaaatcttcatgcatagatttctcttatccagcccagttcgaacccttaatccagatgaagcagattggttttattcccctatataccccacttgtgatctcacacccatgggcttgccgttgcccttcaaatctcctaggatgatgagaagtgcgatacagctaatctcctccaattggccttactggaatcgtacggaaggggctgatcacttttttgttgtgccccatgactttggagcctgcttccactatcaggtagccccccttgcttctctcagctgttacaaaaagtggtctagcttgcagtttttttcaatgctcttgctgctacactttttttttttggtcttctggggtggtggtgggaggaacctgattctcccttatggccacacaggttggcgaacaatccacccaaagtaccaatctcctcaaaggggcttgatgacaggatcaattttgactgaacatgaagagaaagccattgagcggggcattctcccgttactccagcgttctactttggttcaaacttttgggcaacgaaatcatgtgtgcttgaatgaggggtcaattacaattcctccttttgctcctcctcaaaagatgcaggcccaccagattccccctgacattccacggtccatttttgtctatttccgtggattgttttatgatgtaaataatgatccagaaggtggttattatgcaagaggagcaagggctgcagtttgggagaatttcaagaacaatccactcttcgacatctccactgaccatccaacaacatattatgaagacatgcagcgagctatattttgcttgtgcccgctcggttgggccccgtggagtcctagattagttgaagcagtggtatttggatgcattcctgtcatcatagcagatgatattgttttgccatttgccgatgctatcccatgggaggaaattggggtgtttgtagcagaggaagatgtccctaacctggacacaatcctaacatctataccaccagaagtgattttaaggaaacaaaggcttcttgcaaatccttctatgaaacgtgcaatgttattcccacaacctgcacaaccaggtgatgctttccaccaaatactaaacgggctggctcgtaagttgccgcacgacaggagtgtttacttgaagtctggtcaaaatattttgaattggacagcaggaccagttggggacctgaaaccttggtaa

SEQ ID NO: 207 - protein, 467 aa, Populus balsamifera subsp. trichocarpa
  misc_feature (31)..(407): Pfam Name: Exostosin Pfam Description: Exostosin family
  misc_feature: Ceres Annot ID no. 1438255
  misc_feature: Bit score of 972.1 for HMM based on sequences of Figure 27
  misc_feature: Functional Homolog Of SEQ ID NO. 115
MVLITKCVLGFNNAGSAGDVLDDDPVGRLKVYVYELPSKYNKKLLQKDPRCLTHMFAAEIFMHRFLLSSPVRTLNPDEADWFYSPIYPTCDLTPMGLPLPFKSPRMMRSAIQLISSNWPYWNRTEGADHFFVVPHDFGACFHYQVAPLASLSCYKKWSSLQFFSMLLLLHFFFLVFWGGGGRNLILPYGHTGWRTIHPKYQSPQRGLMTGSILTEHEEKAIERGILPLLQRSTLVQTFGQRNHVCLNEGSITIPPFAPPQKMQAHQIPPDIPRSIFVYFRGLFYDVNNDPEGGYYARGARAAVWENFKNNPLFDISTDHPTTYYEDMQRAIFCLCPLGWAPWSPRLVEAVVFGCIPVIIADDIVLPFADAIPWEEIGVFVAEEDVPNLDTILTSIPPEVILRKQRLLANPSMKRAMLFPQPAQPGDAFHQILNGLARKLPHDRSVYLKSGQNILNWTAGPVGDLKPW

SEQ ID NO: 208 - protein, 317 aa, Nicotiana tabacum
  misc_feature (6)..(281): Pfam Name: Exostosin Pfam Description: Exostosin family
  misc_feature: Public GI ID no. 39725600
  misc_feature: Bit score of 783.6 for HMM based on sequences of Figure 27
  misc_feature: Functional Homolog Of SEQ ID NO. 115
MFAAEIYMHRFLLSSAVRTFNPEEADWFYTPVYTTCDLTPNGLPLPFKSPRMMRSAIQLIASNWPYWNRTEGADHFFITPHDFGACFHYQEEKAIERGILPLLQRATLVQTFGQRNHVCLKDGSITIPPYAPPQKMQSHLIPPDTPRSIFVYFRGLFYDVGNDPEGGYYARGARAAVWENFKDNPPFDISTEHPTTYYEDMQRAIFCLCPLGWAPWSPRLVEAVIFGCIPVIIADDIVLPFADAIPWEDIGVFVAEKDVPTLDTILTSIPPEEILRKQRLLAKPSMKQAMLSPQPAQSGDAFHQILNGLARKLPHDK

SEQ ID NO: 209 - protein, 341 aa, Oryza sativa subsp. japonica
  misc_feature (6)..(281): Pfam Name: Exostosin Pfam Description: Exostosin family
  misc_feature: Public GI ID no. 110288702
  misc_feature: Bit score of 791.2 for HMM based on sequences of Figure 27
  misc_feature: Functional Homolog Of SEQ ID NO. 115
MFATEIFMHRFLLSSAIRTSNPDEADWFYTPVYTTCDLTPWGHPLTTKSPRMMRSAIKFISKYWPYWNRTEGADHFFVVPHDFAACFYFQEAKAIERGILPVLRRATLVQTFGQKNHACLKDGSITVPPYTPAHKIRAHLVPPETPRSIFVYFRGLFYDTSNDPEGGYYARGARASVWENFKNNPMFDISTDHPQTYYEDMQRAVFCLCPLGWAPWSPRLVEAVVFGCIPVIIADDIVLPFSDAIPWEEIAVFVAEDDVPQLDTILTSIPTEVILRKQAMLAEPSMKQTMLFPQPAEPGDGFHQVMNALARKLPHGRDVFLKPGQKVLNWTEGTREDLKPW

SEQ ID NO: 210 - DNA, 959 bp, Panicum virgatum
  misc_feature: Ceres Clone ID no. 1801750
  misc_feature: Encodes the peptide sequence at SEQ ID NO. 211
acaccaccggccggccagcctccgcatcctagccttgtgatcgctcgagcggcgaaccatgaggaatcaggtcttcgcggtgctagccctcgccggcgccgcgctgctcgccgcggccggcggcgccagcgggcagcagagcatcatcacgcggcaggtgttcgagagcatgctcagccaccgcggcgacagcggctgccagggcgccttctacacctacgacgccttcacccaggccgcggccaggttccccgccttcggcaccaccggcgacgaccggacacgccggcgggagctcgccgccttcttcggccagacctcacatgaaaccaccggtggatggtcaactgctccgggcggaccgttcgcctggggatactgccgcgtggaagaacagagtcagacggacccaccctactacggacgtggacccatacaactcactcacaaatacaactacgagcaggccggtcgggcgttgaacctggacctggtgggcaaccctgacctggtgtcgcgcaaccccgtggtggccttcgagacggcgctctggttctggatgacgccgcaggcggcgaagccgtcgtgccacgacgtgatcaccggccgctgggcgcccggcgccgacgaccgccgcgcggggaggctccccggctacggcctcctcaccaacatcatcaacggcgggctcgagtgcggcaagggccagccgaccgacggcgacaacgaccgggtcgggttctacaggaggtactgccagatgctcggagtggcggaaggtggcaacctgtcctgcgagaaccagacgccgtacgcacccgcgggctaaatcgcaactgaaatatataagcagtgctaataataataataataaacagccaccgcacccccactgcgcctggttacattatagtagtacttgcttatgactacgcttgctatatatagctttcacatgt

SEQ ID NO: 211 - protein, 256 aa, Panicum virgatum
  misc_feature (29)..(246): Pfam Name: Glyco_hydro_19 Pfam Description: Chitinase class I
  misc_feature: Ceres Clone ID no. 1801750
  misc_feature: Bit score of 539.6 for HMM based on sequences of Figure 35
  misc_feature: Functional Homolog Of SEQ ID NO. 211
  misc_feature: in Figure 35
MRNQVFAVLALAGAALLAAAGGASGQQSIITRQVFESMLSHRGDSGCQGAFYTYDAFTQAAARFPAFGTTGDDRTRRRELAAFFGQTSHETTGGWSTAPGGPFAWGYCRVEEQSQTDPPYYGRGPIQLTHKYNYEQAGRALNLDLVGNPDLVSRNPVVAFETALWFWMTPQAAKPSCHDVITGRWAPGADDRRAGRLPGYGLLTNIINGGLECGKGQPTDGDNDRVGFYRRYCQMLGVAEGGNLSCENQTPYAPAG

SEQ ID NO: 212 - DNA, 774 bp, Sorghum bicolor
  misc_feature: Ceres Annot ID no. 8643337
  misc_feature: Encodes the peptide sequence at SEQ ID NO. 213
atggcgagggttttggcgacggtgctggtcttggcaggcgccgcgctgctcgcggcggccggcggcgccagcgcgaagcagggcgtgtggagcatcatcacgcggcccatgttccagagcatgctgagccaccgcggcgacagcggttgccagggcgcgttctacacctacgacgcgttcatcgaggccgccagcaagttccccggcttcggcaccaccggcgacgaccagacccgaaggcgggagctcgccgccttcttcggacagacgtcccacgaaactaccggtggatggccaactgctccgggtggacagtttgcctggggatactgccgggtgaaggaacagaaccccacggacccaccctactatggacgaggacccatacagctaactcatgagtacaactacaggcaagctgggcaagcgctgaacctgaacctggtgggcaacccggacctggtgtcgagcgaccccgtggtggccttcaagacggccatctggttctggatgacgccgcagtcgccgaagccgtcgtgccacgccgtcatgaccggcagctggacgccctccgccgacgaccgcgccgcggggaggctccccgggtatggcgtgaccaccaacatcatcaacggcgggatggagtgcggcaagggccagtccaccgacgccgccaaggaccgggtcggctactacaagaggtactccgatatgctccgagtgcgctacggggacaacatcgcctgcaaggaccagaagccttacggaggctga

SEQ ID NO: 213 - protein, 257 aa, Sorghum bicolor
  misc_feature (32)..(249): Pfam Name: Glyco_hydro_19 Pfam Description: Chitinase class I
  misc_feature: Ceres Annot ID no. 8643337
  misc_feature: Bit score of 561.1 for HMM based on sequences of Figure 35
  misc_feature: Functional Homolog Of SEQ ID NO. 211
  misc_feature: in Figure 35
MARVLATVLVLAGAALLAAAGGASAKQGVWSIITRPMFQSMLSHRGDSGCQGAFYTYDAFIEAASKFPGFGTTGDDQTRRRELAAFFGQTSHETTGGWPTAPGGQFAWGYCRVKEQNPTDPPYYGRGPIQLTHEYNYRQAGQALNLNLVGNPDLVSSDPVVAFKTAIWFWMTPQSPKPSCHAVMTGSWTPSADDRAAGRLPGYGVTTNIINGGMECGKGQSTDAAKDRVGYYKRYSDMLRVRYGDNIACKDQKPYGG

SEQ ID NO: 214 - protein, 261 aa, Zea mays
  misc_feature (33)..(253): Pfam Name: Glyco_hydro_19 Pfam Description: Chitinase class I
  misc_feature: Public GI ID no. 212275494
  misc_feature: Bit score of 541.7 for HMM based on sequences of Figure 35
  misc_feature: Functional Homolog Of SEQ ID NO. 211
  misc_feature: in Figure 35
MWRRALAMVLFMAGAALLAGAAGAGAQQGVWSIITRPMFQSMLSHRGDSGCQGAFYTYDAFIEAASKFPGFGTTGDEQTRRRELAAFFGQTSHETTGGWATAPDGPFAWGYCRVKEQKQTDPPYYGRGPIQLTHKYNYRLAGQALNLNLVGDPDLVARDPVVAFKTAIWFWMTPQSPKPSCHAVMTGDWRPSATDRAAGRLPGYGLTTNIINGGLECGEDRSTDGAKAAKDRVGYYKRYCGMLGVGYGDNMACGSQKPYGG

SEQ ID NO: 215 - protein, 256 aa, Oryza sativa subsp. japonica
  misc_feature (30)..(247): Pfam Name: Glyco_hydro_19 Pfam Description: Chitinase class I
  misc_feature: Public GI ID no. 115450541
  misc_feature: Bit score of 546.0 for HMM based on sequences of Figure 35
  misc_feature: Functional Homolog Of SEQ ID NO. 211
  misc_feature: in Figure 35
MRRLLPLAGATLLIAAAGGASGQQAGVGSIITRAMFESMLSHRGDQGCQGAFYTYDAFIKAAGDFPRFGTTGNDETRRRELAAFFGQTSHETTGGWATAPDGPFAWGYCRVNEITPSDPPYYGRGPIQLTHKYNYQLAGDALGLDLVNNPDLVSSDPVVAFRTAIWFWMTAQSPKPSCHDVITNQWTPSGDDRSSGRLPGYGMATNIINGGEECGKGYSTDNAKDRVGYYKRYCDMFRVGYGDNIACRDQKPYGGG

SEQ ID NO: 216 - DNA, 966 bp, Populus balsamifera subsp. trichocarpa
  misc_feature: Ceres Annot ID no. 1450642
  misc_feature: Encodes the peptide sequence at SEQ ID NO. 217
atgaagatttgggtcttctcagttttctctctattactgtcccttttcctaggagtctcagctgagcaatgtggaaggcaggctgggggtgccctttgtccgggaggtcaatgttgtagccaatttggttggtgtggcaacactgatgcttactgcagtaaaggatgtcaaagccaatgtggtggtggtggtggtggtggtggaggagaccttactagtatcatctcaagagaaaagttcaacgagatgctcaaacatagaaatgatggcggatgcccggccaagggattctacacttacgatgctttcatctcagccgccaaggccttccctggatttggcactactggtgatgttgccactcgtaaaagggagattgctgctttcttcggccagacctctcatgaaactactggaggatggcaaactgcacctgatggcccatacgcttggggatattgctacgtgagggaacaaaatccaggatcttactgtgctccaagttccacatatccatgtgctggtggcaagcaatattacggccgaggtcctatgcaactttcatggaactacaactacgggcaatgtggaaaagccataggggtggatctattaaacaatcctgaccttgttgcaactgatccagtaatctccttcaagacagcaatttggttttggatgacaccacagtctccaaagccctcatgccacaatgtcatcacaggaagatggtcaccttctggtgctgattcggcagctggccgggttccaggctatggtgtgttaacaaacatcatcaatggcgggcttgaatgcggtatggggtggaaatcacaggtggaggatcgtattgggttctacaagaggtactgtgatatactcggagttggctatggaagcaatcttgactgctacaaccaaagaccatttggaaatggacttttgaacttggttgacaccatgtga

SEQ ID NO: 217 - protein, 321 aa, Populus balsamifera subsp. trichocarpa
  misc_feature (74)..(304): Pfam Name: Glyco_hydro_19 Pfam Description: Chitinase class I
  misc_feature: Ceres Annot ID no. 1450642
  misc_feature: Bit score of 715.4 for HMM based on sequences of Figure 35
  misc_feature: Functional Homolog Of SEQ ID NO. 211
  misc_feature: in Figure 35
MKIWVFSVFSLLLSLFLGVSAEQCGRQAGGALCPGGQCCSQFGWCGNTDAYCSKGCQSQCGGGGGGGGGDLTSIISREKFNEMLKHRNDGGCPAKGFYTYDAFISAAKAFPGFGTTGDVATRKREIAAFFGQTSHETTGGWQTAPDGPYAWGYCYVREQNPGSYCAPSSTYPCAGGKQYYGRGPMQLSWNYNYGQCGKAIGVDLLNNPDLVATDPVISFKTAIWFWMTPQSPKPSCHNVITGRWSPSGADSAAGRVPGYGVLTNIINGGLECGMGWKSQVEDRIGFYKRYCDILGVGYGSNLDCYNQRPFGNGLLNLVDTM

SEQ ID NO: 218 - protein, 325 aa, Medicago truncatula
  misc_feature (72)..(303): Pfam Name: Glyco_hydro_19 Pfam Description: Chitinase class I
  misc_feature: Public GI ID no. 1781042
  misc_feature: Bit score of 727.4 for HMM based on sequences of Figure 35
  misc_feature: Functional Homolog Of SEQ ID NO. 211
  misc_feature: in Figure 35
MMMRLALVVTTAVLLVIIGCSFADECGKQAGGALCPGGLCCSKFGWCGSTGDYCGDGCQSQCSGSSGDLGSLISRDTFNNMLKHRDDSGCQGKRLYTYDAFISAAKAFPNFANNGDTATKKREIAAFLGQTSHETTGGWATAPDGPYAWGYCFVREQNPSSTYCQPSSEFPCASGKQYYGRGPIQISWNYNYGQCGRAIGVDLLNNPDLVATDPVISFKTALWFWMTPQSPKPSCHDVITGRWSPSSADRAAGRLPGYGTVTNIINGGLECGRGQDGRVQDRIGFYKRYCDILGVGYGDNLDCFSQRPFGSSLSLSSLFLNSIDT

SEQ ID NO: 219 - protein, 326 aa, Galega orientalis
  misc_feature (89)..(319): Pfam Name: Glyco_hydro_19 Pfam Description: Chitinase class I
  misc_feature: Public GI ID no. 33414050
  misc_feature: Bit score of 700.6 for HMM based on sequences of Figure 35
  misc_feature: Functional Homolog Of SEQ ID NO. 211
  misc_feature: in Figure 35
MRNTKFSSLILCLLVVSFFLGTKAEQCGSQANGAVCPNGLCCSQFGYCGNTDQYCGAGCQSQCKSSSTPTPTPTPSTPTPSTGGDVGRLIPSSLFDQMLKYRNDGRCPGHGFYTYDGFIAAARSFNGFGTTGDDNTRKKELAAFLAQTSHETTGGWATAPDGPYAWGYCFVSEQNAQGDFCTSGDWPCAPGKRYYGRGPIQITHNYNYGPAGKAIGEDLINNPDLVSTNPTVSFKTAIWFWMTPQGNKPSSHDVITGRWTPSSADNSAGRVPGYGVITNIINGGLECGHGQDPRVDDRVGFYRRYCQILGVSPGDNLDCNNQRPFA

SEQ ID NO: 220 - protein, 322 aa, Limonium bicolor
  misc_feature (85)..(315): Pfam Name: Glyco_hydro_19 Pfam Description: Chitinase class I
  misc_feature: Public GI ID no. 90287922
  misc_feature: Bit score of 724.3 for HMM based on sequences of Figure 35
  misc_feature: Functional Homolog Of SEQ ID NO. 211
  misc_feature: in Figure 35
MKTTLILTAAALPFLLLISFSSAEQCGSQAGGAVCPNGLCCSKYGWCGSTDTYCKDGCQSQCGGTTPTPTTPTPTPTQGGDVSSIISQSNFDEMLKHRNDNACSGHGFYTYAAFISAAQSFPGFGTTGDTDTRKRELAAFLGQTSHETTGGWAAAPDGPYAWGYCFVQEQGASGAFCTSPEYPCAPGKQYYGRGPIQLTHNYNYAQAGTAINQDLINNPDLVATDPTISFKTAIWFWMTPQSNKPSSHDVITGKWTPSSADSAAGRVPGYGVITNIINGGLECGKGSIAKQEDRIGFYKRYCDVLGVGYGNNLDCNSQRPFA

SEQ ID NO: 221 - DNA, 1024 bp, Zea mays
  misc_feature: Ceres Clone ID no. 1672778
  misc_feature: Encodes the peptide sequence at SEQ ID NO. 222
gagtggagtgggagagcgcgaagttaagccaccatgtggacgagggctttagcgatgatgctgttcgtggcaggcgccgcgctgctcggcgtcggcggcgccagcgcgcagcagggcgtgtggaacatcatcactcgtcccatgttccagagcatgctgagccaccgcggcgacagcgggtgccagggcgccttctacacctacgacgcgttcatcgaggccgccagcaagttccccggcttcggcaccaccggcgacgagcagacgcgcaggcgggagctcgccgccttcttcggccagacgtcccacgaaaccaccggtggatgggcgactgctcccggtggaccgtttgcctggggatactgccgggtgaaggaacagaacccgacggacccaccctactatggacgaggacccatacagctaactcatgagtacaactacaggctcgccgggcaagcgctgaacctgaacctggtgggcaacccggacatggtggcgagcgaccccgtggtagccttcaagacggccatctggttctggatgacgccgcagtcgcccaagccgtcgtgccacgccgtgatgaccggcgcctggacgccgtccgccaccgaccgcgccgccgggaggctccccggatatggcctcacctcgaacatcatcaacggcgggctagagtgcggcaagggccagtccaccgacggcgccaaggaccggggtggctactacaagaggtactgcgatatgctccgggtggggtacggggacaacgtgccctgcaaggaccagaagccttacggaggatgaggacgtggacaacaataattatatggttgctgcaagccttcacgtgtttttgttgcctctctaccaactaagaataaatcaagctagcagcaaacaggggcaacctgctaccttcggcatgtgtctacttatcatatagtgtgtctatgtatggcacagtatctcatctctggatgcatgataacgaactaatcaacggttagcagcattcaccttt

SEQ ID NO: 222 - protein, 257 aa, Zea mays
  misc_feature (32)..(249): Pfam Name: Glyco_hydro_19 Pfam Description: Chitinase class I
  misc_feature: Ceres Clone ID no. 1672778
  misc_feature: Bit score of 532.2 for HMM based on sequences of Figure 35
  misc_feature: Functional Homolog Of SEQ ID NO. 211
MWTRALAMMLFVAGAALLGVGGASAQQGVWNIITRPMFQSMLSHRGDSGCQGAFYTYDAFIEAASKFPGFGTTGDEQTRRRELAAFFGQTSHETTGGWATAPGGPFAWGYCRVKEQNPTDPPYYGRGPIQLTHEYNYRLAGQALNLNLVGNPDMVASDPVVAFKTAIWFWMTPQSPKPSCHAVMTGAWTPSATDRAAGRLPGYGLTSNIINGGLECGKGQSTDGAKDRGGYYKRYCDMLRVGYGDNVPCKDQKPYGG

SEQ ID NO: 223 - protein, 327 aa, Medicago sativa
  misc_feature (75)..(305): Pfam Name: Glyco_hydro_19 Pfam Description: Chitinase class I
  misc_feature: Public GI ID no. 1800141
  misc_feature: Bit score of 709.6 for HMM based on sequences of Figure 35
  misc_feature: Functional Homolog Of SEQ ID NO. 211
MLMKMRLALVTTVVLLIIGCSFAEQCGKQAGGALCPGGLCCSKFGWCGSTGEYCGDGCQSQCGGSSGGGGDLGSLISRDTFNNMLKHRDDSGCQGKGLYTYDAFISAAKAFPNFANNGDTATKKREIAAFLGQTSHETTGGWATAPDGPYAWGYCFVREQNPSTYCQPSSEFPCASGKQYYGRGPIQISWNYNYGQCGRAIGVDLLNNPDLVATDPVISFKTALWFWMTPQSPKPSCHDVITGRWSPSSADRAAGRLSGYGTVTNIINGGLECGRGQDGRVQDRIGFYKRYCDILGVGYGANLDCFSQRPFGSSLSLSSLFLNSIDT

SEQ ID NO: 224 - protein, 328 aa, Cicer arietinum
  misc_feature (72)..(302): Pfam Name: Glyco_hydro_19 Pfam Description: Chitinase class I
  misc_feature: Public GI ID no. 3892724
  misc_feature: Bit score of 684.5 for HMM based on sequences of Figure 35
  misc_feature: Functional Homolog Of SEQ ID NO. 211
MKMKLAIQFPILIVIVLVGWCWAEQCGKQAGGALCPGGLCCSKFGWCGSTSDYCGDGCQSQCGSGGGGVGSIISRDTFNQMLKHRDDSGCEGKGFYTYEAFIAAAKYFPDLGNNGDTATKKREIAAFLGQTSHETTGGWSSAPDGPYAWGYCFLREQNPSTYCQPSSEYPCASGKQYYGRGPIQLSWNYNYGQCGRAIGVDLLNNPDLVATDPVISFKTAIWFWMTPQSPKPSCHDVITGRWNPSTSDRAAGRLPGYGTVTNIINGGLECGRGHDSRVQDRIGFYKRYCDIFGIVYGDNIDCASQTPFASSLSFSSLLLQSKPSTPSQ

SEQ ID NO: 225 - DNA, 1143 bp, Triticum aestivum
  misc_feature: Ceres Clone ID no. 1319431
  misc_feature: Encodes the peptide sequence at SEQ ID NO. 226
ttcatccaaccatgtccacgctgagagcgcggtgtgcgacggccgtcctggccgtcgtcctggcggcggccgcggtcacgccggccacggccgagcagtgcggctcgcaagccggtggcgccaagtgcgccgactgcctgtgctgcagccagttcgggttctgcggcaccacctccgactactgcggcccccgctgccagagccagtgcactggctgcggtggcggcggcggcggggtggcctccatcgtgtccagggacctcttcgagcggttcctgctccatcgcaacgacgcagcgtgcctggcccgcgggttctacacgtacgacgccttcttggccgccgccggcgcgttcccggccttcggcaccaccggagacctggacacgcggaagcgggaggtggcggccttcttcggtcagacctctcacgagaccaccggcgggtggcccaccgcgcccgacggccccttctcatggggctactgcttcaagcaggagcagggctcgccgccgagctactgcgaccagagcgccgactggccgtgcgcacccggcaagcagtactatggccgcggccccatccagctcacccacaactacaactacggaccggcgggccgcgcaatcggggtggacctgctgaacaatccggacctggtggccacggacccgacagtggcgttcaagacggcgatatggttctggatgacgacgcagtccaacaagccgtcgtgccatgacgtgatcacggggctgtggactccgacggccagggatagcgcagccggacgggtacccgggtatggtgtcatcaccaacgtcatcaacggcgggatcgaatgcggcatggggcagaacgacaaggtggcggatcggatcgggttctacaagcgctattgtgacatcttcggcatcggctacgggaataacctcgactgctacaaccaattgtcgttcaacgttgggctcgcggcacagtgagatggtaagactatgggtccttgatatgcatgtgtggatgtgatcacacataaataaataatcttgggaagtactttatgaccaaataaatggatgaccagacctcccacgtgtgtaatggtacatttacgtcgatgaacggagaggaatcacctttatc

SEQ ID NO: 226 - protein, 323 aa, Triticum aestivum [sequence omitted]

SEQ ID NO: 227 - DNA, 1067 bp, Triticum aestivum
  misc_feature: Ceres Clone ID no. 1074387
  misc_feature: Encodes the peptide sequence at SEQ ID NO. 228
attcatccaaccatgtccacgctgagagcgcggtgtgcgacggccgtcctggccgtcgtcctggcggcggccgcggtcacgccggccacggccgagcagtgcggctcgcaagccggcggcgccaagtgcgccgactgcctgtgctgcagccagttcgggttctgcggcaccacctccgactactgcggcccccgctgccagagccagtgcactggctgcggtggcggcggcggcggggtggcctccatcgtgtccagggacctcttcgagcggttcctgttccatcgcaacgacgcagcgtgcctggcccgcgggttctacacgtacgacgccttcttggccgccgccggcgcgttcccggccttcggcaccaccggagacctggacacgcggaagcgggaggtggcggccttcttcggccagacctctcacgagaccaccggcgggtggcccaccgcgcccgacggccccttctcatggggctactgcttcaagcaggagcagggctcgccgccgagctactgcgaccagagcgccgactggccgtgcgcacccggcaagcagtactatggccgcggccccatccagctcacccacaactacaactacggaccggcgggccgcgcaatcggggtggacctgctgaacaatccggacctggtggccacggacccgacagtggcgttcaagacggcgatatggttctggatgacgacgcagtccaacaagccgtcgtgccatgacgtgatcacggggctgtggactccgacggccagggatagcgcagccggacgggtacccgggtatggtgtcatcaccaacgtcatcaacggcgggatcgaatgcggcatggggcagaacgacaaggtggcggatcggatcgggttctacaagcgctattgtgacatcttcggcatcggctacgggaataacctcgactgctacaaccaattgtcgttcaacgttgggctcgcggcacagtgagatggtaagactatgggtccttgatatgcatgtgtggatgtgatcacacataaataaataatcttgggaagtactttatgacc

SEQ ID NO: 228 - protein, 323 aa, Triticum aestivum
  misc_feature (79)..(310): Pfam Name: Glyco_hydro_19 Pfam Description: Chitinase class I
  misc_feature: Ceres Clone ID no. 1074387
  misc_feature: Bit score of 608.6 for HMM based on sequences of Figure 35
  misc_feature: Functional Homolog Of SEQ ID NO. 211
MSTLRARCATAVLAVVLAAAAVTPATAEQCGSQAGGAKCADCLCCSQFGFCGTTSDYCGPRCQSQCTGCGGGGGGVASIVSRDLFERFLFHRNDAACLARGFYTYDAFLAAAGAFPAFGTTGDLDTRKREVAAFFGQTSHETTGGWPTAPDGPFSWGYCFKQEQGSPPSYCDQSADWPCAPGKQYYGRGPIQLTHNYNYGPAGRAIGVDLLNNPDLVATDPTVAFKTAIWFWMTTQSNKPSCHDVITGLWTPTARDSAAGRVPGYGVITNVINGGIECGMGQNDKVADRIGFYKRYCDIFGIGYGNNLDCYNQLSFNVGLAAQ

SEQ ID NO: 229 - protein, 320 aa, Pisum sativum
  misc_feature (83)..(313): Pfam Name: Glyco_hydro_19 Pfam Description: Chitinase class I
  misc_feature: Public GI ID no. 544015
  misc_feature: Bit score of 669.0 for HMM based on sequences of Figure 35
  misc_feature: Functional Homolog Of SEQ ID NO. 211
MKRTLKVSFFILCLLPLFLGSKAEQCGSQAGGAVCPNGLCCSKFGFCGSTDPYCGDGCQSQCKSSPTPTIPTPSTGGGDVGRLVPSSLFDQMLKYRNDGRCAGHGFYTYDAFIAAARSFNGFGTTGDDNTKKKELAAFLAQTSHETTGGWPTAPDGPYAWGYCFVSEQNTQEVYCSPKDWPCAPGKKYYGRGPIQLTHNYNYGLAGQAIKEDLINNPDLLSTNPTVSFKTAIWFWMTPQANKPSSHDVITGRWTPSAADSSAGRVPGYGVITNIINGGIECGHGQDNRVDDRVGFYKRYCQIFGVDPGGNLDCNNQRSFA

SEQ ID NO: 230 - DNA, 957 bp, Populus balsamifera subsp. trichocarpa
  misc_feature: Ceres Annot ID no. 1513807
  misc_feature: Encodes the peptide sequence at SEQ ID NO. 231
atgaagatgtgggtcttcacggttttctctctattgctgtcccttttactaggaggctcagctgagcagtgtggaagccaggccgggggtgccctgtgtccgggaggtctatgttgtagccaatttggttggtgtggcagcactaatgattactgtggtaacggctgccaaagccagtgcggtggtgcgagcggaggagaccttggcagtatcatctcaagtgagaagtttgatgagatgcttaaacatagaaatgatggtggatgccctggcaagggattctacacttacagtgctttcatctcagctgccaatgccttccctggctttggcactactggtgatgctgacactcgtaaaagggagatcgctgctttcttgggccaaacctctcatgaaactactggagggtggcaaactgcacctgatggtccatacgcttggggatattgctttgtcaaggaacaaaatcctggatcttattgttctccaagttccacatatccatgtgctgatggcaagcaatattatggcagaggtcctgtccagctttcatggaactacaactacgggcagtgtggaaaagctataggagtggatctattaaacaatcctgaccttgttgcaaccgatccagtaatttccttcaagacagcaatttggttttggatgacagcacagtctccaaagccctcatgccacagtgtcatcactgggaattggtcaccttccggtgctgattcggcagctggtcgggttccaggctacggtgtgttaacaaacattatcaatggcgggcttgaatgtggtatggggtggaagcaacaggtggaggatcgtattgggttctacaagaggtactgtgacttgcttggagttggatatggaaacaatctggactgctacaaccaaaagtcatttgcaaatggactcttggacatggtagactccatgtaa

SEQ ID NO: 231 - protein, 316 aa, Populus balsamifera subsp. trichocarpa
  misc_feature (69)..(299): Pfam Name: Glyco_hydro_19 Pfam Description: Chitinase class I
  misc_feature: Ceres Annot ID no. 1513807
  misc_feature: Bit score of 691.2 for HMM based on sequences of Figure 35
  misc_feature: Functional Homolog Of SEQ ID NO. 211
MWVFTVFSLLLSLLLGGSAEQCGSQAGGALCPGGLCCSQFGWCGSTNDYCGNGCQSQCGGASGGDLGSIISSEKFDEMLKHRNDGGCPGKGFYTYSAFISAANAFPGFGTTGDADTRKREIAAFLGQTSHETTGGWQTAPDGPYAWGYCFVKEQNPGSYCSPSSTYPCADGKQYYGRGPVQLSWNYNYGQCGKAIGVDLLNNPDLVATDPVISFKTAIWFWMTAQSPKPSCHSVITGNWSPSGADSAAGRVPGYGVLTNIINGGLECGMGWKQQVEDRIGFYKRYCDLLGVGYGNNLDCYNQKSFANGLLDMVDSM

SEQ ID NO: 232 - protein, 326 aa, Limonium bicolor [sequence omitted]

SEQ ID NO: 233 - protein, 317 aa, Musa acuminata
  misc_feature (79)..(310): Pfam Name: Glyco_hydro_19 Pfam Description: Chitinase class I
  misc_feature: Public GI ID no. 17932712
  misc_feature: Bit score of 655.0 for HMM based on sequences of Figure 35
  misc_feature: Functional Homolog Of SEQ ID NO. 211
MPRAAGIRHEVIFTLASSLGAFAEQCGRQAGGALCPGGLCCSQFGWCGNTDPYCGKDCQSQCGGSGGSGGGSGGSVGSIISSSLFEQMLKHRNDAACPGKGFYTYNAFIAAANSFSGFGTTGDDATKKREIAAFLAQTSHETTGGWATAPDGPYAWGYCFVQEQNPPSDYCVASSQWPCAAGKKYYGRGPIQISFNYNYGPAGRAIGSDLLNNPDLVATDATISFKTALWFWMTPQSPKPSCHDVITGRWTPSNADRAAGRLPGYGVTTNIINGGLECGKGSDARVADRIGFYKRYCDLLGVSYGDNLDCYNQSPFT

SEQ ID NO: 234 - protein, 316 aa, Humulus lupulus
  misc_feature (79)..(309): Pfam Name: Glyco_hydro_19 Pfam Description: Chitinase class I
  misc_feature: Public GI ID no. 4960049
  misc_feature: Bit score of 595.6 for HMM based on sequences of Figure 35
  misc_feature: Functional Homolog Of SEQ ID NO. 211
MKKWCIIVLMSFLVGGALAEQCGRQAGGALCPNGLCCSQHGWCGTTSDYCAAGCQSQCSSTTPTPSGGGGGGSGDVSSVISSALFEEMLKHRNDGGCPGRGFYTYDAFLTAARSFNGFGTTGDDATRKREIAAFFGQTSHETTGGWGDAPDGPYAWGYCFVSEKDQKVNCDPNRGPCAPGKSYYGRGPIQLTHNYNYNLAGQALRVDLLNDPDRVATDAVVSFKTAIWFWMTPQANKPSSHDVIIGRWSPSQADLSARRAPAGYGVITNIINGGVECGKGPVDTVKSRIGFYQRYCGIFGVGLGTNLDCYNQTPFG

SEQ ID NO: 235 - protein, 326 aa, Galega orientalis
  misc_feature (76)..(306): Pfam Name: Glyco_hydro_19 Pfam Description: Chitinase class I
  misc_feature: Public GI ID no. 33414052
  misc_feature: Bit score of 692.0 for HMM based on sequences of Figure 35
  misc_feature: Functional Homolog Of SEQ ID NO. 211
MKMRLAIIQFPILLIIVTILVGSCWAEQCGRQAGGALCPGGLCCSKFGWCGSTGDYCGDGCQSQCSGSAAGGLGSIISRDTFNQMLKHRDDNACQGKGFYSYDAFISAAKAFPNFGNNGDTATKKREVAAFLGQTSHETTGGWPTAPDGPYAWGYCFLREQNPSDYCQSSSQFPCASGKKYYGRGPIQISWNYNYGPCGRAIGVDLLNNPDLVATDPVISFKTALWFWMTPQSPKPSCHDVITGGWKPSSADRAAGRLPGYGAVTNIINGGLECGRGQDSRVQDRIGFYKRYCDIFGIGYGDNLDCGSQRPFGSSLSLSSLLLDTI

SEQ ID NO: 236 - protein, 312 aa, Euonymus europaeus
  misc_feature (70)..(297): Pfam Name: Glyco_hydro_19 Pfam Description: Chitinase class I
  misc_feature: Public GI ID no. 30844174
  misc_feature: Bit score of 628.4 for HMM based on sequences of Figure 35
  misc_feature: Functional Homolog Of SEQ ID NO. 211
MRFWVFTILSLSLSVLGSAEQCGRQAGGALCPGGQCCSQYGWCGTTNEYCGQGCQSQCGGSGGGGDIGGIISRDRFNGILKHRNDNACEGKGFYSYDAFLTAAKAYPAFGTTGDDATRKREIAAFLAQTSHETTGGWPSAPDGPYSWGYCFVRERNPPSSYCDPNYPCPKQYYGRGPLQLSWNYNYAQAGRAIGVDLINNPDLVATDAVISFKTAIWFWMTAQSPKPSCHDVITGSWRPSGADTAAGRVSGYGVITNIINGGIECGKGQNPQVEDRIGFFRRYCQILGTGTGNNLDCYNQRPFGARLLLDTI

SEQ ID NO: 237 - protein, 328 aa, Solanum tuberosum
  misc_feature (82)..(313): Pfam Name: Glyco_hydro_19 Pfam Description: Chitinase class I
  misc_feature: Public GI ID no. 116349
  misc_feature: Bit score of 622.2 for HMM based on sequences of Figure 35
  misc_feature: Functional Homolog Of SEQ ID NO. 211
MRRHKEVNFVAYLLFSLLVLVSAALAQNCGSQGGGKACASGQCCSKFGWCGNTNDYCGSGNCQSQCPGGGPGPGPGGDLGSAISNSMFDQMLKHRNENSCQGKNFYSYNAFINAARSFPGFGTSGDINARKREIAAFFAQTSHETTGGWASAPDGPYAWGYCFLRERGNPGDYCPPSSQWPCAPGRKYFGRGPIQISHNYNYGPCGRAIGVDLLNNPDLVATDPVISFKTALWFWMTPQSPKPSCHDVIIGRWNPSSADRAANRLPGFGVITNIINGGLECGRGTDNRVQDRIGFYRRYCSILGVTPGDNLDCVNQRWFGNALLVDTL

SEQ ID NO: 238 - protein, 320 aa, Glycine max
  misc_feature (84)..(313): Pfam Name: Glyco_hydro_19 Pfam Description: Chitinase class I
  misc_feature: Public GI ID no. 6573210
  misc_feature: Bit score of 657.7 for HMM based on sequences of Figure 35
  misc_feature: Functional Homolog Of SEQ ID NO. 211
MKNMKLCSVMLCLSLAFLLGATAEQCGTQAGGALCPNRLCCSKFGWCGDTDSYCGEGCQSQCKSATPSTPTPTTPSSGGDISRLISSSLFDQMLKYRNDGRCSGHGFYRYDAFIAAAGSFNGFGTTGDDNTRKKEIAAFLAQTSHETTGGWASAPDGPYAWGYCFINEQNQATYCDGGNWPCAAGKKYYGRGPIQLTHNYNYGQAGKALGLDLINNPDLVATDATVSFKTALWFWMTAQGNKPSSHDVITGRWTPSSADSSAGRAPGYGVITNIINGGLECGHGQDNRVQDRIGFYRRYCQMMGISPGDNLDCNNQRPFA

SEQ ID NO: 239 - protein, 329 aa, Nicotiana tabacum
  misc_feature (83)..(314): Pfam Name: Glyco_hydro_19 Pfam Description: Chitinase class I
  misc_feature: Public GI ID no. 116314
  misc_feature: Bit score of 648.3 for HMM based on sequences of Figure 35
  misc_feature: Functional Homolog Of SEQ ID NO. 211
MRLCKFTALSSLLFSLLLLSASAEQCGSQAGGARCPSGLCCSKFGWCGNTNDYCGPGNCQSQCPGGPTPTPPTPPGGGDLGSIISSSMFDQMLKHRNDNACQGKGFYSYNAFINAARSFPGFGTSGDTTARKREIAAFFAQTSHETTGGWATAPDGPYAWGYCWLREQGSPGDYCTPSGQWPCAPGRKYFGRGPIQISHNYNYGPCGRAIGVDLLNNPDLVATDPVISFKSALWFWMTPQSPKPSCHDVIIGRWQPSAGDRAANRLPGFGVITNIINGGLECGRGTDSRVQDRIGFYRRYCSILGVSPGDNLDCGNQRSFGNGLLVDTM

SEQ ID NO: 240 - protein, 322 aa, Brassica napus
  misc_feature (74)..(305): Pfam Name: Glyco_hydro_19 Pfam Description: Chitinase class I
  misc_feature: Public GI ID no. 584928
  misc_feature: Bit score of 661.1 for HMM based on sequences of Figure 35
  misc_feature: Functional Homolog Of SEQ ID NO. 211
MKSCLLLFLIFSFLLSFSLAEQCGRQAGGALCPNGLCCSEFGWCGDTEAYCKQPGCQSQCGGTPPGPTGDLSGIISRSQFDDMLKHRNDNACPARGFYTYDAFINAAKSFPGFGTTGDTATRKKEIAAFFGQTSHETTGGWATAPDGPYSWGYCFKQEQNPSSNYCSPSAEWPCASGKSYYGRGPMQLSWNYNYGQCGRAIGSDLLNNPDLVSNDPVIAFKAAIWFWMTPQSPKPSCHAVIVGQWQPSDADRAAGRVPGYGVITNIINGGLECGRGQDARVADRIGFYQRYCNILGVNPGGNLDCYNQRSFASVNFFLDAAI

SEQ ID NO: 241 - DNA, 1346 bp, Gossypium hirsutum
  misc_feature: Ceres Clone ID no. 1851776
  misc_feature: Encodes the peptide sequence at SEQ ID NO. 242
acaaaatccacaccaagtatcaatggatgtaaaaatgttgtatggtcttttgactttaactagtctagcaattctcttgcaaggcctaggaacatccgcacaacagtgcggaagacaagcaggaggtgcactctgtgcaaacagactgtgttgcagccaatttgggtggtgtggcatcacacctgagtactgtggaactggctgccagagccagtgtggtggctccactccaacccctagtggtgggagtggtgttggcagcattatcactcgagacctttttaatcaaatgcttaagtatcgaaatgatccaagatgtcccagcaatggtttctatacttatgatgctttcattactgctgctcgatcttttaatggatttggcacaaccggagaccttgcaaccagaaagagagagctcgcagctttctttggtcaaacctctcatgaaacaacaggtggatggccaactgcaccggatggtccgtatgcatggggatactgctttattagggaacaaaacaaccctggtgcttattgtactcttggctcttggccatgcgctcccggcagacagtattttggacgaggacccattcaattgactcacaactacaactatggaccagctggaagagccattggagaagatttgataaataatccggaccttgtagccacgaacgcaatattatcctttaagacagccatatggttttggatgactccacagggaaacaaaccgtcatgccatagcgtaatcatcgggggatggagaccgtcgggtgcggacacggcagcaggccgggtccctggttatggagtcatcactaacataattaatggtgggctagagtgcggtcgtggtcctgataacagggtggctagcaggattggtttctacaggaggtactgtgacatcttgggtataaacaccggaagcaacttggattgcaataaccaaaggccttttggctgaattgtgaattgcactccaacagaataaagtcactattgagtggaagttaataaacaaatcaacaggagattaattagttaacggagtttctaaaccattgtctaatcaattttaaaataaaaggaaaattagatttcgaaaattttgatgtgaccgttgaatatctaaccaccattaaagttaactaacttgcaacgaatcatctttatagttagtttgtgtttccccgtctctctcctaagctttgagctcactcaacaaactggttagaatctcaaatacccaatgtaaatatttcttttttaaaattgagtcactttttatgtaatttatccaaattgaaattttaccatttatattgacatac

SEQ ID NO: 242 - protein, 314 aa, Gossypium hirsutum
  misc_feature (77)..(307): Pfam Name: Glyco_hydro_19 Pfam Description: Chitinase class I
  misc_feature: Ceres Clone ID no. 1851776
  misc_feature: Bit score of 627.4 for HMM based on sequences of Figure 35
  misc_feature: Functional Homolog Of SEQ ID NO. 211
MLYGLLTLTSLAILLQGLGTSAQQCGRQAGGALCANRLCCSQFGWCGITPEYCGTGCQSQCGGSTPTPSGGSGVGSIITRDLFNQMLKYRNDPRCPSNGFYTYDAFITAARSFNGFGTTGDLATRKRELAAFFGQTSHETTGGWPTAPDGPYAWGYCFIREQNNPGAYCTLGSWPCAPGRQYFGRGPIQLTHNYNYGPAGRAIGEDLINNPDLVATNAILSFKTAIWFWMTPQGNKPSCHSVIIGGWRPSGADTAAGRVPGYGVITNIINGGLECGRGPDNRVASRIGFYRRYCDILGINTGSNLDCNNQRPFG

SEQ ID NO: 243 - DNA, 1161 bp, Triticum aestivum
  misc_feature: Ceres Clone ID no. 862325
  misc_feature: Encodes the peptide sequence at SEQ ID NO. 244
atcccgcagccagcagccatgtccgcgctgagagcaccgtgtgcgacggccatcttggccgtcgtcctggcggcggccgcggtggagctggctacggcccagcagtgcggctcgcaggccggcggcgccaagtgcgccaactgcctctgctgcagccaattcgggttctgcggcagcacctccgactactgcggtggcggttgccagagccagtgcaatggctgcggcggcagcggcggtggggttgcatccatcgtttccagggacctcttcgatcggttcctcctccatcgcaacgacgcggcgtgcctggcccgcgggttctacacctacgacgccttcttggccgccgccagcgcgttcccggccttctgcaccacgggagacttggacacgcggaaacgagaggtggcggccttcttcggccagacctctcacgagaccaccggcgggtgggccaccgcacccgacggccccttctcatggggctactgcttcaagcaggagaagagtccgccggaaagctactgcagccagagcgccgactggccgtgcgcgcccggcaagcagtactacggccgcggccccattcagctcacttacaattacaactatggatcggtgggccgcgcaatcggggtggacctgttgaacaacccggacctggtggccacggacccgacggtggcgttcaagacggccatctggttctggatgaccacacagtcaaacaagccgtcatgccatgacgtgatcacagggttgtggaggccgacggctagggacagcgcagcgggacgggtacccgggtacggcgtgatcaccaatgtcatcaacggcgggatcgaatgcggcaaggggcagaacgacaaggtggccgatcggatcggattctacaagcgctattgtgacatcttcggcatcggctacgggaataacctcgactgctacaaccaattgtcgttcaacatcgggctcgcggtacagtgagatcgaaaaactatgggtcctcgatctatgaatgtgtggatgtgatcacccataaataaattatcttgggaagtactttatgaccaaataaatggatgaccagacctcccggacacctgtactagtttatgtatgttgatgcacggaaaggaagtgtcaccaccttttatc

SEQ ID NO: 244 - protein, 323 aa, Triticum aestivum
  misc_feature (79)..(310): Pfam Name: Glyco_hydro_19 Pfam Description: Chitinase class I
  misc_feature: Ceres Clone ID no. 862325
  misc_feature: Bit score of 614.2 for HMM based on sequences of Figure 35
  misc_feature: Functional Homolog Of SEQ ID NO. 211
MSALRAPCATAILAVVLAAAAVELATAQQCGSQAGGAKCANCLCCSQFGFCGSTSDYCGGGCQSQCNGCGGSGGGVASIVSRDLFDRFLLHRNDAACLARGFYTYDAFLAAASAFPAFCTTGDLDTRKREVAAFFGQTSHETTGGWATAPDGPFSWGYCFKQEKSPPESYCSQSADWPCAPGKQYYGRGPIQLTYNYNYGSVGRAIGVDLLNNPDLVATDPTVAFKTAIWFWMTTQSNKPSCHDVITGLWRPTARDSAAGRVPGYGVITNVINGGIECGKGQNDKVADRIGFYKRYCDIFGIGYGNNLDCYNQLSFNIGLAVQ

SEQ ID NO: 245 - protein, 317 aa, Ulmus pumila
  misc_feature (71)..(302): Pfam Name: Glyco_hydro_19 Pfam Description: Chitinase class I
  misc_feature: Public GI ID no. 67867096
  misc_feature: Bit score of 675.7 for HMM based on sequences of Figure 35
  misc_feature: Functional Homolog Of SEQ ID NO. 211
MRFWALTTLSLLLSIIQVAWADQCGSQAGGAVCPGGLCCSKFGWCGNTNEYCGDGCQSQCGSGTGGDIGGLISSSAFNDMLKHRNDGGCPAKGFYTYDAFIAAAKAFPAFGTTGDDATRKREIAAFLGQTSHETTGGWASAPDGPYSWGYCFNREQNPSSDYCSSSPTWPCASGKRYFGRGPIQLSWNYNYGQCGRAIGADLLNNPDLVATDPVISFKTALWFWMTPQSPKPSCHDVITGRWSPSGTDQSAGRVAGYGMITNIINGGIECGKGQVPQVEDRIGFYKRYCDILKGGYGNNLDCYNQRPFGNGLLLDTM

SEQ ID NO: 246 - protein, 324 aa, Nicotiana tabacum
  misc_feature (78)..(309): Pfam Name: Glyco_hydro_19 Pfam Description: Chitinase class I
  misc_feature: Public GI ID no. 116321
  misc_feature: Bit score of 647.7 for HMM based on sequences of Figure 35
  misc_feature: Functional Homolog Of SEQ ID NO. 211
MRLREFTALSSLLFSLLLLSASAEQCGSQAGGARCASGLCCSKFGWCGNTNDYCGPGNCQSQCPGGPTPPGGGDLGSIISSSMFDQMLKHRNDNACQGKGFYSYNAFINAARSFPGFGTSGDTTARKREIAAFFAQTSHETTGGWATAPDGPYAWGYCWLREQGSPGDYCTPSGQWPCAPGRKYFGRGPIQISHNYNYGPCGRAIGVDLLNNPDLVATDPVISFKSALWFWMTPQSPKPSCHDVIIGRWQPSSADRAANRLPGFGVITNIINGGLECGRGTDSRVQDRIGFYRRYCSILGVSPGDNLDCGNQRSFGNGLLVDTM

SEQ ID NO: 247 - protein, 324 aa, Nicotiana sylvestris
  misc_feature (78)..(309): Pfam Name: Glyco_hydro_19 Pfam Description: Chitinase class I
  misc_feature: Public GI ID no. 11558417
  misc_feature: Bit score of 647.6 for HMM based on sequences of Figure 35
  misc_feature: Functional Homolog Of SEQ ID NO. 211
MRLREFTALSSLLFSLLLLSASAEQCGSQAGGARCASGLCCSKFGWCGNTNDYCGPGNCQSQCPGGPTPPGGGDLGSIISSSMFDQMLKHRNDNACQGKGFYSYNAFINAARSFPGFGTSGDTTARKREIAAFFAQTSHETTGGWATAPDGPYAWGYCWLREQGSPGDYCTSSGQWPCAPGRKYFGRGPIQISHNYNYGPCGRAIGVDLLNNPDLVATDPVISFKSALWFWMTPQSPKPSCHDVIIGRWQPSSADRAANRLPGFGVITNIINGGLECGRGTDSRVQDRIGFYRRYCSILGVSPGDNLDCGNQRSFGNGLLVDTM

SEQ ID NO: 248 - protein, 317 aa, Elaeagnus umbellata
  misc_feature (71)..(302): Pfam Name: Glyco_hydro_19 Pfam Description: Chitinase class I
  misc_feature: Public GI ID no. 3126965
  misc_feature: Bit score of 647.1 for HMM based on sequences of Figure 35
  misc_feature: Functional Homolog Of SEQ ID NO. 211
MKLWVVTIIVSSLLFFTIQRSRAEQCGNQAGGKVCPGGQCCSQYGWCGTTDEYCKKGCQSKCGGASGIESVISSNIFNQMLKHRNDGACKAKGFYTYDAFIKAAKAFPNFGTTGNDATRKKEIAAFFGQTSHETTGWDGPSAPDGPYAWGYCYVREQNPSAYCSPNPTYPCASGKQYYSRGPMQLSWNYNYGQCGRAIGVDLLRNPDLVATDPVVSFKTAIWFWMTPQSPKPSCHDVITGRWKPSGADQSAGRVAGYGTITNIINGGLECGKGRNPQVEDRIGFYKRYCDILKVGYGNNLDCYNQRPFGSGLLVDTM

SEQ ID NO: 249 - protein, 325 aa, Vitis vinifera
  misc_feature (87)..(318): Pfam Name: Glyco_hydro_19 Pfam Description: Chitinase class I
  misc_feature: Public GI ID no. 10880381
  misc_feature: Bit score of 633.1 for HMM based on sequences of Figure 35
  misc_feature: Functional Homolog Of SEQ ID NO. 211
MKIWGLRFFPLMLLAIGGAFAQEQCGRQAGGALCSGGLCCSQYGYCGSTSAYCSTGCQSQCPSGGSPSTPSTPTPTPSGGGGDISSLISKSLFDEMLKHRNDAACPGKGFYTHEAFISAVKSFGGFGTTGDTNTRKREIAAFLAQTSHETTGGWATAPDGPYAWGYCFLREQGNPGDYCVANQQWPCAPGKKYYGRGPIQISYNYNYGPAGKAINYDLLNNPDAVATDPTISFKTALWFWMTPQSPKPSCHSVITGQWTPSSSDTSAGRVPGYGLITNIINGGIECGKGSNPQMEDRIGFYKRYCDLMGIGYGSNLDCNNQRPFS

SEQ ID NO: 250 - protein, 328 aa, Nicotiana tabacum
  misc_feature (82)..(313): Pfam Name: Glyco_hydro_19 Pfam Description: Chitinase class I
  misc_feature: Public GI ID no. 256133
  misc_feature: Bit score of 644.8 for HMM based on sequences of Figure 35
  misc_feature: Functional Homolog Of SEQ ID NO. 211
MRLCKFTALSSLLFSLLLLSASAEQCGSQAGGARCPSGLCCSKFGWCGNTNDYCGPGNCQSQCPGGPTPTPPHPTRCDLGSIISSSMFDQMLKHRNDNACQGKGFYSYNAFINAARSFPGFGTSGDTTARKREIAAFFAQTSHETTGGWATAPDGPYAWGYCWLREQGSPGDYCTPSGQWPCAPGRKYFGRGPIQISHNYNYGPCGRAIGVDLLNNPDLVATDPVISFKSALWFWMTPQSPKPSCHDVIIGRWQPSAGDRASNRLPGFGVITNIINGGLECGRGTDSRVQDRIGFYRRYCSILGVSPGDNLDCGNQRSFGNGLLVDTM

SEQ ID NO: 251 - protein, 324 aa, Pisum sativum
  misc_feature (71)..(301): Pfam Name: Glyco_hydro_19 Pfam Description: Chitinase class I
  misc_feature: Public GI ID no. 1705807
  misc_feature: Bit score of 680.3 for HMM based on sequences of Figure 35
  misc_feature: Functional Homolog Of SEQ ID NO. 211
MSKLRIPILLVLFIVSCCSAEQCGTQAGGALCPGGLCCSKFGWCGSTSEYCGDGCQSQCSGSSGGGTLSSLISGDTFNNMLKHRNDNACQGKPFYTYDAFLSAAKAFPNFANKGDTATKKREIAAFLGQTSHETTGGWPTAPDGPYAWGYCFLREQNPSTYCQASSEFPCASGKQYYGRGPIQISWNYNYGQCGRAIGVDLLNNPDLVATDPVISFKTALWFWMTPQSPKPSCHDVITGGWTPSSADRAAGRLPGYGTVTNIINGGLECGRGQDSRVQDRIGFYKRYCDIFGIGYGDNLDCYSQRPFGSSLPLSSILLDTVAAA

SEQ ID NO: 252 - protein, 312 aa, Euonymus europaeus
  misc_feature (70)..(297): Pfam Name: Glyco_hydro_19 Pfam Description: Chitinase class I
  misc_feature: Public GI ID no. 30844172
  misc_feature: Bit score of 623.1 for HMM based on sequences of Figure 35
  misc_feature: Functional Homolog Of SEQ ID NO. 211
MRFWVFTILSLSLSVLGSAEQCGRQAGGALCPGGQCCSQYGWCGTTNEYCGQGCQSQCGGSGGGGDIGGIISRDRFNDILKHRNDNACEGKGFYSHDAFLTAAKAYPAFGTTGDDATRKREIAAFLAQTSHETTGGWPSAPDGPYSWGYCFVRERNPPSSYCDPNYPCPKQYYGRGPLQLSWNYNYAQAGRAIGVDLINNPDLVATDAVISFKTAIWFWMTAQSPKPSCHDVIIGSWRPSGADTAAGRVSGYGVITNIINGGIECGKGQNPQVEDRIGFFRRYCQILGTGTGNNLDCYNQRPFGARLLLDTI

SEQ ID NO: 253 - DNA, 1226 bp, Triticum aestivum
  misc_feature: Ceres Clone ID no. 705065
  misc_feature: Encodes the peptide sequence at SEQ ID NO. 254
atcaggcaccacccaagatcgatcatgaagccatacatgcccacggtactgagaccccctagggtggtggccatcctggccgtggtcctggcggcggcgctcgccacagccgtgaacgctcagcagtgcggctcccaggctggtggcgcgacgtgcgcaaactgtctctgctgcagcaaattcgggtactgcggcagcggcgacgcctactgcggtgccggctgtcagagccagtgcagcggctgcggccccacccctcccggccccagccccggcgggggcgtgtcgtccatcatctccagggacctcttcgagcggctccttcttcaccgcaatgactgccaagaggcccgcgggttctacacgtacgacgccttcctcgccgccgccgccgcgttcccgtcattcggcaccacggggagcacggagacgcggaagcgggaggtggcggccttcctggggcaaacttcccacgagaccactggcgggtggcccgcggcgcccgacggaccgtacgcctggggctactgcttcaagcaggagcagggctcgccgggaagctactgcgagccaaagccggagtggccgtgcgcgtcgggcaagaaatactacggtcgcggccccatccagctctcatggaactacaactatggccccgcggggcgtgccatcggggtggacctgctcaacaacccggacctggtcgccgcggacgcgacggtgtcgtttaagacggcgttatggttttggatgacggctcaggcgaacaagccgtcgtcccatgccgtgatcacaggccaatggaccccgtcgggcacggacaacgctgctggtcgggtgcctgggtacggtgtcatcaccaacataatcaacggcgggctcgagtgcggtagggggcaagatgaccgtgttgctaaccggatcgggttctacaagcgctactgcgatgtcctcggcgttggctatggtaacaacctcgactgctacaaccagaggccgtttaacagtgggctctcgatggggcttgccactgagtgacaacatactaagactgtgagcgagtcctccatgcatggatgtatgaatgtgatcacccataaataagcttgagaagtactgtttgggtaaatttcccattgttgtgtgagtatctctcgactcggtgtagaggttgagaatgttgcatctttattaaaaggactttgctacacctacgtaatttagct

SEQ ID NO: 254 - protein, 333 aa, Triticum aestivum
  misc_feature (86)..(316): Pfam Name: Glyco_hydro_19 Pfam Description: Chitinase class I
  misc_feature: Ceres Clone ID no. 705065
  misc_feature: Bit score of 614.8 for HMM based on sequences of Figure 35
  misc_feature: Functional Homolog Of SEQ ID NO. 211
MPTVLRPPRVVAILAVVLAAALATAVNAQQCGSQAGGATCANCLCCSKFGYCGSGDAYCGAGCQSQCSGCGPTPPGPSPGGGVSSIISRDLFERLLLHRNDCQEARGFYTYDAFLAAAAAFPSFGTTGSTETRKREVAAFLGQTSHETTGGWPAAPDGPYAWGYCFKQEQGSPGSYCEPKPEWPCASGKKYYGRGPIQLSWNYNYGPAGRAIGVDLLNNPDLVAADATVSFKTALWFWMTAQANKPSSHAVITGQWTPSGTDNAAGRVPGYGVITNIINGGLECGRGQDDRVANRIGFYKRYCDVLGVGYGNNLDCYNQRPFNSGLSMGLATE

SEQ ID NO: 255 - protein, 333 aa, Oryza sativa
  misc_feature (88)..(319): Pfam Name: Glyco_hydro_19 Pfam Description: Chitinase class I
  misc_feature: Public GI ID no. 38261495
  misc_feature: Bit score of 625.7 for HMM based on sequences of Figure 35
  misc_feature: Functional Homolog Of SEQ ID NO. 211
MKATTTAVALLVAAAAMVAQVVAEQCGSQAGGALCPNCLCCSSYGWCGSTSDYCGDGCQSQCDGCGGGGGGGGGGGGGGGGGGAVEAVVSKELFEQLLLHRNDAACPARGFYTYDAFVTAAAAFPEFAATGDDEARKREVAAFLGQTSHETTGGWATAPDGPYSWGYCFKEEIGATASYCVASAEWPCAPDKKYFGRGPIQLSYNYNYGPAGEAIGEDLLNNPELVASDPVVSFKTALWFWMTPQSPKPSCHDVITGQWTPSSGDIAAGRVPGYGVITNIINGGLECGFGPDDRVANRIGFYQRYCDVLGIGYGSNLDCYDQRPFNSGLAAVQ

SEQ ID NO: 256 - protein, 318 aa, Musa acuminata
  misc_feature (72)..(303): Pfam Name: Glyco_hydro_19 Pfam Description: Chitinase class I
  misc_feature: Public GI ID no. 17932710
  misc_feature: Bit score of 670.3 for HMM based on sequences of Figure 35
  misc_feature: Functional Homolog Of SEQ ID NO. 211
MKALLLVIFTLASSLGAFAEQCGRQAGGALCPGGLCCSQYGWCGNTDPYCGQGCQSQCGGSGGSGGGSVASIISSSLFEQMLKHRNDAACPGKGFYTYNAFIAAANSFSGFGTTGDDAKKKREIAAFLAQTSHETTGGWATAPDGPYAWGYCFVQEQNPSSDYCVASSQWPCAAGKKYYGRGPIQISFNYNYGPAGRAIGSDLLNNPDLVATDATISFKTALWFWMTPQSPKPSCHDVITGSWTPSNADQAAGRLPGYGVTTNIINGGLECGKGYDARVADRIGFYKRYCDLLGVSYGDNLDCYNQRPFASTAATATF

SEQ ID NO: 257 - protein, 333 aa, Oryza sativa subsp. indica
  misc_feature (88)..(319): Pfam Name: Glyco_hydro_19 Pfam Description: Chitinase class I
  misc_feature: Public GI ID no. 125552257
  misc_feature: Bit score of 625.2 for HMM based on sequences of Figure 35
  misc_feature: Functional Homolog Of SEQ ID NO. 211
MKATTTAVALLVAAAAMVAQVVAEQCGSQAGGALCPNCLCCSSYGWCGSTSDYCGDGCQSQCDGCGGGGGGGGGGGGGGGGGGAVEAVVSKELFEQLLLHRNDAACPARGFYTYDAFVTAAAAFPDFAATGDDEARKREVAAFLGQTSHETTGGWATAPDGPYSWGYCFKEEIGATASYCVASAEWPCAPDKKYFGRGPIQLSYNYNYGPAGEAIGEDLLNNPELVASDPVVSFKTALWFWMTPQSPKPSCHDVITGQWTPSSGDIAAGRVPGYGVITNIINGGLECGFGPDDRVANRIGFYQRYCDVLGIGYGSNLDCYDQRPFNSGLAAVQ

SEQ ID NO: 258 - protein, 318 aa, Nepenthes khasiana
  misc_feature (72)..(303): Pfam Name: Glyco_hydro_19 Pfam Description: Chitinase class I
  misc_feature: Public GI ID no. 48237775
  misc_feature: Bit score of 662.8 for HMM based on sequences of Figure 35
  misc_feature: Functional Homolog Of SEQ ID NO. 211
MEIASAKIFFGLSLLGVLALGSAEQCGSQAGGAACPGGLCCSQFGWCGTTDDYCEAGCQSQCSSSGGDPSSLVTRDKFNQMLKHRNDGGCPAKGFYTYDAFIAAAKSFPAFAATGDAATRKREIAAFLAQTSHETTGGWASAPDGPYAWGYCYLREQGNPGSYCVQSAQWPCVAGKKYYGRGPIQISYNFNYGAAGKAIGVDLLNNPDLVEKDPVVSFKTAIWFWMTPQSPKPSCHEVITGRWTPSAADKSAGRVPGFGVVTNIINGGVECGHGQDARVADRIGFYKRYCDILGVGYGNNLDCYNQRPFGNGLLWATE

SEQ ID NO: 259 - protein, 334 aa, Bambusa oldhamii
  misc_feature (90)..(321): Pfam Name: Glyco_hydro_19 Pfam Description: Chitinase class I
  misc_feature: Public GI ID no. 38371990
  misc_feature: Bit score of 614.3 for HMM based on sequences of Figure 35
  misc_feature: Functional Homolog Of SEQ ID NO. 211
MKATAVLVVLAAAFAAYTRAQQCGSQAGGATCPDCLCCSQWGYCGSTADYCGDGCQSQCDGCGPSPVPTPPPPPPPGPPAPPAGPGVASIVSRDLFEQLLLHRNDPACPAKGFYTYDAFVAAADAFPDFGTTGDDETRKREVAAFLGQTSHETTGGWPTAPGGPYSWGYCFKEEIGATATYCVPSTEWPCAPDKKYFGRGPIQLSYNYNYGPAGKAIGEDLLNNPELVAADPVVSFKTALWFWMTPQAPKPSCHDVATGQWTPSSVDIAAGRVPGYGVITNIINGGLECGFGPDDRVVNRIGFYQRYCDILGVSYGPDLDCYAQKPFNSGLAAQ

SEQ ID NO: 260 - protein, 314 aa, Vitis vinifera
  misc_feature (68)..(299): Pfam Name: Glyco_hydro_19 Pfam Description: Chitinase class I
  misc_feature: Public GI ID no. 1705813
  misc_feature: Bit score of 653.6 for HMM based on sequences of Figure 35
  misc_feature: Functional Homolog Of SEQ ID NO. 211
MGLWALVAFCLLSLILVGSAEQCGGQAGGRVCPGGACCSKFGWCGNTADYCGSGCQSQCSSTGDIGQLITRSMFNDMLKHRNEGSCPGKGFYTYDAFIAAAKAFPGFGTTGDTTTRKREIAAFLAQTSHETTGGWASAPDGPYAWGYCYLREQGSPGAYCVPSAQWPCAAGRKYYGRGPIQISYNYNYGQAGKAIGVDLVNNPDLVATDAVISFKTAFWFWMTPQSPKPSCHNVITGGWTPSGADRSAGRLPGFGVITNIINGGVECGKGVVPQVQDRIGFYKRYCDILRVSYGNNLDCNNQRPFGSGLLLDTI

SEQ ID NO: 261 - protein, 316 aa, Castanea sativa
  misc_feature (80)..(309): Pfam Name: Glyco_hydro_19 Pfam Description: Chitinase class I
  misc_feature: Public GI ID no. 1354129
  misc_feature: Bit score of 636.6 for HMM based on sequences of Figure 35
  misc_feature: Functional Homolog Of SEQ ID NO. 211
MKLFSLLLFLAFLLGTSAEQCGRQAGGAACANNLCCSQFGWCGNTAEYCGAGCQSQCSSPTTTTSSPTASSGGGGDVGSLISASLFDQMLKYRNDPRCKSNGFYTYNAFIAAARSFNGFGTTGDVTTRKRELAAFLAQTSHETTGGWATAPDGPYAWGYCFVMENNKQTYCTSKSWPCVFGKQYYGRGPIQLTHNYNYGQAGKAIGADLINNPDLVATNPTISFKTAIWFWMTPQANKPSSHDVIIGNWRPSAADTSAGRVPSYGVITNIINGGLECGHGSDDRVANRIGFYKRYCDTLGVSYGNNLDCYNQKPFA

SEQ ID NO: 262 - protein, 333 aa, Oryza sativa subsp. indica
  misc_feature (88)..(319): Pfam Name: Glyco_hydro_19 Pfam Description: Chitinase class I
  misc_feature: Public GI ID no. 561873
  misc_feature: Bit score of 623.0 for HMM based on sequences of Figure 35
  misc_feature: Functional Homolog Of SEQ ID NO. 211
MKATTTAVALLVAAAAMVAQVVAEQCGSQAGGALCPNCLCCSSYGWCGSTSDYCGDGCQSQCDGCGGGGGGGGGGGGGGGGGGAVEAVVSKELFEQLLLHRNDAACPARGFYTYDAFVTAAAAFPDFAATGDDEARKREVAAFLGQTSHETTGGWATAPDGPYSWGYCFKEEIAAAASYCVASAEWPCAADKKYFGRGPIQLSYNYNYGPAGEAIGEDLLNNPELVASDPVVSFKTALWFWMTPQSPKPSCHDVITGQWTPSSGDIAAGRVPGYGVITNIINGGLECGFGPDDRVANRIGFYQRYCDVLGIGYGSNLDCYDQRPFNSGLAAVQ

SEQ ID NO: 263 - protein, 326 aa, Persea americana
  misc_feature (78)..(309): Pfam Name: Glyco_hydro_19 Pfam Description: Chitinase class I
  misc_feature: Public GI ID no. 3201547
  misc_feature: Bit score of 648.4 for HMM based on sequences of Figure 35
  misc_feature: Functional Homolog Of SEQ ID NO. 211
MVYCTASLPLLLLLLVGLLAGEAFAEQCGRQAGGALCPGGLCCSQFGWCGSTSDYCGPTCQSQCGGVTPSPGGGVASLISQSVFNQMLKHRNDAACQAKGFYTYNAFIAAANSFNGFASVGDTATRKREIAAFLAQTSHETTGGWATAPDGPYAWGYCFLKEQGNPPDYCVPTAQWPCAPGKKYYGRGPIQISYNYNYGPAGRAIGYDLINNPDAVATDPVISFKTALWFWMTPQSPKPSCHNVITGRWTPSAADRAAGRLPGYGVITNIINGGIECGKGFNDKVADRIGFYKRYCDLLGVSYGSNLDCYNQRSFGVSTNPLAASS

SEQ ID NO: 264 - protein, 314 aa, Vitis vinifera
  misc_feature (68)..(299): Pfam Name: Glyco_hydro_19 Pfam Description: Chitinase class I
  misc_feature: Public GI ID no. 89242716
  misc_feature: Bit score of 649.0 for HMM based on sequences of Figure 35
  misc_feature: Functional Homolog Of SEQ ID NO. 211
MGLWALVAFCLLSLILVGSAEQCGGQAGGRVCPGGACCSKFGRCGNTADYCGSGCQSQCSSTGDIGQLITRSMFNDMLKHRNEGSCPGKGFYTYDAFIAAAKAFPGFGTTGDTTTRKREIAAFLAQTSHETTGGWASAPDGPYAWGYCYLREQGSPGAYCVPSAQWPCAAGRKYYGRGPIQISYNYNYGQAGKAIGVDLVNNPDLVATDAVISFKTAFWFWMTPQSPKPSCHNVITGGWTPSGADRSAGRLPGFGVITNIINGGVECGKGVVPQVQDRIGFYKRYCDILRVSYGNNLDCNNQRPFGSGLLLDTI

SEQ ID NO: 265 - protein, 320 aa, Oryza sativa subsp. japonica
  misc_feature (79)..(311): Pfam Name: Glyco_hydro_19 Pfam Description: Chitinase class I
  misc_feature: Public GI ID no. 115470054
  misc_feature: Bit score of 620.5 for HMM based on sequences of Figure 35
  misc_feature: Functional Homolog Of SEQ ID NO. 211
MRALALAVVAMAVVAVRGEQCGSQAGGALCPNCLCCSQYGWCGSTSDYCGAGCQSQCSGGCGGGPTPPSSGGGSGVASIISPSLFDQMLLHRNDQACAAKGFYTYDAFVAAANAYPDFATTGDADTCKREVAAFLAQTSHETTGGWPTAPDGPYSWGYCFKEENNGNAPTYCEPKPEWPCAAGKKYYGRGPIQITYNYNYGPAGQAIGSDLLNNPDLVASDATVSFKTAFWFWMTPQSPKPSCHAVITGQWTPSADDQAAGRVPGYGEITNIINGGVECGHGADDKVADRIGFYKRYCDMLGVSYGDNLDCYNQRPYPPS

SEQ ID NO: 266 - protein, 333 aa, Oryza sativa
  misc_feature (88)..(319): Pfam Name: Glyco_hydro_19 Pfam Description: Chitinase class I
  misc_feature: Public GI ID no. 17028128
  misc_feature: Bit score of 620.8 for HMM based on sequences of Figure 35
  misc_feature: Functional Homolog Of SEQ ID NO. 211
MKATTTAVALLVAAAAMVAQVVAEQCGSQAGGALCPNCLCCSSYGWCGSTSDYCGDGCQSQCDGCGGGGGGGGGGGGGGGGGGAVEAVVSKELFEQLLLHRNDAACPARGFYTYNAFVTAAAAFPDFAATGDDEARKREVAAFLGQTSHETTGGWATAPDGPYSWGYCFKEEIGATASYCVASAEWPCAPDKKYFGRGPIQLSYNYNYGPAGEAIGEDLLNNPELVASDPVVSFKTALWFWMTPQSPKPSCHDVITGQWTPSSGDIAAGRVPGYGVITNIINGGLECGFGPDDRVANRIGFYQRYCNVLGIGYGSNLDCYDQRPFNSGLAAVQ

SEQ ID NO: 267 - protein, 336 aa, Oryza sativa
  misc_feature (81)..(313): Pfam Name: Glyco_hydro_19 Pfam Description: Chitinase class I
  misc_feature: Public GI ID no. 227845
  misc_feature: Bit score of 597.6 for HMM based on sequences of Figure 35
  misc_feature: Functional Homolog Of SEQ ID NO. 211
MRALAVVAMVARPFLAAAVHAEQCGSQAGGAVCPNCLCCSQFGWCGSTSDYCGAGCQSQCSRLRRRRPDASGGGGSGVASIVSRSLFDLMLLHRNDAACPASNFYTYDAFVAAASAFPGFAAAGDADTNKREVAAFLAQTSHETTGGWATAPDGPYTWGYCFKEENGGAGPDYCQQSAQWPCAAGKKYYGRGPIQLSYNFNYGPAGQAIGADLLGDPDLVASDATVSFDTAFWFWMTPQSPKPSCNAVATGQWTPSADDQRAGRVPGYGVITNIINGGLECGHGEDDRIADRIGFYKRYCDILGVSYGANLDCYSQRPSAPPKLRLPSFHTVINNH

SEQ ID NO: 268 - protein, 318 aa, Nepenthes khasiana
  misc_feature (72)..(303): Pfam Name: Glyco_hydro_19 Pfam Description: Chitinase class I
  misc_feature: Public GI ID no. 48237771
  misc_feature: Bit score of 660.9 for HMM based on sequences of Figure 35
  misc_feature: Functional Homolog Of SEQ ID NO. 211
MEIASAKIFFGLSLLGLLALGSAEQCGSQAGGAVCPGGLCCSQYGWCGTTDDYCGAGCQSQCSFSGGDPSSLVTRDKFNQMLKHRNDGGCPAKGFYTYDAFIAAAKSFPAFAATGDAATRKREIAAFLAQTSHETTGGWASAPDGPYAWGYCYLREQGNPGSYCVQSAQWPCVAGKKYYGRGPIQISYNFNYGAAGKAIGVDLLNNPDLVEKDPVVSFKTAIWFWMTPQSPKPSCHAVITGRWTPSAADKSAGRVPGFGVVTNIINGGVECGHGQDARVADRIGFYKRYCDILGVGYGNNLDCYNQRPFGNGLLWATE

SEQ ID NO: 269 - protein, 334 aa, Oryza sativa subsp. japonica
  misc_feature (89)..(320): Pfam Name: Glyco_hydro_19 Pfam Description: Chitinase class I
  misc_feature: Public GI ID no. 115463755
  misc_feature: Bit score of 619.6 for HMM based on sequences of Figure 35
  misc_feature: Functional Homolog Of SEQ ID NO. 211
MKATTTAVALLVAAAAMAAQVVAEQCGSQAGGALCPNCLCCSSYGWCGSTSDYCGDGCQSQCDGCGGGGGGGGGGGGGGGGGGGAVEAVVSKELFEQLLLHRNDAACPARGFYTYDALVTAAAAFPDFAATGDDEARKREVAAFLGQTSHETTGGWATAPDGPYSWGYCFKEEIGATASYCVPSAEWPCAPDKKYFGRGPIQLSYNYNYGPAGEAIGEDLLNNPELVASDPVVSFKTALWFWMTPQSPKPSCHDVITGQWTPSSGDIAAGRVPGYGVITNIINGGLECGFGPDDRVANRIGFYQRYCDVLGIGYGSNLDCYDQRPFNSGLTAAQ

SEQ ID NO: 270 - protein, 325 aa, Vitis vinifera
  misc_feature (86)..(318): Pfam Name: Glyco_hydro_19 Pfam Description: Chitinase class I
  misc_feature: Public GI ID no. 157328752
  misc_feature: Bit score of 623.8 for HMM based on sequences of Figure 35
  misc_feature: Functional Homolog Of SEQ ID NO. 211
MRIWGLLLFSFLLLVGASFGQEQCGSLAGGALCSGGLCCSQYGYCGSTPAYCSTGCQSQCTSGGSPSTPSTPTPTPSGGGGDISSLISKSLFEQMLKHRNEAACPGKGFYTYEAFISAAKSFGGFGTTGDTDTCKREIAAFLAQTSHETTGGWPTAPDGPYAWGYCFVQERRNPGDYCDATYQQWPCAAGKKYYGRGPIQISYNYNYGPAGRAINYDLLNNPDAVATDATISFKTALWFWMTPQSPKPSCHDVITGQWTPSSADTAAGRVPGYGVITNIINGGIECGKGSNAQVEDRIGFYKRYCDIMGIGYGNNLDCYNQSPFA

SEQ ID NO: 271 - protein, 318 aa, Populus x generosa
  misc_feature (71)..(301): Pfam Name: Glyco_hydro_19 Pfam Description: Chitinase class I
  misc_feature: Public GI ID no. 118489654
  misc_feature: Bit score of 686.0 for HMM based on sequences of Figure 35
  misc_feature: Functional Homolog Of SEQ ID NO. 211
MKIWAFTVFSLLLSLLLGGSAEQCGSQAGGAVCPGGLCCSQFGWCGSTNDYCGNGCQSQCGGAGAGDLGSIISSAKFDEMLKHRNDGGCPGKGFYTYNAFISAANAFSGFGTTGDANTRKREIAAFLGQTSHETTGGWQTAPDGAYAWGYCFVKEQNPGTYCSPSSTYPCAGGKQYYGRGPVQLSWNYNYGQCGKAIGVDLLNNPDLVATDPVISFKTAIWFWMTAQSPKPSCHSIITGNWSPSGADSAAGRVPGYGVLTNIINGGLECGMGWKQQVEDRIGFYKRYCDLLGVGYGNNLDCYNQKSFANGLLDLVDSM

SEQ ID NO: 272 - protein, 326 aa, Musa x paradisiaca
  misc_feature (84)..(318): Pfam Name: Glyco_hydro_19 Pfam Description: Chitinase class I
  misc_feature: Public GI ID no. 88659025
  misc_feature: Bit score of 606.4 for HMM based on sequences of Figure 35
  misc_feature: Functional Homolog Of SEQ ID NO. 211
MRALAVVAMVATAFLAAAVHAEQCGSQAGGAVCPNCLCCSQFGWCGSTSDYCGAGCQSQCSAAGCGGGGPTPPSGGGGSGVASIVSRSLFDQMLLHRNDAACPASNFYTYDAFVAAASAFPGFAAAGGDADTNKREVAAFLAQTSHETTGGWATAPDGPYTWGYCFKEENGGAAGPDYCQQSAQWPCAAGKKYYGRGPIQLSYNFNYGPAGQAIGADLLGDPDLVASDATVSFDTAFWFWMTPQSPKPSCHAVATGQWTPSADDQAAGRVPGYGVITNIINGGLECGHGEDDRVADRIGFYKRYCDILGVSYGANLDCYSQRPFGS

SEQ ID NO: 273 - protein, 325 aa, Vitis vinifera
  misc_feature (87)..(318): Pfam Name: Glyco_hydro_19 Pfam Description: Chitinase class I
  misc_feature: Public GI ID no. 147805840
  misc_feature: Bit score of 629.1 for HMM based on sequences of Figure 35
  misc_feature: Functional Homolog Of SEQ ID NO. 211
  misc_feature (107)..(107): Xaa is any aa, unknown, or other
  misc_feature (113)..(113): Xaa is any aa, unknown, or other
MKIWGLRFFPLMLLAIGGAFAQEQCGRQAGGALCSGGLCCSQYGYCGSTSAYCSTGCQSQCPSGGSPSTPSTPTPTPSGGGGDISSLISKSLFDEMLKHRNDAACPXKGFYTXEAFISAVKSFGGFGTTGDTNTRKREIAAFLAQTSHETTGGWATAPDGPYAWGYCFLREQGNPGDYCVANQQWPCAPGKKYYGRGPIQISYNYNYGPAGKAINYDLLNNPDAVATDPTISFKTALWFWMTPQSPKPSCHSVITGQWTPSSSDTSAGRVPGYGLITNIINGGIECGKGSNPQMEDRIGFYKRYCDLMGIGYGSNLDCNNQRPFS

SEQ ID NO: 274 - protein, 321 aa, Secale cereale
  misc_feature (83)..(314): Pfam Name: Glyco_hydro_19 Pfam Description: Chitinase class I
  misc_feature: Public GI ID no. 75309544
  misc_feature: Bit score of 636.2 for HMM based on sequences of Figure 35
  misc_feature: Functional Homolog Of SEQ ID NO. 211
MGAFALFAVLAMAVTMAVAEQCGSQAGGATCPNCLCCSRFGWCGSTSDYCGDGCQSQCAGCGGGGTPVTPTPTPSGGGGVSSIVSRALFDRMLLHRNDGACQAKGFYTYDAFVAAAGAFPGFGTTGSTDTRKREVAAFLAQTSHETTGGWATAPDGAFAWGYCFKQERGATSNYCTPSAQWPCAPGKSYYGRGPIQLSHNYNYGPAGRAIGVDLLRNPDLVATDPTVSFKTAMWFWMTAQAPKPSSHAVITGQWSPSGTDRAAGRVPGFGVITNIVNGGIECGHGQDSRVADRIGFYKRYCDILRVGYGNNLDCYNQRPFA

SEQ ID NO: 275 - protein, 314 aa, Momordica charantia
  misc_feature (77)..(307): Pfam Name: Glyco_hydro_19 Pfam Description: Chitinase class I
  misc_feature: Public GI ID no. 89275293
  misc_feature: Bit score of 639.7 for HMM based on sequences of Figure 35
  misc_feature: Functional Homolog Of SEQ ID NO. 211
MKAHTLIILAFALFLGAASAEQCGRQANGALCPNRLCCSQHGWCGSTDEYCKNGCQSQCGGQTPTPTNPGSGDVGRIITPAIFDQMLKYRNDARCPSNGFYSYNAFISATRSFPGFGTTGDDATRKRELAAFLGQTSHETTGGWPSAPDGPFAWGYCFIRERNQDTYCSPNQQWPCAPGQKYYGRGPIQLTHNYNYGPAGRALGLNLLNNPDSVATDPTVSFKTAIWFWMTPQGNKPSSHDVIIGKWQPSGADSAAGRVPGYGVITNIINGGLECGRGPDSRVADRIGFFKRYCDILRIGYGNNLDCNNQRPFA

SEQ ID NO: 276 - protein, 340 aa, Oryza sativa subsp. japonica
  misc_feature (92)..(323): Pfam Name: Glyco_hydro_19 Pfam Description: Chitinase class I
  misc_feature: Public GI ID no. 407472
  misc_feature: Bit score of 603.3 for HMM based on sequences of Figure 35
  misc_feature: Functional Homolog Of SEQ ID NO. 211
MSTPRAAASLAKKAALVALAVLAAALATAARAEQCGAQAGGARCPNCLCCSRWGWCGTTSDFCGDGCQSQCSGCGPTPTPTPPSPSDGVGSIVPRDLFERLLLHRNDGACPARGFYTYEAFLAAAAAFPAFGGTGNTETRKREVAAFLGQTSHETTGGWPTAPDGPFSWGYCFKQEQNPPSDYCQPSPEWPCAPGRKYYGRGPIQLSFNFNYGPAGRAIGVDLLSNPDLVATDATVSFKTALWFWMTPQGNKPSSHDVITGRWAPSPADAAAGRAPGYGVITNIVNGGLECGHGPDDRVANRIGFYQRYCGAFGIGTGGNLDCYNQRPFNSGSSVGLAEQ

SEQ ID NO: 277 - protein, 315 aa, Psophocarpus tetragonolobus
  misc_feature (68)..(299): Pfam Name: Glyco_hydro_19 Pfam Description: Chitinase class I
  misc_feature: Public GI ID no. 10047221
  misc_feature: Bit score of 634.7 for HMM based on sequences of Figure 35
  misc_feature: Functional Homolog Of SEQ ID NO. 211
  misc_feature (95)..(95): Xaa is any aa, unknown, or other
MGMRVDVVVVGGRKGEQCGRQAGGGVCPGGLCCSKFGWCGSTAEYCGEGCQSQCWGPKPTPRGDLSSIISRNTYEEMLKHRNDGACPARGFSTYXAFLAAARAFPSFGNTGDTATRKREVAAFLGQTSHETTGGWGTAPDGPYAWGYCFLRERNPTSNYCSPNAQFPCASGRQYYGRGPIQISWNYNYGQCGRAISVDLLNNPDLVATDAIISFKSALWFWMTPQSPKPSCHDVITGRWTPSSADQAAGRLPGYGTLTNIINGGLECGRGQDSRVQDRIGFYKRYCDLLSVPYGNNLDCFSQRPFGNSLLLHPFI

SEQ ID NO: 278 - protein, 338 aa, Oryza sativa subsp. japonica
  misc_feature (90)..(321): Pfam Name: Glyco_hydro_19 Pfam Description: Chitinase class I
  misc_feature: Public GI ID no. 115463753
  misc_feature: Bit score of 603.2 for HMM based on sequences of Figure 35
  misc_feature: Functional Homolog Of SEQ ID NO. 211
MSTPRAAASLAKKAALVALAVLAAALATAARAEQCGAQAGGARCPNCLCCSRWGWCGTTSDFCGDGCQSQCSGCGPTPTPPSPSDGVGSIVPRDLFERLLLHRNDGACPARGFYTYEAFLAAAAAFPAFGGTGNTETRKREVAAFLGQTSHETTGGWPTAPDGPFSWGYCFKQEQNPPSDYCQPSPEWPCAPGRKYYGRGPIQLSFNFNYGPAGRAIGVDLLSNPDLVATDATVSFKTALWFWMTPQGNKPSSHDVITGRWAPSPADAAAGRAPGYGVITNIVNGGLECGHGPDDRVANRIGFYQRYCGAFGIGTGGNLDCYNQRPFNSGSSVGLAEQ

SEQ ID NO: 279 - protein, 319 aa, Bromus inermis
  misc_feature (81)..(312): Pfam Name: Glyco_hydro_19 Pfam Description: Chitinase class I
  misc_feature: Public GI ID no. 169990894
  misc_feature: Bit score of 623.0 for HMM based on sequences of Figure 35
  misc_feature: Functional Homolog Of SEQ ID NO. 211
MRGLVVAALLVAAFAVSAHAEQCGSQAGGATCPNCLCCSRFGFCGSGSDYCGAGCQSQCTGCGGGGTPVTPTPSGGGVSSVISQSLFDQMLLHRNDAACQAKGFYNYAAFVAAAGSFPAFATTGGADVRKREVAAFLAQTSHETTGGWPTAPDGPYSWGYCFNQERGATSDYCTPSSQWPCAPGKKYFGRGPIQISHNYNYGPAGRAIGADLLGNPDLVATDATVSFKTALWFWMTPQSPKPSSHDVITGQWSPSAADQAAGRAPGYGVITNIINGGLECGRGQDGRVADRIGFYKRYCDLLGVSYGDNLDCYNQRPFA

SEQ ID NO: 280 - DNA, 1136 bp, Panicum virgatum
  misc_feature: Ceres Clone ID no. 2022546
  misc_feature: Encodes the peptide sequence at SEQ ID NO. 281
gcacacaaaacagctaccaccagcacagcagatagacgacatgatgagagcagtggcgttagtggccatgttggccactgccttggcggcttccgcgcgcgccgagcagtgcgggtcgcaggccaacggggctctctgccccaacggcctctgctgcagcaagtggggctggtgcggctccacctccgactactgcaccaacggctgccagagccagtgcggcggcggcagcccaccgagcggcggcggcgtcgagtccatcatctcgcgttcgctgttcgaccagatgctcctccaccgcaacgacaacgcgtgccctgcccggggcttctacacgtacgacgccttcgtcgcggcggcgagcgccttcccggggttcggcacgacgggcagcctggagacccagaagcgggagctcgcggcgttcctggcccagacgtcacacgagacgaccggcgggtgggcgacggcgcccgacggaccctacgcctggggctactgcttcaagcaggagcagagcccgtcgtcgtcctactgccagccgagctcgcagtggccctgcgccgccggcaagcagtactacggccgtggccccatccagatctcgtggaactacaactacggccccgcgggccaggccatcagccaggacctcctgggcaacccggacctggtggccagcgacgccgtggtgtcgttcaagacggcggtgtggttctggatgacggcgcagtctcccaagccgtcgtgccacgccgtagtgaccgggcagtggagcccctccagcgccgaccaggcggccgggagggtgcccgggtatggggtcatcaccaacatcatcaatggtgggatcgagtgtggccacggcgctgatagcagcgtcgcggaccggatcggattctacaagcgctactgcgacttgctcggggtcagctatggggccaacttggactgctacaaccagaggcccttcggcagctagctcagatcagctggcatggcagtcttcacaacttggactgcgataaagctaaggcagagatcgtcacacaataacaagtgtgttatgtatacgatccaataataatgcaattaagcaatatattgaatcagtggaataaaatacatgattatat

SEQ ID NO: 281 - protein, 313 aa, Panicum virgatum
  misc_feature (74)..(305): Pfam Name: Glyco_hydro_19 Pfam Description: Chitinase class I
  misc_feature (21)..(60): Pfam Name: Chitin_bind_1 Pfam Description: Chitin recognition protein
  misc_feature: Ceres Clone ID no. 2022546
  misc_feature: Bit score of 662.7 for HMM based on sequences of Figure 35
  misc_feature: Functional Homolog Of SEQ ID NO. 211
MMRAVALVAMLATALAASARAEQCGSQANGALCPNGLCCSKWGWCGSTSDYCTNGCQSQCGGGSPPSGGGVESIISRSLFDQMLLHRNDNACPARGFYTYDAFVAAASAFPGFGTTGSLETQKRELAAFLAQTSHETTGGWATAPDGPYAWGYCFKQEQSPSSSYCQPSSQWPCAAGKQYYGRGPIQISWNYNYGPAGQAISQDLLGNPDLVASDAVVSFKTAVWFWMTAQSPKPSCHAVVTGQWSPSSADQAAGRVPGYGVITNIINGGIECGHGADSSVADRIGFYKRYCDLLGVSYGANLDCYNQRPFGS

SEQ ID NO: 282 - protein, 338 aa, Picea sitchensis
  misc_feature (85)..(317): Pfam Name: Glyco_hydro_19 Pfam Description: Chitinase class I
  misc_feature (26)..(65): Pfam Name: Chitin_bind_1 Pfam Description: Chitin recognition protein
  misc_feature: Public GI ID no. 116786735
  misc_feature: Bit score of 620.5 for HMM based on sequences of Figure 35
  misc_feature: Functional Homolog Of SEQ ID NO. 211
MKSIRFSAMAIALVTMGTMNLYFASAEQCGRQASGALCPGGLCCSKWGWCGNTEAHCGQDCQSQCGGSTPTPPSPTPGGQGVSSVITESIFNDLLKHRNDAACKAKGFYSYAAFIAAANAFPAFGTTGDLSTRKRELAAFFGQTSHETTGGWPAAPDGPYAWGYCFKEEQGNPPAEYCQASSQWPCASGKRYYGRGPVQISWNYNYGPAGRAIGFDGINNPDIVANDATVSFKTAVWFWMTAQSPKPSCHDVMTGRWSPSGSDSAAGRAAGYGVVTNIINGGLECGKGSDSRQQDRIGFYKRYCDILGVSYGSNLDCNNQRPFGFAAQSQPRLIKTVV

SEQ ID NO: 283 - DNA, 929 bp, Panicum virgatum
  misc_feature: Ceres Clone ID no. 2014404
  misc_feature: Encodes the peptide sequence at SEQ ID NO. 284
aatgaactgctactccacattcatcccatcccctttcaacctcttcgccgccgcagctcgcataaactagagcgaagttgctagcactgctagcatgggaggagccactaacctacctccaggtttccacttcttcccctcagatgaagatcttgtcatccatttcctcagtcgcaaagcggccaacctcccatgccgccctgacatcatcccaacagttcttctgcaacactacagcccgtgggaactgaatggcactgcactgcaagctggaaaccagtggtatttcttcagccatgcggcacaaagcaggatttcaccgaatgggtactggagccctattggtgctgatgaaacagtgacaagcagtggctgtgttgttggcctgaagaagacgctcatcttctgcaccggcgaaccttccaagggtttcaaaactaactggatcatgcatgagtaccaccttcaagatggagggtataatgtcagcggcagcagcacctcatcaagcagctcgagctccagcaggaaatcccaaaggaagagagttcactcgagcacggagtccaacaactgggtgatatgcagagtgttcgagtcgagctgcggttcgcaagtgagcttccatgacgagggcacggagctttcatgcttagatgaggtgtttttgtcgctagatgactatgatgaagtgagtctgccaaataattagaaccctagctagtaagtagtgctgacggtaggtcctatgcctatcaagccatttaattaaactgtgatggtgatatctacgtaagtggttgcaagttgcattatgtatgattcagatggcctgataggcatcgaacttaatccactctatcctaaatcattacaatgtaattaactatcatgcaagcaataggtataaaggttgagcttttgtctct

SEQ ID NO: 284 - protein, 205 aa, Panicum virgatum
  misc_feature (7)..(125): Pfam Name: NAM Pfam Description: No apical meristem (NAM) protein
  misc_feature: Ceres Clone ID no. 2014404
  misc_feature: Bit score of 568.1 for HMM based on sequences of Figure 49
  misc_feature: Functional Homolog Of SEQ ID NO. 284
  misc_feature: in Figure 49
MGGATNLPPGFHFFPSDEDLVIHFLSRKAANLPCRPDIIPTVLLQHYSPWELNGTALQAGNQWYFFSHAAQSRISPNGYWSPIGADETVTSSGCVVGLKKTLIFCTGEPSKGFKTNWIMHEYHLQDGGYNVSGSSTSSSSSSSSRKSQRKRVHSSTESNNWVICRVFESSCGSQVSFHDEGTELSCLDEVFLSLDDYDEVSLPNN

SEQ ID NO: 285 - DNA, 615 bp, Sorghum bicolor
  misc_feature: Ceres Annot ID no. 8679595
  misc_feature: Encodes the peptide sequence at SEQ ID NO. 286
atgggaggagctaccaacctacctcctggtttccatttcttcccttcagatgaagatctcatcgtccatttcctccgtcgcaaagtggccaacctcccatgccgccctgacatcgtcccgacgatacttctgcaccgctacgatccgtgggaattgaatggcacggcgctgcaagctggaaaccaatggtatttctttagccatgccgcgcagagcagaacctctccgaatgggtactggaatcccgttggtgccgatgaaacagtaacaagcagtggctgtattgttggcctgaagaagacgctcatcttctgcaccggggagcctttcaaaggtttcaaaacaaactggatcatgcatgagtaccaccttcaagatggaggatacaatgtcagcggtagcagcacctcaagtagctcaagctccagtaggaaatcccagaggaagagacttcactcaagcacggagtccaacaactgggtgatatgtagagtgttcgaatcaagctgcggttcacaagtgagcttccatgatgagggcacagagctttcatgcttagatgaggtgtttttgtcgttagatgactatgacgaagtgagtttgccaaataattag

SEQ ID NO: 286 - protein, 204 aa, Sorghum bicolor
  misc_feature (7)..(125): Pfam Name: NAM Pfam Description: No apical meristem (NAM) protein
  misc_feature: Ceres Annot ID no. 8679595
  misc_feature: Bit score of 572.7 for HMM based on sequences of Figure 49
  misc_feature: Functional Homolog Of SEQ ID NO. 284
  misc_feature: in Figure 49
MGGATNLPPGFHFFPSDEDLIVHFLRRKVANLPCRPDIVPTILLHRYDPWELNGTALQAGNQWYFFSHAAQSRTSPNGYWNPVGADETVTSSGCIVGLKKTLIFCTGEPFKGFKTNWIMHEYHLQDGGYNVSGSSTSSSSSSSRKSQRKRLHSSTESNNWVICRVFESSCGSQVSFHDEGTELSCLDEVFLSLDDYDEVSLPNN

SEQ ID NO: 287 - protein, 204 aa, Oryza sativa subsp. japonica
  misc_feature (7)..(125): Pfam Name: NAM Pfam Description: No apical meristem (NAM) protein
  misc_feature: Public GI ID no. 115446685
  misc_feature: Bit score of 564.3 for HMM based on sequences of Figure 49
  misc_feature: Functional Homolog Of SEQ ID NO. 284
  misc_feature: in Figure 49
MGGATNLPPGFHFFPSDEELVVHFLRRKVSLLPCHPDIIPTLLPHRYNPWELNGKALQAGNQWYFFCHLTQSRTSSNGHWSPIGVDETVRSGGRNVGLKKTLLFSIGEPSEGIRTNWIMHEYHLLDGDCVAGGSSNLTSSSSNRRSHRKRGHSSMESNNWVLCRVFESSCGSQVSFHGEGTELSCLDEVFLSLDDYDEVSLPNK

SEQ ID NO: 288 - protein, 192 aa, Vitis vinifera
  misc_feature (8)..(127): Pfam Name: NAM Pfam Description: No apical meristem (NAM) protein
  misc_feature: Public GI ID no. 225447803
  misc_feature: Bit score of 532.0 for HMM based on sequences of Figure 49
  misc_feature: Functional Homolog Of SEQ ID NO. 284
  misc_feature: in Figure 49
MGDHNFNLPPGFRFYPTDEELVVHFLHRKAALLPCHPDVIPDLDLYPYDPWELDGKALAEGNQWYYFSRRTQNRSTNNGYWKTLGIDEPIMSSGGKRVGMKKYMVFYIGEAPSGIKSSWIMQEYRLSDSGSSSSSGRSSSKRRGHSKIDYSKWVVCRVSERNSDDDDDGTELSYLDEVFLSLDDLDEISLPN

SEQ ID NO: 289 - protein, 187 aa, Arabidopsis thaliana
  misc_feature (3)..(119): Pfam Name: NAM Pfam Description: No apical meristem (NAM) protein
  misc_feature: Public GI ID no. 30698042
  misc_feature: Bit score of 493.0 for HMM based on sequences of Figure 49
  misc_feature: Functional Homolog Of SEQ ID NO. 284
  misc_feature: in Figure 49
MNLPPGFRFFPTDEELVVHFLHRKASLLPCHPDVIPDLDLYHYDPWDLPGKALGEGRQWYFYSRKTQERVTSNGYWGSMGMDEPIYTSSTHKKVGIKKYLTFYLGDSQTNWIMQEYSLPDSSSSSSRSSKRSSRASSSSHKPDYSKWVICRVYEQNCSEEEDDDGTELSCLDEVFLSLDDLDEVSLP

SEQ ID NO: 290 - DNA, 802 bp, Glycine max
  misc_feature: Ceres Clone ID no. 611438
  misc_feature: Encodes the peptide sequence at SEQ ID NO. 291
catcctcccctgtctcttattatttgcttcaatgggtgataacaatgtcaaccttccacccgggtttcgattttatcccacagatgaagagcttgtagtccatttccttcacagaaaggcatctcttttaccttgccacccagatgccatccctgatcttgaagtctacccatatgatccatgggaacttgatggtagagctttggcagagggaaaccaatggtactactacagcagaaggacacaaaatagggtcactggcaatgggtattggaaaccaacgggaatggaagaaccagtggtttcaagcacaagcaacaaaagggttggcatgaagaaatattttgtgttccatgtgggagaagcccctactgctggtatcaaaaccaattggataatgcaagaatatcgtctatcagattctgcttcctctaccagatcatccaaaagaaaaccacaaccaaaaatagaatacaataaatgggtgatatgtcgtgtttatgagcgcaatggagacgatgataatggaacagagctctcatgcttggatgaagtattcttgtcattggatgatgatcttgatgaaataagcttaccaaattaattagctgataatgcaagtgatctagcttgctatatagccgcagtatatccatctggataattaattaaaataattgttgcttgttatcgcttcatatgttatttacgggccatagttaaacttaaatccagtgtagatggcattgtaatgatcaatgaaatgggttttcatagcagcccttcaagtggggcactaagc

SEQ ID NO: 291 - protein, 190 aa, Glycine max
  misc_feature (8)..(129): Pfam Name: NAM Pfam Description: No apical meristem (NAM) protein
  misc_feature: Ceres Clone ID no. 611438
  misc_feature: Bit score of 522.3 for HMM based on sequences of Figure 49
  misc_feature: Functional Homolog Of SEQ ID NO. 284
  misc_feature: in Figure 49
MGDNNVNLPPGFRFYPTDEELVVHFLHRKASLLPCHPDAIPDLEVYPYDPWELDGRALAEGNQWYYYSRRTQNRVTGNGYWKPTGMEEPVVSSTSNKRVGMKKYFVFHVGEAPTAGIKTNWIMQEYRLSDSASSTRSSKRKPQPKIEYNKWVICRVYERNGDDDNGTELSCLDEVFLSLDDDLDEISLPN

SEQ ID NO: 292 - DNA, 912 bp, Panicum virgatum
  misc_feature: Ceres Clone ID no. 1953842
  misc_feature: Encodes the peptide sequence at SEQ ID NO. 293
aagcattccttcctccgtctccctcatagtagccttcttccacctgcttctagcctatctacttccagcttgcacctcagacctcacctcgccatgggtggagcttctgaccttcctccagggttccacttcttcccatcggatgaagagctcatcgtccacttcctccgccgcaaagcctccctgcttccatgccagccagacatcgtcccaacaatacttctgaaccactacgatccatgggaactgaatgacaaagcacttcaagcaggtaaccagtggtacttcttcagtcatgcaacacaaagtagggtcacaccaaatggttactggagctctatttgtgccgatgagacggtaaaaagtggtggctgtaacattggcctgaagaagacgcttgtcttttccattggagagtcctctgaggggattgaaaccaactggatcatgcatgagtaccacttactagacggggggaaggtgtgtagcagtagcacttcaactagttcaagcaggaagttgcacagggagaaaggtcactcaaacacagagtccgataactgggtgatatgccgagtgtttgattcgacctgcggatcgcaagcgaacttccatgaggagggcatggagctttcatgtttagatgaggtgttcctatccctcgacgactatgacgaagtcagtttgtcaaataattagaacccttgtcagcagaactggtagtaggccatgtacctatacggtaccattatgttgattctagcaggaaaagttactccaaaagatcaaatgattccataggtgtcgaacctagacatgtgtctagaccacacatgtaattattctccccaaagaacgagccacacatgtaacaaacttgagttagcttgatgtaactatggcattaatgtg

SEQ ID NO: 293 - protein, 201 aa, Panicum virgatum
  misc_feature (7)..(125): Pfam Name: NAM Pfam Description: No apical meristem (NAM) protein
  misc_feature: Ceres Clone ID no. 1953842
  misc_feature: Bit score of 476.0 for HMM based on sequences of Figure 49
  misc_feature: Functional Homolog Of SEQ ID NO. 284
MGGASDLPPGFHFFPSDEELIVHFLRRKASLLPCQPDIVPTILLNHYDPWELNDKALQAGNQWYFFSHATQSRVTPNGYWSSICADETVKSGGCNIGLKKTLVFSIGESSEGIETNWIMHEYHLLDGGKVCSSSTSTSSSRKLHREKGHSNTESDNWVICRVFDSTCGSQANFHEEGMELSCLDEVFLSLDDYDEVSLSNN

SEQ ID NO: 294 - protein, 200 aa, Oryza sativa subsp. japonica
  misc_feature (7)..(124): Pfam Name: NAM Pfam Description: No apical meristem (NAM) protein
  misc_feature: Public GI ID no. 38344065
  misc_feature: Bit score of 475.6 for HMM based on sequences of Figure 49
  misc_feature: Functional Homolog Of SEQ ID NO. 284
MAGASNLPPGFHFFPSDEELIIHFLRRKASLLPCQPDIVPTLILNLYDPWELNGKALQSGNQWYFFSHATQTRTSPNGHWKPIADETVISGGCNVGLKKTLIFFIGEPFEAIKTNWVMHEYHLMDGSTNCSSSSTSSSSSKRSHKKKGHSDTESKNWVICRVFESSYDSQVSFHEEGTELSCLDEVFLSLDDYDEVSFAK

SEQ ID NO: 295 - protein, 197 aa, Oryza sativa subsp. japonica
  misc_feature (7)..(124): Pfam Name: NAM Pfam Description: No apical meristem (NAM) protein
  misc_feature: Public GI ID no. 115458512
  misc_feature: Bit score of 460.5 for HMM based on sequences of Figure 49
  misc_feature: Functional Homolog Of SEQ ID NO. 284
MAGASNLPPGFHFFPSDEELIIHFLRRKASLLPCQPDIVPTLILNLYDPWELNGKALQSGNQWYFFSHATQTRTSPNGHWKPIADETVISGGCNVGLKKTLIFFIGEPFEAIKTNWVMHEYHLMDGSTNCSSSSTSSSSSKRSHKKKGHSDTESKNWVICRVFESSYDSQVSFHEEGTELSCLDEVFLSLDDYDEYK

SEQ ID NO: 296 - DNA, 618 bp, Sorghum bicolor
  misc_feature: Ceres Annot ID no. 8700901
  misc_feature: Encodes the peptide sequence at SEQ ID NO. 297
atggggggagcttctaattctaacctgcttcctcctggcttccacttcttcccatcagacgaagagctcgtcgtccatttcctccgccgcaaagcctcgctcttaccatgccagccagacatcgtccctacagtgtgtatgaatcactatgatccatgggaactgaatggcaaagcacttggggcaggtaaccagtggtacttcttcagccatgcgaagcacagcagggtcacaccaaacgggtactggagctctgtttgtgcagacgagacggtgagcagtggtggctgtagtgtcggtctgaagaagacacttgtcttctccactggagagccctctgaatctgaggggaccgagaccaactggatcatgcatgagtatcacttactggatgggaggaaggggattagcagtagcactacctcaactaatagttcaagcaagaaattgcatcacccaaacacagagtccaataactgggtgatatgccgagtgtttgattcgacgaccggtggatcgcaagcgagctgccatgaggagggtatggagctttcatgcttagatgaggtgttcctatccctcgacgactatgatgaagtcagtttgtcaaataattag

SEQ ID NO: 297 - protein, 205 aa, Sorghum bicolor
  misc_feature (10)..(130): Pfam Name: NAM Pfam Description: No apical meristem (NAM) protein
  misc_feature: Ceres Annot ID no. 8700901
  misc_feature: Bit score of 429.2 for HMM based on sequences of Figure 49
  misc_feature: Functional Homolog Of SEQ ID NO. 284
MGGASNSNLLPPGFHFFPSDEELVVHFLRRKASLLPCQPDIVPTVCMNHYDPWELNGKALGAGNQWYFFSHAKHSRVTPNGYWSSVCADETVSSGGCSVGLKKTLVFSTGEPSESEGTETNWIMHEYHLLDGRKGISSSTTSTNSSSKKLHHPNTESNNWVICRVFDSTTGGSQASCHEEGMELSCLDEVFLSLDDYDEVSLSNN

SEQ ID NO: 298 - DNA, 579 bp, Populus balsamifera subsp. trichocarpa
  misc_feature: Ceres Annot ID no. 1446112
  misc_feature: Encodes the peptide sequence at SEQ ID NO. 299
atggctgccaatcttcctcctggttttcgattttgtccaagtgatgaagagcttgtagtgcattttcttcatcgtaaagcagctcttttaccttgccacccagatgtcatcccggatcttgatctttatccttatgatccatgggaacttgatggtaaggcattgtcggagggtaaacaatgctacttctatagccgaagaacacaaaacaggattactaataacgggtgctggaagccaatggttggccacgttgaagaacctatacttgcaagtgagaacaacaaactagttgggatcaagaaatattttatattttatgcagcagaaggcatcaaaactaattggataatggaagagtaccttctctcggaacatcgcacctctcatgactcttctccctctactaaatcatccaaaaccagagcccgttcaaagcaagattatagtaaatgggttatttgtcgggtctatgagcggagttatgaggaggaggaggatggaggaaaggaactgtcatgtctagacgaagttttcttatcattggaggatcttgatgaaataagcttgccaaattaa

SEQ ID NO: 299 - protein, 192 aa, Populus balsamifera subsp. trichocarpa
  misc_feature (5)..(124): Pfam Name: NAM Pfam Description: No apical meristem (NAM) protein
  misc_feature: Ceres Annot ID no. 1446112
  misc_feature: Bit score of 394.9 for HMM based on sequences of Figure 49
  misc_feature: Functional Homolog Of SEQ ID NO. 284
MAANLPPGFRFCPSDEELVVHFLHRKAALLPCHPDVIPDLDLYPYDPWELDGKALSEGKQCYFYSRRTQNRITNNGCWKPMVGHVEEPILASENNKLVGIKKYFIFYAAEGIKTNWIMEEYLLSEHRTSHDSSPSTKSSKTRARSKQDYSKWVICRVYERSYEEEEDGGKELSCLDEVFLSLEDLDEISLPN

SEQ ID NO: 300 - protein, 198 aa, Vitis vinifera
  misc_feature (8)..(127): Pfam Name: NAM Pfam Description: No apical meristem (NAM) protein
  misc_feature: Public GI ID no. 157359819
  misc_feature: Bit score of 373.9 for HMM based on sequences of Figure 49
  misc_feature: Functional Homolog Of SEQ ID NO. 284
MEEGSINLPPGFQFYPTDEELVLDFLYRKASLLPCYPNIIPDLDSYVHDPWELSGKALSSGNQWYFFSQKTQDRATKNGYWKQLDIDEAIYTSAGKKVGIKKYLLFYMGEAPEGIETNWIMQEYSLSNSGLGCTSYKRIAGKKILDGVEWVLCRVYERKSSQHGFWCDEDDDDGTELSCLDEIFLSLDDDLDEISLPN

SEQ ID NO: 301 - DNA, 579 bp, Populus balsamifera subsp. trichocarpa
  misc_feature: Ceres Annot ID no. 1439208
  misc_feature: Encodes the peptide sequence at SEQ ID NO. 302
atgggtagtgttaatcttccacctggttttcggttttgccctagtgatgaagagctcgtagtgcattttcttcatcgtaaagcagctcttttaccttgccatccagatgtgatccccgatcttggtctttatccttatgatccatggcaacttgatggcacgtacagcatcttaagcaaagcgctgtccgagggtaaacaacgctatttctatagcagaaggacacaaaacaagattaccagcaatggatgctggaagccaatggccggccgtggcgaagagcttgtgcttgcaagtgatagcaacaaaacagtaggaacgaagaagtactttctgttttatacagctgatggtgtaagaactaactgggtaatggaagagtacagactatcaggatttgacacttctgcctctactaaaacaagaaaccggcaaaaacaagattatagtaaatgggttatttgtcgagtctacgagcgagatcttgacgaggacgacagtggaacagatcagctctcatgtctagatgaagtttttctatctttggacgatcttgatgaaataagtttgccaaactaa

SEQ ID NO: 302 - protein, 192 aa, Populus balsamifera subsp. trichocarpa
  misc_feature (6)..(131): Pfam Name: NAM Pfam Description: No apical meristem (NAM) protein
  misc_feature: Ceres Annot ID no. 1439208
  misc_feature: Bit score of 350.1 for HMM based on sequences of Figure 49
  misc_feature: Functional Homolog Of SEQ ID NO. 284
MGSVNLPPGFRFCPSDEELVVHFLHRKAALLPCHPDVIPDLGLYPYDPWQLDGTYSILSKALSEGKQRYFYSRRTQNKITSNGCWKPMAGRGEELVLASDSNKTVGTKKYFLFYTADGVRTNWVMEEYRLSGFDTSASTKTRNRQKQDYSKWVICRVYERDLDEDDSGTDQLSCLDEVFLSLDDLDEISLPN

SEQ ID NO: 303 - DNA, 588 bp, Populus balsamifera subsp. trichocarpa
  misc_feature: Ceres Annot ID no. 1450728
  misc_feature: Encodes the peptide sequence at SEQ ID NO. 304
atgggcgatcatggctgcagcggcaaccttcctcctggatttattttcagcccatctgatgaagagctcatccttcactttctcgatcgcaaggcctctctcttaccttgccaccctgacatcattcccgatcttggtctttatcctcaggatccttggcagcttgaaggcagggctctgtggagtgaaaaccagtggtactactttagtcgagtgatggagaaccaagcaacaggaaatgggttttggaagccattagatattgaagaacctatatttagttcgagtactggtaagaaggttggattaaagaaataccttgtgtactgcattggtcccgaaggtgtagaaacaaattggatgatgcaggaatatcatctttgcagtagtaagtcgagcggcaaatcctacaagagaaagcaaaaattagattgcagtaaatggatcctatgtcgagtttatcagagggaaggaagctgttccaagagttcaaaccacagtgatgatgatgatggaaccgagctttcatgcctagatgagatgttcttatcaatggatgatcttgatgatataagttttccaaattag

SEQ ID NO: 304 - protein, 195 aa, Populus balsamifera subsp. trichocarpa
  misc_feature (10)..(128): Pfam Name: NAM Pfam Description: No apical meristem (NAM) protein
  misc_feature: Ceres Annot ID no. 1450728
  misc_feature: Bit score of 341.2 for HMM based on sequences of Figure 49
  misc_feature: Functional Homolog Of SEQ ID NO. 284
MGDHGCSGNLPPGFIFSPSDEELILHFLDRKASLLPCHPDIIPDLGLYPQDPWQLEGRALWSENQWYYFSRVMENQATGNGFWKPLDIEEPIFSSSTGKKVGLKKYLVYCIGPEGVETNWMMQEYHLCSSKSSGKSYKRKQKLDCSKWILCRVYQREGSCSKSSNHSDDDDGTELSCLDEMFLSMDDLDDISFPN

SEQ ID NO: 305 - DNA, 591 bp, Populus balsamifera subsp. trichocarpa
  misc_feature: Ceres Annot ID no. 1456235
  misc_feature: Encodes the peptide sequence at SEQ ID NO. 306
atgggagatcatggctgcagtggtaaccttcctccgggatttgttttcagccccaccgatgaagaacttgtccttcactttcttcatcgcaaggcctcactcttaccttgcaaccctgacatcattcctgatcttggtctctatccccatgatccctggcaacttgaaggcaaggctttgtcaagtggaaaccagtggtactactttagtcaagtgatggagaaccaagtcacagaaaatgggttttggaagtcattagatactgaagaacctatatttagtagtgctggtaagaaggttggattaaagaaataccttgtgtattgcattggtgctgaaggtgtagaaacaagctggatgatgcaggaatatcatctttgcaacagtaaattgagcggcacatcttacaagagaaagcaaaaactagattgccatcaatggatcctgtgtcgagtctatgaaagggagggaagctgcatccaaaacgtcggcaataccactgatgatgatgacgggactgaactttcatgtctagatgagatgttcttatcaatggatgatgatcttgatgatataagttttccaaattag

SEQ ID NO: 306 - protein, 196 aa, Populus balsamifera subsp. trichocarpa
  misc_feature (10)..(127): Pfam Name: NAM Pfam Description: No apical meristem (NAM) protein
  misc_feature: Ceres Annot ID no. 1456235
  misc_feature: Bit score of 335.1 for HMM based on sequences of Figure 49
  misc_feature: Functional Homolog Of SEQ ID NO. 284
MGDHGCSGNLPPGFVFSPTDEELVLHFLHRKASLLPCNPDIIPDLGLYPHDPWQLEGKALSSGNQWYYFSQVMENQVTENGFWKSLDTEEPIFSSAGKKVGLKKYLVYCIGAEGVETSWMMQEYHLCNSKLSGTSYKRKQKLDCHQWILCRVYEREGSCIQNVGNTTDDDDGTELSCLDEMFLSMDDDLDDISFPN

SEQ ID NO: 307 - protein, 160 aa, Oryza sativa subsp. indica
  misc_feature (7)..(124): Pfam Name: NAM Pfam Description: No apical meristem (NAM) protein
  misc_feature: Public GI ID no. 116310781
  misc_feature: Bit score of 312.1 for HMM based on sequences of Figure 49
  misc_feature: Functional Homolog Of SEQ ID NO. 284
MAGASNLPPGFHFFPSDEELIIHFLRRKASLLPCQPDIVPTLILNLYDPWELNGKALQSGNQWYFFSHATQTRTSPNGHWKPIADETVISGGCNVGLKKTLIFFIGEPFEAIKTNWVMHEYHLMDGSTNCSSSSTSSSSSKRSHKKKGHSDTESKNWVIC

SEQ ID NO: 308 - protein, 200 aa, Glycine max
  misc_feature (8)..(127): Pfam Name: NAM Pfam Description: No apical meristem (NAM) protein
  misc_feature: Public GI ID no. 187940289
  misc_feature: Bit score of 283 for HMM based on sequences of Figure 49
  misc_feature: Functional Homolog Of SEQ ID NO. 284
MEDGSVNLPPGFFFSPTDEELVLHFLYCKASLIPCHPNIIPDLHPSQLAPWELNGKALLSGNQYYFFTKVNENRARENGYWKDTGVTEPILSTFDKKVGMKKYLVFHIGEAPQGTETSWVMQEYYICSSGFDTASYRSARRRRKHDQSWSKWVLCKVYEKIRSQQSVDCYRDDDDDGSGSELSWLDEVYLSLDDDLKEIG

SEQ ID NO: 309 - DNA, 1680 bp, Arabidopsis thaliana
  misc_feature: Ceres Annot ID no. 837136
  misc_feature: Encodes the peptide sequence at SEQ ID NO. 310
atgagtcttcgtgtagtttcctccgttttctccggaatcaatcgaatccctaacctccacgagactcatactcttcttcgctctcatgtcttctctttcttcttcaaaccggcgaatatcggtagtatacggcgactggtcttatccccatcatatggagaccggagcagagatagtgttggctccgccgccgatgtttcgtcatctattctcgacgacgagcttctgagcagcgtatccgccgttagagatgccgatgaagcgctcgcgatgatttctgatcggttcgggtcaaatcgcggtggaatcgttgaacttgaagattgccgttcgattatctccgctgctgtcagtcgcggcaatgtggaccttgcgttgtcgatattctacaccatgcgagcgagtttcgatttaggtggaagtgacaatgatcgatggagttggtcaaggcctgatgttgaagtgtacacgatgttggttaatggtcttgctgcttccttaagggtttctgattctttaaggattatcagagatatttgccgtgttggtatctcccctgctgaggaggttccctttggtaaaattgtgagatgtccgagctgtttgattgccatagctgttgcacaaccacagcatggagttcagattgtatcttgcgctaattgccgttaccaatacgagcttttctctggtgacataactagcattgactcagaagagctcggcaaggacattcctctctgggaaaaagggctcagacttatccagataaagaagaacaaaatcacatcttcagtgcactctattgtggtacagactccttccggtacagcacgaacgcaccggtttgccactgagacagccgaactccctgcgcaagaaggagaaagagtgacaattgcatccgctgctccttctaatgtttacagacaagtgggacctttcaagtttatctccaaagctccaaacttttaccctggagaacctatgagcctcacaaaacacaaggatggacgagaatctatcttgctaaggcctcctagtaaagatggagataagatcttacaaccctcgtttctaataccccttcttgcaattttggctactggagatgctgcttctggtgttattgatcccagtttgcctcagttactctcagttgctactgttacatcactagcgataggagcaaccgtaaattcttttgtccttcctaagctaaatcagctccctgagcgaacagtagatgtggttggtatcaagcagcaacttttatctcaatatgatgtgctccagcgtcgcattagagatctaaaagaagcagttgagaaagaggtgtggatgttggctcgaatgtgccagctcgagaacaaaattttagcagtgggagagccagcttaccgtactcgaagaacaagagtaaagaaggtacgagaaagtctagagaactccataaagggaaagattgatctgatcgatagttatgctagaatatcttcaatgattgagattgaggtggaaatggacagtgatgttcttgcagccgaggcagtgaacaatactgaaaacattgctcaacagatagagcagatcatggaacttgaaaaccttgaagagaaatggaaaatacaggctgaagcaaacgacgaggccgaaagactacttagctcccaaccttaa

SEQ ID NO: 310 - protein, 490 aa, Arabidopsis thaliana
  misc_feature: Ceres Annot ID no. 837136
  misc_feature: Bit score of 1149.6 for HMM based on sequences of Figure 2
  misc_feature: Functional Homolog Of SEQ ID NO. 310
  misc_feature: in Figure 2
MSLRVVSSVFSGINRIPNLHETHTLLRSHVFSFFFKPANIGSIRRLVLSPSYGDRSRDSVGSAADVSSSILDDELLSSVSAVRDADEALAMISDRFGSNRGGIVELEDCRSIISAAVSRGNVDLALSIFYTMRASFDLGGSDNDRWSWSRPDVEVYTMLVNGLAASLRVSDSLRIIRDICRVGISPAEEVPFGKIVRCPSCLIAIAVAQPQHGVQIVSCANCRYQYELFSGDITSIDSEELGKDIPLWEKGLRLIQIKKNKITSSVHSIVVQTPSGTARTHRFATETAELPAQEGERVTIASAAPSNVYRQVGPFKFISKAPNFYPGEPMSLTKHKDGRESILLRPPSKDGDKILQPSFLIPLLAILATGDAASGVIDPSLPQLLSVATVTSLAIGATVNSFVLPKLNQLPERTVDVVGIKQQLLSQYDVLQRRIRDLKEAVEKEVWMLARMCQLENKILAVGEPAYRTRRTRVKKVRESLENSIKGKID

SEQ ID NO: 311 - protein, 593 aa, Vitis vinifera
  misc_feature: Public GI ID no. 157360325
  misc_feature: Bit score of 1566.7 for HMM based on sequences of Figure 2
  misc_feature: Functional Homolog Of SEQ ID NO. 310
  misc_feature: in Figure 2
MTLNLTSPWLSRFSRPSPHVSVPEISTFRTLTFFVSPTSKSFRTKASENDVARASASKLLDDELLSRVSRARDADEALEMIAERWERSGGVVDTADCCSIISAALDRNNADLALSVFYSMRSSFDQVASGSSALIERWKWSRPDVRVYTSLVRGLAASLRVSEALRMIADVCRVGVSPGEEVPFGKLVRCPSCMIAVAVAQPQHGIQIVSCSKCRYQYELVSGDIASIESEEISMDVPAWKRGLRFLQIMKESIPAAVHSIVVQTPSGMARTHRFATKTVDLPAQEGERVTIALAAPSNVYREIGPFKVSPKAPNFYPGEPMCLTNHKDGRESLLVRAPRKDGSSSLLNPSILFPLLVVLAAGDAASGIIDPSLPQFLSVAAVGSLAVGTTLNTLVFPQMNRLPQRTVDTIAIKQQLLSQYDMLQSRIKDLKGAAEKEVWMLARMCQLENKILAIGEPSYRARKSRVKKVREGLENSLKGRIELIDSYARISSMIEIEVEMASDVLAAEAASNVESIAEQIQQIMELENLEEACTWDFFFPTPNIDLFYSIYQRKVVIDNHHSFIMQRWRQVAEANDEVERLLSSELIPTEQV

SEQ ID NO: 312 - DNA, 1896 bp, Populus balsamifera subsp. trichocarpa
  misc_feature: Ceres Annot ID no. 1500617
  misc_feature: Encodes the peptide sequence at SEQ ID NO. 313
atgacagtaaacttaggctcctcctcctgcctctctctcttgttctcacactctcctcctcctccagtctccaaactctttccaaaaccaaactacattactacagccactctcatctccctcgtattttctttcaataaaaccactccattcctttccacttcaagaacaccgtctttaaaaccactccctttttccctaagccaatccgataacggcatcgtagacaacaccaactctgttttatcactaaacgaagagtcactttctcgagtctccgctgctaaagacgccaatgaagcattacaaattatcgccgaaattactaacagaagcaacggtttagttagtgtaaccgattgtcgtggtattataacggccgccattgatcgctgcaatgccgatttggctctctctgttttttacgctatgcgttccagcttcgaccaaggtgatactgagattgagagatggaaatggtcacggccggatgtcagtgtttacacgtcattagttcaaggtcttgctgcggctttgaaggtttctgacgctcttaagatgattgattatatttgccgcattggagtgtcgcctagcgaagaggttccgttcgggaaggtagtgagatgtccaacttgtatgatagctgttgctgttgcacaacctcagcatggcattcagattgcatcttgtgccaagtgccgataccagtatgagcttgtttctggggatatcactagtattgactcagaagcaatcagcatggatcttccagcttgggaaagggggctgagatttttgcaaataatgaagcaaagtattcctgcagctgttcactccattgtggtacagaccccttctggtatggcacgtacacagagatttgctactgaaacaattgaccttccagcacaagaaggtgaaagggtgaccatttcttcagcagctccatcaaatatttatagagatgttggcccctttaaatttagtccaaaggcgcccaatgtctaccctggagaacctttgtgcctgatgaaccatgaaaatgatcgggagtcacttctgttaagagcccctgtaaaagatggaaagttatccttgcttaacccttctgtccttgttccacttcttgctgtcttggctactggagacgctgcatctggtattattgatcccagcttgccccagttccttttagttgctgctatttcttctctgggtgttggagctactctaaataaactagttctcccgagattgaaccagcttcctcaaaagtcagtggatgtaactgcaatcaagcagaagctgttatctcaatatgatgtgcttcagtctcgcatcaaggaactaaaagaagcagctgaaaaagaggtatggatgttggctcggatgtgtcaactggagaacaaaatttttgctgttggagaactttcttatcgtgctcgtatagataggttgaaaagggtccgagaaggattggaaaagtcactcaaaggactgattggactcattgatagctatgcaagaatttcttccatgattgaaattgaagttgaaatggactctgatgttcttgctgctgaagcaatgagcaatgtggaaagcattgctgaacagatacagaaaattatggaactggaaaatcttgaagagagatggagactacaagctgaagcaaatgatgaggctgaaagactacttagttcccaacctgtacctaccgagcaggggaaagaagatgagaggagagggtggctgaggatgacagggatttgccctcttctttccctaccatgtctcttatggtattatgcagtttggatacaaaccgatattagtaaagggttttggcttttactcttgcgggttgcaaaacctgctaatctaaagtag

SEQ ID NO: 313 - protein, 631 aa, Populus balsamifera subsp. trichocarpa
  misc_feature: Ceres Annot ID no. 1500617
  misc_feature: Bit score of 1542.0 for HMM based on sequences of Figure 2
  misc_feature: Functional Homolog Of SEQ ID NO. 310
  misc_feature: in Figure 2
MTVNLGSSSCLSLLFSHSPPPPVSKLFPKPNYITTATLISLVFSFNKTTPFLSTSRTPSLKPLPFSLSQSDNGIVDNTNSVLSLNEESLSRVSAAKDANEALQIIAEITNRSNGLVSVTDCRGIITAAIDRCNADLALSVFYAMRSSFDQGDTEIERWKWSRPDVSVYTSLVQGLAAALKVSDALKMIDYICRIGVSPSEEVPFGKVVRCPTCMIAVAVAQPQHGIQIASCAKCRYQYELVSGDITSIDSEAISMDLPAWERGLRFLQIMKQSIPAAVHSIVVQTPSGMARTQRFATETIDLPAQEGERVTISSAAPSNIYRDVGPFKFSPKAPNVYPGEPLCLMNHENDRESLLLRAPVKDGKLSLLNPSVLVPLLAVLATGDAASGIIDPSLPQFLLVAAISSLGVGATLNKLVLPRLNQLPQKSVDVTAIKQKLLSQYDVLQSRIKELKEAAEKEVWMLARMCQLENKIFAVGELSYRARIDRLKRVREGLEKSLKGLIGLIDSYARISSMIEIEVEMDSDVLAAEAMSNVESIAEQIQKIMELENLEERWRLQAEANDEAERLLSSQPVPTEQGKEDERRGWLRMTGICPLLSLPCLLWYYAVWIQTDISKGFWLLLLRVAKPANLK

SEQ ID NO: 314 - DNA, 1704 bp, Solanum lycopersicum
  misc_feature: Ceres Annot ID no. 8457473
  misc_feature: Encodes the peptide sequence at SEQ ID NO. 315
atgactctctccttgttttctcctccatttcctcctttttctttcccttattatcgcttccctgataattactacttctccaaaaacctcactttttcttactattgttcgtctaaaacgtctagtaatttcaaggtgaaagcttcgttgagtgaagcggaaggtgagaaaaagttgttagatgatggattgattagtttggtttcgtctgtgaaagatgcgggtgaggtgttggatgtgatagctcaaaacaccgggaggagtggtggagttgtgagcggttctgattgttgtttgattatcgctgccgcacttgaacggagcaatgctgaattggcgatatctgtatttgatgctatgcgttccacttttcatcctgggacgactgttttagacagaggcccatcctatgatagatggaggtggtcaaggccagatgttaacacatataccttgttagttcgaggacttgcaacactgctgagggtttcggatgcccttaaaatcattgccaatgtttgtcgagtgagcatttctcctaatgaagaggttctctttggcaaagttgtccgatgtccaagttgtgagattgctgttactgttgctcagccacaagatggtatccagtgtgaacacgcaatggctgaaagaaagtgctcttgttctcctcctgccgaacgcagcatggatattcctgcatggagaaggggactaagattcctgccgataaagcaaaacattccagctgctgttcattcgattgtggtggagactccatctggaatggcacgaacacacagatttgctactgaaacagttgatcttcctgcacaagaaggtgagagagtgaccattgctctagcagcaccaccaaatgtttaccgagaggtgggtccattaaagttcaatccaaaagctccaaacgtctacccaggagagcctttgtgcttgactaaccacaaagatggccgtgaatcacccttactaagagcacccaaaaaagataaaaccccatcgttgttaaatccttccatccttgttccgcttcttgctgtatttgccactggagatgctgcgtctggaatgatagatcccaacttgcctcagataataacagttgctgcagtttcctcaatcgctcttggggccacgttaaacagcctggtttttcctcaattcagcaagcttcctcagagattagttgataccattggcatcaggcagcaactcttatctcagtatgatgtgctccaatcacggataaaggagttgaaagaatctgctgagaatgaggtttggatgttggcacgcatgtgccaactggaaaacaaaatctttgctgttggagaacctgcttatcgggcccggagaagtagagtgaaaagggtgcgtgaaagcatagaaaactcccttgggagaacgatcgagctgattgaaagctatgcaagaatatcgtccattatagaaattgaagtagagatggattcagatgttcttgctgctgaagcagcaggcaatgcagaaagtattgctgaacaaatacaacaaataatggagcttgaaaatcttgaggaagtatgtgttgtttacttccaaatactgttttttaatcctaaatggaaaatccaagcagaggcaaacgatgaagccgaaaggcttctcagttctgaacccttaacaacagaaaatgtttcagaaagatga

SEQ ID NO: 315 - protein, 567 aa, Solanum lycopersicum
  misc_feature: Ceres Annot ID no. 8457473
  misc_feature: Bit score of 1460.8 for HMM based on sequences of Figure 2
  misc_feature: Functional Homolog Of SEQ ID NO. 310
  misc_feature: in Figure 2
MTLSLFSPPFPPFSFPYYRFPDNYYFSKNLTFSYYCSSKTSSNFKVKASLSEAEGEKKLLDDGLISLVSSVKDAGEVLDVIAQNTGRSGGVVSGSDCCLIIAAALERSNAELAISVFDAMRSTFHPGTTVLDRGPSYDRWRWSRPDVNTYTLLVRGLATLLRVSDALKIIANVCRVSISPNEEVLFGKVVRCPSCEIAVTVAQPQDGIQCEHAMAERKCSCSPPAERSMDIPAWRRGLRFLPIKQNIPAAVHSIVVETPSGMARTHRFATETVDLPAQEGERVTIALAAPPNVYREVGPLKFNPKAPNVYPGEPLCLTNHKDGRESPLLRAPKKDKTPSLLNPSILVPLLAVFATGDAASGMIDPNLPQIITVAAVSSIALGATLNSLVFPQFSKLPQRLVDTIGIRQQLLSQYDVLQSRIKELKESAENEVWMLARMCQLENKIFAVGEPAYRARRSRVKRVRESIENSLGRTIELIESYARISSIIEIEVEMDSDVLAAEAAGNAESIAEQIQQIMELENLEEVCVVYFQILFFNPKWKIQAEANDEAERLLSSEPLTTENVSER

SEQ ID NO: 316 - protein, 565 aa, Oryza sativa subsp. japonica
  misc_feature: Public GI ID no. 115475946
  misc_feature: Bit score of 1423.1 for HMM based on sequences of Figure 2
  misc_feature: Functional Homolog Of SEQ ID NO. 310
  misc_feature: in Figure 2
MALALLSPSSASAHRLPRPISSPPLGRAASATSIGSSFFPLCSSPPSSGSCSLRRASSAGGASEPEASGATSLDADLLRRVAGAADAGEALDIVAESAGGTGGLDASDCNAIVAAALDRGNVELALSVFEAMRSGFARAGAWRWARPDVRTYALLVQRLAAALRVSDALRIIDYVSRAGISSAEEVPFGMIIRCPSCMVAVAVAQPQHGTQTVSCSKCRYQYELFSGDIMSIESEEVSMDISALDKALRFINVIKDGLPAAVHSIVIRTPSGTARTHRFATQTVELPAQEGERVTISLAAPSNVYREMGPLKISARSQGFRPGEPMSLTNHINRQVSRLLRAPSKNEGPFVFNPYLLVGALALLASGDAASAFIDPSLPRFITATAFASAAVGTALNQVILPEIRKLPQKTVDIIAVRQQLLSQYDMLQTRLKDLKQLSEKEVWMLARMSQLENKILAVGEPSYRARRGRVKRVLESLESTLLAKIELMESYAKLCSMIEIEVEMDSDVIVAEAASSAERISEQIQQLMEIDSLEEQWRIQAEANDEAERLLNSDSSETFSAEHV

SEQ ID NO: 317 - protein, 607 aa, Picea sitchensis
  misc_feature: Public GI ID no. 116789121
  misc_feature: Bit score of 1563.0 for HMM based on sequences of Figure 2
  misc_feature: Functional Homolog Of SEQ ID NO. 310
  misc_feature: in Figure 2
MALNIPWPFNFSSITQTSSYASSPDCTGIFRTLPVVVTANSFASRASFNGLQFSLVMRTLKGRAAENEGFETAEARVRNAEGTDGPSSSSSQSALLFQNENLLRKVSAAKDAEEALSVIAEHFQGSNSNGGTVSSEDSSAIITAALARNNADLAFSVLQAMRCDLIQNKLERELQDGNVTNSSIQCWRWAQPDVATYTTLIRGLAASLRVSDAIRTIKDISCVGNPLGDEVSFGKVVKCPYCMVAFAVVQPQHGIQLVSCSRCRYQYELMSGEIVNIESESISTDISVMESGLRFLQIKKQIIPAAIHSIVIRAPNGVACTHRFATQSVDLPAQEGERVTVALAAPSNVGRIIGPFRLSTRTPRHRPGEPMCITNHVTGLEFQLLQAPSKYGNSASFDTALVVPAVALLASGDAATAFIDPSLPTLILSVAATAIVLGTAMNTLVLPQLNQLPQRMVDALAVRQQLLSQYNLLQSRLKELIQAAEEEVWMLARLCHLEHKIEVVGEPSYSARKSRVKKARENLDESLVARLKLIDSYAKLASMIEIEVEMDKDVFAAEEVTDAASIAEQIERLMELEDLEKQWRIQAEANDEVERLLRAAPVLPDSV

SEQ ID NO: 318 - protein, 547 aa, Arabidopsis thaliana
  misc_feature: Public GI ID no. 12323467
  misc_feature: Bit score of 1281.7 for HMM based on sequences of Figure 2
  misc_feature: Functional Homolog Of SEQ ID NO. 310
MSLRVVSSVFSGINRIPNLHETHTLLRSHVFSFFFKPANIGSIRRLVLSPSYGDRSRDSVGSAADVSSSILDDELLSSVSAVRDADEALAMISDRFGSNRGGIVELEDCRSIISAAVSRGNVDLALSIFYTMRASFDLGTLISTLLLTQSGSDNDRWSWSRPDVEVYTMLVNGLAASLRVSDSLRIIRDICRVGISPAEEVPFGKIVRCPSCLIAIAVAQPQHGVQIVSCANCRYQYELFSGDITSIDSEELGSRGKVIQLMLGVRAVFVQTPSGTARTHRFATETAELPAQEGERVTIASAAPSNVYRQVGPFKFISKAPNFYPGEPMSLTKHKDGRESILLRPPSKDGDKILQPSFLIPLLAILATGDAASGVIDPSLPQLLSVATVTSLAIGATLPERTVDVVGIKQQLLSQYDVLQRRIRDLKEAVEKEVWMLARMCQLENKILAVGEPAYRTRRTRVKKVRESLENSIKGKIDLIDSYARISSMIEIEVEMDSDVLAAEAVNNTENIAQQIEQIMELENLEEKWKIQAEANDEAERLLSSQP

SEQ ID NO: 319 - protein, 521 aa, Arabidopsis thaliana
  misc_feature: Public GI ID no. 6633808
  misc_feature: Bit score of 1193.7 for HMM based on sequences of Figure 2
  misc_feature: Functional Homolog Of SEQ ID NO. 310
MSLRVVSSVFSGINRIPNLHETHTLLRSHVFSFFFKPANIGSIRRLVLSPSYGDRSRDSVGSAADVSSSILDDELLSSVSAVRDADEALAMISDRFGSNRGGIVELEDCRSIISAAVSRGNVDLALSIFYTMRASFDLGTLISTLLLTQSGSDNDRWSWSRPDVEVYTMLVNGLAASLRVSDSLRIIRDICRVGISPAEEVPFGKIVRCPSCLIAIAVAQPQHGVQIVSCANCRYQYELFSGDITSIDSEELGYSNHCIGFQVQTPSGTARTHRFATETAELPAQEGERVTIASAAPSNVYRQVGPFKFISKAPNFYPGEPMSLTKHKDGRESILLRPPSKDGDKILQPSFLIPLLAILATGDAASGVIDPSLPQLLSVATVTSLAIGATLPERTVDVVGIKQQLLSQYDVLQRRIRDLKEAVEKEVWMLARMCQLENKILAVGEPAYRTRRTRVKKVRESLENSIKGKIDLIDSYARISSMIEIEVEMDSDVLAAEAVNNTENIAQQIEQIMELENLEEV

SEQ ID NO: 320 - protein, 556 aa, Vitis vinifera
  misc_feature: Public GI ID no. 147766222
  misc_feature: Bit score of 1421.0 for HMM based on sequences of Figure 2
  misc_feature: Functional Homolog Of SEQ ID NO. 310
MTLNLTSPWLSRFSRPSPHVSVPEISTFRTLTFFVSPTSKSFRTKASENDVARASASKLLDDELLSRVSRARDADEALEMIAERWERSGGVVDTADCCSIISAALDRNNADLALSVFYSMRSSFDQVASGSSALIERWKWSRPDVRVYTSLVRGLAASLRVSEALRMIADVCRVGVSPGEEVPFGKLVRCPSCMIAVAVAQPQHGIQIVSCSKCRYQYELVSGDIASIESEEISMDVPAWKRGLRFLQIMKESIPAAVHSIVVQTPSGMARTHRFATKTVDLPAQEGERVTIALAAPSNVYREIGPFKVSPKAPNFYPGEPMCLTNHKDGRESLLVRAPRKDGSSSLLNPSILFPLLVVLAAGDAASGIIDPSLPQFLSVAAVGSLAVGTTLNTLVFPQMNRLPQRTVDTIAIKQQLLSQYDMLQSRIKDLKGAAEKEVWMLARMCQLENKILAIGEPSYRSGSKFKCLKKHSFVFSARKSRVKKVREGLENSLKGRIELIDSYARISSMIEIEVEMASDVLAAEAASNVRWRQVAEANDEVERLLSSELIPTEQV

SEQ ID NO: 321 - DNA, 1839 bp, Populus balsamifera subsp. trichocarpa
  misc_feature: Ceres Annot ID no. 1491360
  misc_feature: Encodes the peptide sequence at SEQ ID NO. 322
atgacaccaaacttaggcttttgctcctcctcctcctacctctcccgcttctcacactcccctcctctcctcactaaactctctccaaaaccaaactacactaccacagccactctcctctccctcttattttctttccataaaaccgcaccatttttttccacttcaagaacaccatccttaaaaccactcgcttcttcactaagccaatccgccgccgacgacgatgacaacgacaacaataactcttttttatcactaaatgaagactccctctccagagtctccgctgctaaagacgccaatgaagccctgcaaataatatctgtaatcactaataaaagtaacggtttagttagtgtaactgattgttgtggtattataactgccgccattgatcgcggcaatactgatttggctctctctgttttttacgctatgcgttccagcttcgatcaaggcgttactgagatagaaagatggaaatggtcgcggccggatgttagtgtttacacgtcattagttcaaggtcttgctgcggcattgaaggtttctgatgctcttaagatgattgattatatttgccgcgttggtgtgtcgcctagcgaggacgaggtgccatttggtatggttgtgagatgtccaacttgtatgatagctgttgctgttgcacaacctcaacatggcattcagattgcatcttgttccaagtgccggtaccaatacgagcttgtttctggggatatcactagtattgactcagaagcaatcagcatggatcttcctgcttgggaaagggggctaagatttttgcaactaatgaagcaaagtattcctgcagctgttcactccattgtggtacagaccccttctggtatggcaaggacacagagatttgctactgaaacagtagaccttccagcacaaaaaagtgaaagggtgaccattgcttcagcagttccatcaaatgtttacagaaatgtgggcccctttaaatttagtccaaaggctcccaatgtctaccctggagaaccaatgtgcctgacaaaccatgaaaatggccgggagtcactgttgttaagagcccctgtaaaagatggaaagccatccttgcttaacccttctgttcttgttccgctccttgctgtcttggttgctggagatgctgcatctggtattattgatcccagcttgccccaattccttgtagttgctgctatttcttctcttggtgttggagctactctaaatacactggttttccctggattgaaccagcttcctcaaaagtcagtggatgcaactgcaatcaagcagaagctgctgtctcagtatgacttacttcagtctcgcattaaggaactaaaagaagctgctgaaaaagaggtttggatgttggctcggatgtgtcagctggagaacaagatttttgctgtaggagaaccttcttatcgtgcccgtagaactagggtgaaaagggtccgagaaggcctggaaaattcactcgaaggacggatcgaactcattgatagctatgcaagaatttcttcgatgattgaaattgaggttgaaatggactctgatgttcttgctgcggaagcgttgagcaatgtggaaagcatagctgaacagatacagcaaatcatggagctggaaaatcttgaagagagatggagactacaagctgaagcaaatgacgaggctgaaagactacttagttctcaacctccaccaacctccagtttgcatagtgttgcattggtataccttatgcctctacttgagaagatctgctcggttgaatcatctaaaaagcaggcaggaaatacgcttgcgtga

SEQ ID NO: 322 - protein, 612 aa, Populus balsamifera subsp. trichocarpa
  misc_feature: Ceres Annot ID no. 1491360
  misc_feature: Bit score of 1436.8 for HMM based on sequences of Figure 2
  misc_feature: Functional Homolog Of SEQ ID NO. 310
MTPNLGFCSSSSYLSRFSHSPPLLTKLSPKPNYTTTATLLSLLFSFHKTAPFFSTSRTPSLKPLASSLSQSAADDDDNDNNNSFLSLNEDSLSRVSAAKDANEALQIISVITNKSNGLVSVTDCCGIITAAIDRGNTDLALSVFYAMRSSFDQGVTEIERWKWSRPDVSVYTSLVQGLAAALKVSDALKMIDYICRVGVSPSEDEVPFGMVVRCPTCMIAVAVAQPQHGIQIASCSKCRYQYELVSGDITSIDSEAISMDLPAWERGLRFLQLMKQSIPAAVHSIVVQTPSGMARTQRFATETVDLPAQKSERVTIASAVPSNVYRNVGPFKFSPKAPNVYPGEPMCLTNHENGRESLLLRAPVKDGKPSLLNPSVLVPLLAVLVAGDAASGIIDPSLPQFLVVAAISSLGVGATLNTLVFPGLNQLPQKSVDATAIKQKLLSQYDLLQSRIKELKEAAEKEVWMLARMCQLENKIFAVGEPSYRARRTRVKRVREGLENSLEGRIELIDSYARISSMIEIEVEMDSDVLAAEALSNVESIAEQIQQIMELENLEERWRLQAEANDEAERLLSSQPPPTSSLHSVALVYLMPLLEKICSVESSKKQAGNTLA

SEQ ID NO: 323 - DNA, 1764 bp, Populus balsamifera subsp. trichocarpa
  misc_feature: Ceres Annot ID no. 1447617
  misc_feature: Encodes the peptide sequence at SEQ ID NO. 324
atgacagtaaacttaggctcctcctcctgcctctctctcttgttctcacactctcctcctcctccagtctccaaactctttccaaaaccaaactacattactacagccactctcatctccctcgtattttctttcaataaaaccactccattcctttccacttcaagaacaccgtctttaaaaccactccctttttccctaagccaatccgataacggcatcgtagacaacaccaactctgttttatcactaaacgaagagtcactttctcgagtctccgctgctaaagacgccaatgaagcattacaaattatcgccgaaattactaacagaagcaacggtttagttagtgtaaccgattgtcgtggtattataacggccgccattgatcgctgcaatgccgatttggctctctctgttttttacgctatgcgttccagcttcgaccaaggtgatactgagattgagagatggaaatggtcacggccggatgtcagtgtttacacgtcattagttcaaggtcttgctgcggctttgaaggtttctgacgctcttaagatgattgattatatttgccgcattggagtgtcgcctagcgaagaggttccgttcgggaaggtagtgagatgtccaacttgtatgatagctgttgctgttgcacaacctcagcatggcattcagattgcatcttgtgccaagtgccgataccagtatgagcttgtttctggggatatcactagtattgactcagaagcaatcagcatggatcttccagcttgggaaagggggctgagatttttgcaaataatgaagcaaagtattcctgcagctgttcactccattgtggtacagaccccttctggtatggcacgtacacagagatttgctactgaaacaattgaccttccagcacaagaaggtgaaagggtgaccatttcttcagcagctccatcaaatatttatagagatgttggcccctttaaatttagtccaaaggcgcccaatgtctaccctggagaacctttgtgcctgatgaaccatgaaaatgatcgggagtcacttctgttaagagcccctgtaaaagatggaaagttatccttgcttaacccttctgtccttgttccacttcttgctgtcttggctactggagacgctgcatctggtattattgatcccagcttgccccagttccttttagttgctgctatttcttctctgggtgttggagctactctaaataaactagttctcccgagattgaaccagcttcctcaaaagtcagtggatgtaactgcaatcaagcagaagctgttatctcaatatgatgtgcttcagtctcgcatcaaggaactaaaagaagcagctgaaaaagagatttcttccatgattgaaattgaagttgaaatggactctgatgttcttgctgctgaagcaatgagcaatgtggaaagcattgctgaacagatacagaaaattatggaactggaaaatcttgaagaggcagaaaattcttgtttgatgcagagatggagactacaagctgaagcaaatgatgaggctgaaagactacttagttcccaacctgtacctaccgagcaggggaaagaagatgagaggagagggtggctgaggatgacagggatttgccctcttctttccctaccatgtctcttatggtattatgcagtttggatacaaaccgatattagtaaagggttttggcttttactcttgcgggttgcaaaacctgctaatctaaagtag

SEQ ID NO: 324 - protein, 587 aa, Populus balsamifera subsp. trichocarpa
  misc_feature: Ceres Annot ID no. 1447617
  misc_feature: Bit score of 1308.4 for HMM based on sequences of Figure 2
  misc_feature: Functional Homolog Of SEQ ID NO. 310
MTVNLGSSSCLSLLFSHSPPPPVSKLFPKPNYITTATLISLVFSFNKTTPFLSTSRTPSLKPLPFSLSQSDNGIVDNTNSVLSLNEESLSRVSAAKDANEALQIIAEITNRSNGLVSVTDCRGIITAAIDRCNADLALSVFYAMRSSFDQGDTEIERWKWSRPDVSVYTSLVQGLAAALKVSDALKMIDYICRIGVSPSEEVPFGKVVRCPTCMIAVAVAQPQHGIQIASCAKCRYQYELVSGDITSIDSEAISMDLPAWERGLRFLQIMKQSIPAAVHSIVVQTPSGMARTQRFATETIDLPAQEGERVTISSAAPSNIYRDVGPFKFSPKAPNVYPGEPLCLMNHENDRESLLLRAPVKDGKLSLLNPSVLVPLLAVLATGDAASGIIDPSLPQFLLVAAISSLGVGATLNKLVLPRLNQLPQKSVDVTAIKQKLLSQYDVLQSRIKELKEAAEKEISSMIEIEVEMDSDVLAAEAMSNVESIAEQIQKIMELENLEEAENSCLMQRWRLQAEANDEAERLLSSQPVPTEQGKEDERRGWLRMTGICPLLSLPCLLWYYAVWIQTDISKGFWLLLLRVAKPANLK

SEQ ID NO: 325 - DNA, 2043 bp, Populus balsamifera subsp. trichocarpa
  misc_feature: Ceres Annot ID no. 1438527
  misc_feature: Encodes the peptide sequence at SEQ ID NO. 326
atgacaccaaacttaggcttttgctcctcctcctcctacctctcccgcttctcacactcccctcctctcctcactaaactctctccaaaaccaaactacactaccacagccactctcctctccctcttattttctttccataaaaccgcaccatttttttccacttcaagaacaccatccttaaaaccactcgcttcttcactaagccaatccgccgccgacgacgatgacaacgacaacaataactcttttttatcactaaatgaagactccctctccagagtctccgctgctaaagacgccaatgaagccctgcaaataatatctgtaatcactaataaaagtaacggtttagttagtgtaactgattgttgtggtattataactgccgccattgatcgcggcaatactgatttggctctctctgttttttacgctatgcgttccagcttcgatcaaggcgttactgagatagaaagatggaaatggtcgcggccggatgttagtgtttacacgtcattagttcaaggtcttgctgcggcattgaaggtttctgatgctcttaagatgattgattatatttgccgcgttggtgtgtcgcctagcgaggacgaggtgccatttggtatggttgtgagatgtccaacttgtatgatagctgttgctgttgcacaacctcaacatggcattcagattgcatcttgttccaagtgccggtaccaatacgagcttgtttctggggatatcactagtattgactcagaagcaatcagtatggtgttgatcctgggatattcactttttctaaggaaatactcctgccgaacgcagcatggatcttcctgcttgggaaagggggctaagatttttgcaactaatgaagcaaagtattcctgcagctgttcactccattgtggtatgtttttcttgaatttgaatgtcaactggttcttgtactttattcaggtacagaccccttctggtatggcaaggacacagagatttgctactgaaacagtagaccttccagcacaaaaaagtgaaagggtgaccattgcttcagcagttccatcaaatgtttacagaaatgtgggcccctttaaatttagtccaaaggctcccaatgtctaccctggagaaccaatgtgcctgacaaaccatgaaaatggccgggagtcactgttgttaagagcccctgtaaaagatggaaagccatccttgcttaacccttctgttcttgttccgctccttgctgtcttggttgctggagatgctgcatctggtattattgatcccagcttgccccaattccttgtagttgctgctatttcttctcttggtgttggagctactctaaatacactggttttccctggattgaaccagcttcctcaaaagtcagtggatgcaactgcaatcaagcagaagctgctgtctcagtatgacttacttcagtctcgcattaaggaactaaaagaagctgctgaaaaagaggtttggatgttggctcggatgtgtcagctggagaacaagatttttgctgtaggagaaccttcttatcgtcccttctttgtagctcactcatttcattctttcagtgcccgtagaactagggtgaaaagggtccgagaaggcctggaaaattcactcgaaggacggatcgaactcattgatagctatgcaagagttactcttcactctcagatttcttcgatgattgaaattgaggttgaaatggactctgatgttcttgctgcggaagcgttgagcaatgtggaaagcatagctgaacagatacagcaaatcatggagctggaaaatcttgaagaggcatgtttttttttagtttttaccatatttgaaagagaattgagatggagactacaagctgaagcaaatgacgaggctgaaagactacttagttctcaacctccaccaacctccagtttgcatagtgttgcattggtataccttatgcctctacttgagaagatctgctcggttgaatcatctaaaaagcaggcaggaaatacgcttgcgtga

SEQ ID NO: 326 - protein, 680 aa, Populus balsamifera subsp. trichocarpa
  misc_feature: Ceres Annot ID no. 1438527
  misc_feature: Bit score of 1266.4 for HMM based on sequences of Figure 2
  misc_feature: Functional Homolog Of SEQ ID NO. 310
MTPNLGFCSSSSYLSRFSHSPPLLTKLSPKPNYTTTATLLSLLFSFHKTAPFFSTSRTPSLKPLASSLSQSAADDDDNDNNNSFLSLNEDSLSRVSAAKDANEALQIISVITNKSNGLVSVTDCCGIITAAIDRGNTDLALSVFYAMRSSFDQGVTEIERWKWSRPDVSVYTSLVQGLAAALKVSDALKMIDYICRVGVSPSEDEVPFGMVVRCPTCMIAVAVAQPQHGIQIASCSKCRYQYELVSGDITSIDSEAISMVLILGYSLFLRKYSCRTQHGSSCLGKGAKIFATNEAKYSCSCSLHCGMFFLNLNVNWFLYFIQVQTPSGMARTQRFATETVDLPAQKSERVTIASAVPSNVYRNVGPFKFSPKAPNVYPGEPMCLTNHENGRESLLLRAPVKDGKPSLLNPSVLVPLLAVLVAGDAASGIIDPSLPQFLVVAAISSLGVGATLNTLVFPGLNQLPQKSVDATAIKQKLLSQYDLLQSRIKELKEAAEKEVWMLARMCQLENKIFAVGEPSYRPFFVAHSFHSFSARRTRVKRVREGLENSLEGRIELIDSYARVTLHSQISSMIEIEVEMDSDVLAAEALSNVESIAEQIQQIMELENLEEACFFLVFTIFERELRWRLQAEANDEAERLLSSQPPPTSSLHSVALVYLMPLLEKICSVESSKKQAGNTLA

SEQ ID NO: 327 - DNA, 1599 bp, Panicum virgatum
  misc_feature: Ceres Clone ID no. 1818368
  misc_feature: Encodes the peptide sequence at SEQ ID NO. 328
acgccatgtgctcgacgatttgccgctgacacgagtccatggcgcttgctctcctcctgccctcccccgcatcccaccgccgctcgcttcgttctgtctcctctccgcctctcgcgcgtgtcaccaccgccgccagcttcggcctcgcgtttttctcccatctctcctccggctgctgctctctgcagaggactggcgccgcgggcggcgacggcgatggcgccggcgagacctcatcggaagagccggtggctggatggctcgacacggacctgctcaggcgggtctcaggcgcggggaatgcggaccaggcgctggacattgtcgcagagtcggcgggaagttcgggcgccgctctggaagcgcccgaatgcaacgcgatcatcgccgcggcacttgaccgaggcaacgtcgagctcgcgctctcggtgttcgaagccatgcgatccggctttgcgggagtaggaggctgggggtgggcgagaccggacattcggacatatgccttgctcgtacaggggttggcagcctccctgcgtgtttctgatgcaatcaggataatcgattatgtgtcttgcgctggtgtttcttctacagaggagattcctttcgggattattgttcgctgtccaacctgcatggtagcagttgctgttgctcaaccgcaggatggaactcaggttgtttcctgttcgaagtgtcgatatcaatatgaattattttctggagacattacgagcattgaatctgaagaagttagcatggatatttcagctctggagaaggcattgagattcattaatataagaaaagatggtcttccagctgctgtccactctattgtgatccgcgcaccttcaggaatagcacgtactcatagatttgctacccagaatgtagaactccctgctcgagaaggagaaagagtaaccatttcgttggcagccccatccaatatttatcgtgaagtgggtcccctcaagattgccgcacgctcacaaggatttaaaccagacgaacctatgtgtctgactaatcacagaaatggacaaatctcaaagttgctaagaactccatcaaagaatgaaggatcatttttccttagcccatatttattggtcggtgctcttgctttgcttgcttctggagatgctgcttccgtattcattgacccaagtcttcctagacttattacagcaactgcagttgcatcagctgccatcggaacaactctaaatcaagtggtcctgccagaaattcaaaagcttccacaaaaggcggtggatatagttgctgtacggcagcagcttttgtctcagtatgacattcttcagagccgtcttaaggaactgaaacagtttgcacaaaaagaggtgtggatgctcgcaaggatgtgtcaattggacaacaaaatactagcagtgggcgaaccatcttatcgtgctagacgaggtagagtaaagagggtacgggaaagcttggaaagcacactctctgcaaggattgagctaatggaaagttatgcaaaattgtgttcaatgattgaaattgaaattgagatggactctgatgttattgctgctgaagcgggcagcagtg

SEQ ID NO: 328 - protein, 520 aa, Panicum virgatum
  misc_feature: Ceres Clone ID no. 1818368
  misc_feature: Bit score of 1031.1 for HMM based on sequences of Figure 2
  misc_feature: Functional Homolog Of SEQ ID NO. 310
MALALLLPSPASHRRSLRSVSSPPLARVTTAASFGLAFFSHLSSGCCSLQRTGAAGGDGDGAGETSSEEPVAGWLDTDLLRRVSGAGNADQALDIVAESAGSSGAALEAPECNAIIAAALDRGNVELALSVFEAMRSGFAGVGGWGWARPDIRTYALLVQGLAASLRVSDAIRIIDYVSCAGVSSTEEIPFGIIVRCPTCMVAVAVAQPQDGTQVVSCSKCRYQYELFSGDITSIESEEVSMDISALEKALRFINIRKDGLPAAVHSIVIRAPSGIARTHRFATQNVELPAREGERVTISLAAPSNIYREVGPLKIAARSQGFKPDEPMCLTNHRNGQISKLLRTPSKNEGSFFLSPYLLVGALALLASGDAASVFIDPSLPRLITATAVASAAIGTTLNQVVLPEIQKLPQKAVDIVAVRQQLLSQYDILQSRLKELKQFAQKEVWMLARMCQLDNKILAVGEPSYRARRGRVKRVRESLESTLSARIELMESYAKLCSMIEIEIEMDSDVIAAEAGSS

SEQ ID NO: 329 - DNA, 2014 bp, Panicum virgatum
  misc_feature: Ceres Clone ID no. 1784441
  misc_feature: Encodes the peptide sequence at SEQ ID NO. 330
aaagtttcctctcgtagtcatgtctgaaccacacgcacctcatccagagctggcgcacgccatgtgctcgacggtttgccgctgacacggcgcacggcgcgcgcgtccatggcgcttgctctcctcccgccctcgcccgcatcccaccgccgctcgcttcgtcccgtttcctctccgcttctcacgcgtgtcaccaccgccgccagcttcggccttgcgttttcttcccatccctcctccggctgctgctctctgcagaggactggcgccgcaggaggcgacggtgatggcgccggcgaggcctcatcggaagcgccggtggctggatggctcgacacggacctgctcaggcgggtctcaggcgcgggggatgcggaccaggcgctggacattgtcgcagactcggcgggaggttcgggcgccgctctggaagcgcccgaatgcaacgcgatcattgccgcggcacttgaccgaggcaacgtcgatctcgcgctctcggtgttcgaagccatgcgatccggcttcgcgggagtaggaggctggaggtgggcgagaccggacgatcggacatatgccttgctcgtacagcggttggcagccgccctgcgtgtttctaatgcaatcaggataatcgattatgcatcttgcgctggtgtttcttctacagaggaggttccttttgggattattgttcgctgtccaacctgcatggtagcagttgctgttgctcaaccgcaggatggaactcaggttgtttcctgttcaaagtgtcgatatcaatatgaattattttctggagacatttcaagcatcgaatctgaagaagttagcatggatatttcagctctggagaaggcattgagattcattaatataagaaaagatggtcttccagctgctgtccactctattgtgatccgagcaccttcaggaatagcgcgcactcatagatttgctacccagaatgtagaactccctgctcaagaaggagaaagagtaaccatttcgttggcagccccatccaatgtttatcgtgaaatgggtcccctcaagattgctgcacgctcacaaggatttaaaccaggcgagcctatgtgtctgactaatcacagcaatggacaagtctcaaagttgctaagagctccatcaatgaatgaaggatcatttttccttagcccatatttattggtcggtgctctttctttgcttgcctctggagatgctgcttccgcattcattgacccaagtcttcctagacttattacagcaactgcaattgcatcagctgccatcggaacaactctaaatcaagtggtcctgccagaaattcaaaagcttccacaaaaggcagtggatatagttgctgtacggcagcagcttttgtctcagtatgacattcttcagagccgtcttaaggaactgaaacagttggctcaaaaagaggtgtggatgctcacaaggatgtgtcaattggacaacaaaatactagcagtgggcgaaccatcttatcgtgctagacgaggtagagtaaagagggtacgggaaagcttggaaagcacactctctgcaaggattgagctaatggaaagttatgcaaaattgtgttcaatgattgaaattgaaattgagatggactctgatgttattgctgctgaagtggcaagcagtgcagagagaatatctgagcaaattcaacaattaatggagatcgacagccttgaagagcaatggcgtatacaagctgaagctaatgatgaagctgaaaggcttctgagttctgattcttcagaaacattgcctgctggacatatgtaatgtaattttggtaatgagcaagcattattctcctatttcctatttagatatttatatctctgcaattttaatgttctttaccaaattaaaaacaaatttctagtttaggattttgaaggaaaatactgttacagaacattaggaaaacgaaccataaaccctgcaacagaataatacagaatattgattggaaccgtgc

SEQ ID NO: 330 - protein, 568 aa, Panicum virgatum
  misc_feature: Ceres Clone ID no. 1784441
  misc_feature: Bit score of 1231.9 for HMM based on sequences of Figure 2
  misc_feature: Functional Homolog Of SEQ ID NO. 310
MALALLPPSPASHRRSLRPVSSPLLTRVTTAASFGLAFSSHPSSGCCSLQRTGAAGGDGDGAGEASSEAPVAGWLDTDLLRRVSGAGDADQALDIVADSAGGSGAALEAPECNAIIAAALDRGNVDLALSVFEAMRSGFAGVGGWRWARPDDRTYALLVQRLAAALRVSNAIRIIDYASCAGVSSTEEVPFGIIVRCPTCMVAVAVAQPQDGTQVVSCSKCRYQYELFSGDISSIESEEVSMDISALEKALRFINIRKDGLPAAVHSIVIRAPSGIARTHRFATQNVELPAQEGERVTISLAAPSNVYREMGPLKIAARSQGFKPGEPMCLTNHSNGQVSKLLRAPSMNEGSFFLSPYLLVGALSLLASGDAASAFIDPSLPRLITATAIASAAIGTTLNQVVLPEIQKLPQKAVDIVAVRQQLLSQYDILQSRLKELKQLAQKEVWMLTRMCQLDNKILAVGEPSYRARRGRVKRVRESLESTLSARIELMESYAKLCSMIEIEIEMDSDVIAAEVASSAERISEQIQQLMEIDSLEEQWRIQAEANDEAERLLSSDSSETLPAGHM

SEQ ID NO: 331 - protein, 462 aa, Oryza sativa subsp. japonica
  misc_feature: Public GI ID no. 38424026
  misc_feature: Bit score of 976.9 for HMM based on sequences of Figure 2
  misc_feature: Functional Homolog Of SEQ ID NO. 310
MALALLSPSSASAHRLPRPISSPPLGRAASATSIGSSFFPLCSSPPSSGSCSLRRASSAGGASEPEASGATSLDADLLRRVAGAADAGEALDIVAESAGGTGGLDASDCNAIVAAALDRGNVELALSVFEAMRSGFARAGAWRWARPDVRTYALLVQRLAAALRVSDALRIIDYVSRAGISSAEEVPFGMIIRCPSCMVAVAVAQPQHGTQTVSCSKCRYQYELFSGDIMSIESEEVSMDISALDKALRFINVIKDGLPAAVHSIVIRTPSGTARTHRFATQTVELPAQEGERVTISLAAPSNVYREMGPLKISARSQGFRPGEPMSLTNHINRQVSRLLRAPSKNEGPFVFNPYLLVGALALLASGDAASAFIDPSLPRFITATAFASAAVGTALNQVILPEIRKLPQKTVDIIAVRQQLLSQYDMLQTRLKDLKQLSEKEVWMLARMSQLENKILACSSR

SEQ ID NO: 332 - DNA, 2094 bp, Triticum aestivum
  misc_feature: Ceres Clone ID no. 860956
  misc_feature: Encodes the peptide sequence at SEQ ID NO. 333
tccgttccagttccaccacccgcgcctcatccacaaccgaacgggcgcgacatgtgctcgacgttttccctctgagaccacgcggccatggcgctcgccttcctcccgcccgcgcccgcagtccaccatccgccgcgccccctcaatcccccgccgcccgcgtccgccaccaacaccggcttctctttcctcttcccacccgcctcccgctggccctccctgcagagggccagctccgcggcagccggcggtggcgccggctcgtcagaagcgccggccgacagctcgctcgacgcagacctcctccggagggtctccggggcagaggacgcggaccgagcgctggacattgtcgcggagtcgctgggaggcggggccggctccggctcgaaagcgtcccttgacgcgtccactccaatgcgatagtagcggcggcgcttgaccggggcaacgtcgacctcgcgctctccgtcttcgacgcgatgcgcgccggcctggcgcgagtagggcgctggggctgggcaaggccggacgcgcggacctacgcgttgcttgtccagcgattggcggcggctctgcgcgtttctgatgctatcaggatagtcgactacgtgtcccgtgcgggtgtatcttctgcagaggaggtcccgtttggcataactgttcgctgtccaacctgcatggtggcaattgctgtcgcacagcctcagcatggaactcaggtggtttcttgttcgaagtgccggtaccaatatgaactattttctggagacgttacaagcatcgagtcagaagaagtgagcatggatatttcagcttttgagaaggccttgcaatttataaatgtgatgaaagatgatcttccagctgccgttcactctatcgtgatccgtacaccctcaggaacagcccgcacacatagatttgctaccaagactgtggaactgcctgctcaaggaggagaaagagtgaccatttccttagctgccccagccaatgcttatcgtcagatgggtcccctcaagatcgcggcacgctcaaaagggtttagtccaggagaacccatgtgcctcactaaccatgtcagtggagagatctcaaagttgctaagagtgccatcaaagaatgcgggaccattgtttcttagtccttatctagttggcggtgctgttgctttgcttgcttctggagatgctgtttctgcattcattgatccaagcctccctagactaattacagcaactgtcattgcatcggctgctgttgggacaacactaaatcaagtgatcctgccagagacacgaaagcttccgcaaaaggcggtagacatagttgctgtacagcagaaactcttatctcaatatgacatgcttcaaagtcgtcttaaggatctgaaacagcttgttgaaaaagaggtgtggatgcttgcaagaatgtgtcagttggagaacaagatattagcagtaggcgaaccatcatatcgtgctcgacgtggtagagtgaagagggtacgaaaaagcttggaaactacgcttttggcaaagattgagctgatggaaagttacgcaaaattatgttctatgattgaaattgaagttgaaatggactctgatgttatcgttgctgaagcagcaaccggtgcagaaagaatatcagaacaaattgaacagttgatggagattgacagtcttgaagagcaatggcgtatacaagccgaggctaatgatgaagcagaaaggcttcttggttcagattctttggaagcattgtctgctgagcgtgtatgatgatatttttgctggtcacagtgacttgtgaagacgatgattctgatacagaagacaaactgattactatgtagaaccatgtatcccccccataacatcgaagtgaatattgcaaagaacttgagatctctagcagacacttgacagtacagaccaggacaagcttatggatagaaacaagagagaattccttatttgacactctcttaaaatcatgttccttatttgacactgaaaaaaatttcttccctatatgacctatagtcttaatttctttccctatatgacattctagttcattttgtac

SEQ ID NO: 333 - protein, 434 aa, Triticum aestivum
  misc_feature: Ceres Clone ID no. 860956
  misc_feature: Bit score of 873.8 for HMM based on sequences of Figure 2
  misc_feature: Functional Homolog Of SEQ ID NO. 310
MRAGLARVGRWGWARPDARTYALLVQRLAAALRVSDAIRIVDYVSRAGVSSAEEVPFGITVRCPTCMVAIAVAQPQHGTQVVSCSKCRYQYELFSGDVTSIESEEVSMDISAFEKALQFINVMKDDLPAAVHSIVIRTPSGTARTHRFATKTVELPAQGGERVTISLAAPANAYRQMGPLKIAARSKGFSPGEPMCLTNHVSGEISKLLRVPSKNAGPLFLSPYLVGGAVALLASGDAVSAFIDPSLPRLITATVIASAAVGTTLNQVILPETRKLPQKAVDIVAVQQKLLSQYDMLQSRLKDLKQLVEKEVWMLARMCQLENKILAVGEPSYRARRGRVKRVRKSLETTLLAKIELMESYAKLCSMIEIEVEMDSDVIVAEAATGAERISEQIEQLMEIDSLEEQWRIQAEANDEAERLLGSDSLEALSAERV

SEQ ID NO: 334 - DNA, 1614 bp, Panicum virgatum
  misc_feature: Ceres Clone ID no. 1727475
  misc_feature: Encodes the peptide sequence at SEQ ID NO. 335
aaaaaaagcacatccccaatcgcagcgcggcccttgcattgcctcttgtagtttagttttgtacaagccaagatcgagcgaagccatggccaagcctcacatcctcatggtgccgctgccggcccagggccacgtcacccccatgatggagctcgcccaccgcttggtcgagcacggcttcgaggtcacgttcgtcaacaccgaagagcctcacgcgcgggtcgtcggcgcgctgcaggcggcgggcggcacggcggcgctggccggcatccacctggcgtccatcccggacgggctggagcagggggaacgcttggacgtcgtcaaggtcatcgagtcctacgaccggcacattccggggcacctggagcggctcatcgccgaaatggaggcgtccgggaggcccaaggtgaactggatcgtctgcgacgtgtacatgtggccgtgtttcgtcgtcgccaaaaagttcggcatccgcctggccgcactctggccggcggcggcggcgtgcttagcctttaatatcaagatccccaagttattagaggatgggttagtcaacgacaagggtttgccagagcgtgatgagatggtccagcttgcccccggagtcccgccgctgcagacgtcgcagctgccgtggatcaacttcatgacgcccgcctggcagagggtcttgttttttctgggcaccaagacgtatgagatcagtaccctcgccgagatggtggtgtgcaactcgttccgtgagctcgaggccggcgcgttcaagctcctgcccaagaacgtcctgcccgtcgggcccctgacccccgacccggagctccggaagcccgtcgggcagctgctgccggaggacacccggtgcctcccgtggctcgacgcccagaccgacgggtccgtcgtgtacgtggcgttcggcagctcgaccatcttccacccgcgccagttccgggagctcgccgaggggctggagctcgccggccggccgttcctctgggtggtgcgcgcggacttcaccaccggcgacctgagcaaggagtggttcgacgagttcaaggcccgcgtcgcgggcacggggatggtggtcagctggtgcccccagcagaaggtcctggcgcaccgcgcggtggcgtgcttcgtgtcgcactgcggctggaactcgacggtggagggcgtcaggagcggcgtgccgttcctgtgctggccctacttctccgaccagttcctggaccggagctacgtcaccgacgtgtggcggaccggcctggctgtgtcgcccgacgcggacgggatcgtgaccaaagaggagctcaggagcaaagtggagcaggtcgtcggcgacaacgagatcagggagcgggcgcggctgctcagggacgcggccggccgggccattgaccaagggggagactcgtacgagaacatccaaaagttcgtggacctgctgcgtcaatgagatcgagagagtcgcctcgccgcgatccaagggatcgtgatcccatccttagctcgcacatgctcttctacccgtacgcgtggtgtgctgctgttcacttctgattgggaaccgacccttgtttaataatcgaataatcaaatcgatttcagatc

SEQ ID NO: 335 - protein, 457 aa, Panicum virgatum
  misc_feature (4)..(457): Pfam Name: UDPGT Pfam Description: UDP-glucoronosyl and UDP-glucosyl transferas
  misc_feature: Ceres Clone ID no. 1727475
  misc_feature: Bit score of 1156.0 for HMM based on sequences of Figure 14
  misc_feature: Functional Homolog Of SEQ ID NO. 335
  misc_feature: in Figure 14
MAKPHILMVPLPAQGHVTPMMELAHRLVEHGFEVTFVNTEEPHARVVGALQAAGGTAALAGIHLASIPDGLEQGERLDVVKVIESYDRHIPGHLERLIAEMEASGRPKVNWIVCDVYMWPCFVVAKKFGIRLAALWPAAAACLAFNIKIPKLLEDGLVNDKGLPERDEMVQLAPGVPPLQTSQLPWINFMTPAWQRVLFFLGTKTYEISTLAEMVVCNSFRELEAGAFKLLPKNVLPVGPLTPDPELRKPVGQLLPEDTRCLPWLDAQTDGSVVYVAFGSSTIFHPRQFRELAEGLELAGRPFLWVVRADFTTGDLSKEWFDEFKARVAGTGMVVSWCPQQKVLAHRAVACFVSHCGWNSTVEGVRSGVPFLCWPYFSDQFLDRSYVTDVWRTGLAVSPDADGIVTKEELRSKVEQVVGDNEIRERARLLRDAAGRAIDQGGDSYENIQKFVDLLRQ

SEQ ID NO: 336 - DNA, 1586 bp, Panicum virgatum
  misc_feature: Ceres Clone ID no. 1988535
  misc_feature: Encodes the peptide sequence at SEQ ID NO. 337
aaactcaggtagctcatccgcacttaggatcgcagtcgcagcccaagagcgagcgagagagagagagagagagagagccatggccaagcctcacatcctcgtgctgccgctgcagttccagggccacgtcacccccctcatggagctctcccaccgcttggtcgaccacggcttcgaggtcacgttcgtcaacaccgaagtacctcacgcgcgggtcgtcggcgcgctgcaggcggcgggcggcgcggcgacgctggccggcatccacctagcgtccatcccggacgggctggaagatggggaccgcatggacgtcggcaagatcgccgactcctacgaccggcacattccggggcacctggagcggctcatcgccgaaatggaggcgtccgggaggcccaaggtgaagtggatcgtctgcgacgtgtacatgttgtcgtccttcctcgtcgccaaaaagtttggcatccgcgtggccgcagtctgggcgacggcggcggcgtgcttagccattagtacgaagatccccaagctgatagaggatgggctcgtcaacgacaagggttctccagagcgtgatgagatggtccagtttgcccccggaattccgccggtccacacgtcgcagctgccgtggatcaatgtcatcccgctcgagtggcaaaggtccttattcgatctgtacaagcagaccgagaggctcagcgccctcgtcgagatggtggtgtgcaactctttcagtgagctcgaggccggcgcgttcacgctcctgcccaacgtcctgcccatcgggcccctgacctccgacagggagctccagaagcccgtcgggcagttgctgccggaggacacccggtgcctcccgtggctcgatgcccagcccgacgggtccgtcgtgtacgtggcgttcggcagctcgaccttcttcgacccgcgccagttccgagagctcgcggaggggctgcagctcaccggccggccgttcctctgggtggtgcgcacggacttcaccaccggcgacgtgagcaaggcgtggttcgacgagttcaaggcccgcatcgcgggcgcgggaatggtggtcagctggtgcccccagcagaaggtcttggcgcaccgcgcggtggcgtgcttcgtgtcgcactgcggctggaactcgatcatggagggtgtcaggaacggcgtgccgttcctgggctggccctacttcgccgaccagttcctggaccggaactacgtcaccgacgtgtggcggaccggcctggccgtgtcgcccggcgcggacggggtcgtgaccaaggaggagctgaggagcaaggtggagcaggtcatcggcgacgacgagatcagggagcgggcgcggctgctcagggacgcggccggccgggccatcggcgaggggggagcctcgtacgagaacttccgaaagttcgtggatctgctgcgtgaatgagagtcgtcgccggcgctctctgcacgccaagggaatcccgtgctcgctcgcagatgagcttgtagctgtggtgtgctgctgttctgattgggcaaggacccttgtttaataatcagaaattcagaataatgtttcc

SEQ ID NO: 337 - protein, 456 aa, Panicum virgatum
  misc_feature (4)..(455): Pfam Name: UDPGT Pfam Description: UDP-glucoronosyl and UDP-glucosyl transferas
  misc_feature: Ceres Clone ID no. 1988535
  misc_feature: Bit score of 1059.8 for HMM based on sequences of Figure 14
  misc_feature: Functional Homolog Of SEQ ID NO. 335
MAKPHILVLPLQFQGHVTPLMELSHRLVDHGFEVTFVNTEVPHARVVGALQAAGGAATLAGIHLASIPDGLEDGDRMDVGKIADSYDRHIPGHLERLIAEMEASGRPKVKWIVCDVYMLSSFLVAKKFGIRVAAVWATAAACLAISTKIPKLIEDGLVNDKGSPERDEMVQFAPGIPPVHTSQLPWINVIPLEWQRSLFDLYKQTERLSALVEMVVCNSFSELEAGAFTLLPNVLPIGPLTSDRELQKPVGQLLPEDTRCLPWLDAQPDGSVVYVAFGSSTFFDPRQFRELAEGLQLTGRPFLWVVRTDFTTGDVSKAWFDEFKARIAGAGMVVSWCPQQKVLAHRAVACFVSHCGWNSIMEGVRNGVPFLGWPYFADQFLDRNYVTDVWRTGLAVSPGADGVVTKEELRSKVEQVIGDDEIRERARLLRDAAGRAIGEGGASYENFRKFVDLLRE

SEQ ID NO: 338 - protein, 457 aa, Sorghum bicolor
  misc_feature (4)..(456): Pfam Name: UDPGT Pfam Description: UDP-glucoronosyl and UDP-glucosyl transferas
  misc_feature: Public GI ID no. 21326123
  misc_feature: Bit score of 1223.5 for HMM based on sequences of Figure 14
  misc_feature: Functional Homolog Of SEQ ID NO. 335
  misc_feature: in Figure 14
MAKAHVLVLPMPCQGHVTPLMELSHRLVDQGFEVTFVNTDVDHALVVTALEASGGAAAFGGGIHLASIPDGLADDEDRKDINKLVDAYSRHMPGYLESLLADMEAAGRPRAKWLVGDVNMGWSFEIAKKFGIRVVSFWPAASACLAFMLKIPNLIEEGLINDKGLPVRQETFQLAPGMPPLHSSQLSWNNAGEPEGQHIIFDLVTLNNKLNELAEMVVSNSFYEAEAGAFKLFPSILPIGPLFADPAFRKPVGHFLPEDERCIKWLDTQPDASVVYVAFGSITIFDPRQFEELAEGLELTGRPFLWVVRPDFTPGLSKAWLHEFQQRVAGKGMIVSWCSQQQVLAHRAVACFVSHCGWNSTMEGVRNGVPFLCWPYFCDQYLNRSYIINVWRTGLAVTPDADGIVTQEELRSKVEQVVGDADIKDRALVFKDAARRCIAEGGSSNDNFKKLVNLLSE

SEQ ID NO: 339 - DNA, 1377 bp, Sorghum bicolor
  misc_feature: Ceres Annot ID no. 8632623
  misc_feature: Encodes the peptide sequence at SEQ ID NO. 340
atggccaaggctcacgtcctggtgctgccgatgccgtgccagggccacgtcacgccgctcatggagctctcccaccgtctggtcgaccaaggcttcgaggtcaccttcgtcaacaccgatgtggaccacgccttggtggtaaccgcgctggacgccaccggcggcggcgtggcggcgctaggcggcggcatccacctggcgtccatcccggacgggctggccgacgacgaggaccgcaaggacatcaacaagctcgtcgacgcctactcgcgccacatgccgggctacctggagagcctcctcgccgacatggaggccgccgggcggcccagggcgaagtggctcgtcggcgacgtcaacatgggctggtcctttgaggtcgccaagaagttcggcatccgggtcgtgtccttctggccggcggcctcggcgtgcttggccttcatgctcaagattcccaacctgatagaggaaggactcataaacgacaaggggttgccagtccggcaggagacgttccagctggccccggggatgccgccgctgcactcgtcgcagctgtcgtggaacaacgccggcgagcccgaggggcagcacatcatcttcgacctggtgaccctgaacaacaagctgaacgagctcgcggagatggtggtgagcaactccttctacgaggcggaggccggcgcgttcaagctcttccccagcatcctgcccatcggcccgctgttcgccgacccggcgttccggaagcccgtggggcacttcctgccggaggacgagaggtgcatcaagtggctggacacgcagccggacgcgtccgtcgtgtacgtggccttcggcagcatcaccatcttcgacccgcgccagttcgaggagctcgccgaggggctggagctcaccggccggccgttcctgtgggtggtgcgcccggacttcacccccggcctcagcaaggcgtggctccacgagttccagcagcgcgtcgctggcaagggcatgatcgtcagctggtgctcacaacaacaggttctggctcaccgcgcggtggcatgcttcgtgtcgcactgcgggtggaactcgaccatggagggggtgaggaacggcgtgccgttcctgtgctggccctacttctgcgaccagtacctgaaccggagctacattatcaacgtgtggaggacgggcctggcggtgacgcccgacgcagacgggatcgtaacgcaggaggagctgaggagcaaggtggagcaggtcgtcggcgacgccgacataaaggacagggcgctggtgttcaaggatgcagcccgccggtgcatcgccgaagggggatcctcgaatgacaacttcaaaaagctcgtcaacctgctcagtgaatga

SEQ ID NO: 340 - protein, 458 aa, Sorghum bicolor
  misc_feature (4)..(457): Pfam Name: UDPGT Pfam Description: UDP-glucoronosyl and UDP-glucosyl transferas
  misc_feature: Ceres Annot ID no. 8632623
  misc_feature: Bit score of 1215.4 for HMM based on sequences of Figure 14
  misc_feature: Functional Homolog Of SEQ ID NO. 335
MAKAHVLVLPMPCQGHVTPLMELSHRLVDQGFEVTFVNTDVDHALVVTALDATGGGVAALGGGIHLASIPDGLADDEDRKDINKLVDAYSRHMPGYLESLLADMEAAGRPRAKWLVGDVNMGWSFEVAKKFGIRVVSFWPAASACLAFMLKIPNLIEEGLINDKGLPVRQETFQLAPGMPPLHSSQLSWNNAGEPEGQHIIFDLVTLNNKLNELAEMVVSNSFYEAEAGAFKLFPSILPIGPLFADPAFRKPVGHFLPEDERCIKWLDTQPDASVVYVAFGSITIFDPRQFEELAEGLELTGRPFLWVVRPDFTPGLSKAWLHEFQQRVAGKGMIVSWCSQQQVLAHRAVACFVSHCGWNSTMEGVRNGVPFLCWPYFCDQYLNRSYIINVWRTGLAVTPDADGIVTQEELRSKVEQVVGDADIKDRALVFKDAARRCIAEGGSSNDNFKKLVNLLSE

SEQ ID NO: 341 - DNA, 1599 bp, Triticum aestivum
  misc_feature: Ceres Clone ID no. 702826
  misc_feature: Encodes the peptide sequence at SEQ ID NO. 342
agctgttcgccacacattgcatcaccggcagattgtgcttgtaacagagcagccgcagcagtacgtaggtgcacgcggagggagggagggaggccagccatggcgaagggtcacgtgctggtgctgcccatgccatgccagggccacgtcgtcccgctcatggagctctcgcaccgcctcgtcgaccacggcttccaggtcaccttcgtcaacaccgacgtggaccacgcgctcgtgctcgccgccatggcgcccgagggccgcggcgaggcgctgcgcggcatccacctggcctccatcccggacgggctggcagacgacgaggaccgcaaggacctcaacaagctcgtcgacgcctacccgcgccacatgccggcctacctggaggcgctggtcggggaaatggaggccgccgggaggcccagggtgaagtggctcgtcgccgacttcaatatgggctggtccttcgaggtcgccaagaggctcggcatccgggtcgcctccttctggccggcctccgccgcgtgcctcgccatcatgctcaagatccccgagctgattcagaacggcgtcctcaacgacaagggatggccagagcgggaggagacgctgcggctcgccccggggatgccgccgctccacacgtcgctgctgccgtggaacaacgccggcgcccccgacggacagcacatcatcttccacctcgtgtgccggaacaacaagttcagcgaccacgccgagatgaccgtgtgcaactcgttccacgacgccgaggccggcgcgttcaagctcttccccaacatcctgcccatcggcccgctcttggccgacaaggacttccagaggcccgtcggcaacttcttgccggaggacatgagctgcctcaaatggctggacgcgcgacctgacggctccgtcgtctacgtggccttcgggagcatggccatcttcgacccgcgccagttccaggagctggccgaggggctggagctcgccgaccggccgttcctgtgggtggtgcgccccgacttcaccgccggcctgaacaaggagtggctcgacgagttccagcagcgcgttgccggcacgggcatgatcgtcagctggtgctcccagcagcaggtcctggcgcaccccgcggttgcgtgcttcgtgtcgcactgcgggtggaactcgaccatggaggcggtgagaaatggcgtgccggtcctgtgctggccctacttctgcgagcagttcctggaccggagctacgtcaccaacgtgtggaggaccggcctggccgtgtgccccggcgaggatggtgttgtgacgaaggaggaggtgaggtgcaaggtggaaactgtcattggcgacgcgggcttcaggaagagggcacggcggctcaaggacacctcctggaggtgcatcagcgagggcggctcgtcacacaagaattttgctagatttgtggaccttctaagtgaatgaacccaaagcatccggtatctgtttgtgcaattagttttttttttgcatgggtttgtgcaattagtttgcattattatttcaatgaaattaattgtatacaacatgtatatttgaattaatgatactatc

SEQ ID NO: 342 - protein, 456 aa, Triticum aestivum
  misc_feature (4)..(455): Pfam Name: UDPGT Pfam Description: UDP-glucoronosyl and UDP-glucosyl transferas
  misc_feature: Ceres Clone ID no. 702826
  misc_feature: Bit score of 1223.2 for HMM based on sequences of Figure 14
  misc_feature: Functional Homolog Of SEQ ID NO. 335
  misc_feature: in Figure 14
MAKGHVLVLPMPCQGHVVPLMELSHRLVDHGFQVTFVNTDVDHALVLAAMAPEGRGEALRGIHLASIPDGLADDEDRKDLNKLVDAYPRHMPAYLEALVGEMEAAGRPRVKWLVADFNMGWSFEVAKRLGIRVASFWPASAACLAIMLKIPELIQNGVLNDKGWPEREETLRLAPGMPPLHTSLLPWNNAGAPDGQHIIFHLVCRNNKFSDHAEMTVCNSFHDAEAGAFKLFPNILPIGPLLADKDFQRPVGNFLPEDMSCLKWLDARPDGSVVYVAFGSMAIFDPRQFQELAEGLELADRPFLWVVRPDFTAGLNKEWLDEFQQRVAGTGMIVSWCSQQQVLAHPAVACFVSHCGWNSTMEAVRNGVPVLCWPYFCEQFLDRSYVTNVWRTGLAVCPGEDGVVTKEEVRCKVETVIGDAGFRKRARRLKDTSWRCISEGGSSHKNFARFVDLLSE

SEQ ID NO: 343 - protein, 462 aa, Oryza sativa subsp. japonica
  misc_feature (4)..(461): Pfam Name: UDPGT Pfam Description: UDP-glucoronosyl and UDP-glucosyl transferas
  misc_feature: Public GI ID no. 13236659
  misc_feature: Bit score of 1211.2 for HMM based on sequences of Figure 14
  misc_feature: Functional Homolog Of SEQ ID NO. 335
  misc_feature: in Figure 14
MAKGHVLVLPMPCQGHVIPFMELSHRLADEGFEVTFVNTEVDHALVVAALPPGGAAELRQRRIHLAAIPDGLAGDEDRKDLNKLIDAYSRHMPGHLERLIGEIEAGAGGGRPKVRWLVGDVNMGWSFAVARRLGIRVVSFWAASTACLAIMLKIPKLIEDGVLNEKGWPERQETLQLAPGMPPLHTSLLSWNNSGAAEGQHIIFDLVCRNNKFNDDLAEMTVCNSFHEAEPAVFKLFPDLLPIGPLVADRELRRPVGHFLPEDAGCLDWLDAQPDGSVVYVAFGSLAIFDARQFQELAVGLELTGRPFLWVVRPDFTPGLSTAWLDAFRRRVAGRGVIVEWCSQQRVLAHAAVACFVSHCGWNSTLEGVRNGVPFLCWPYFCDQFLDRSYITAVWRTGLAVAAGEEDGVVTRDEVRSKVEQVVGDGEIRERARLLRDTARACVSEGGSSHKNFRKFIDLLSE

SEQ ID NO: 344 - DNA, 1380 bp, Sorghum bicolor
  misc_feature: Ceres Annot ID no. 8632621
  misc_feature: Encodes the peptide sequence at SEQ ID NO. 345
atggcggcgcctcatgtcctggccctgccgttccctgcccaggggcacgtcatccctctgatgcagctctcccaccggctggtcgagaatggcatcgaggtcaccttcgtcaacaccgagctcaaccacgcgctcgtgctagacgcgatgccggctgacggcactggccggtcgctcgacggcatccacctggtgggcgtcccggacgggctggccgacggcgacgaccgcaaggacctcggcaagctcgtcgacgggttctcacggcacatgccgggctacctggaggagcttgtcggtaggactgaggcgtccgggggcacaaagatcagttggctcatcgccgacgaggccatggggtgggcgttcgaggtcgccatgaagctcggcatcagggccgccgccttctggcccgggtcggcggccttcctcgccacaattttgagaattcctcagatgatacaggacggcatcatcgacgagaaagggtggccaaatcggcaggagacattccagttcgcgccggggatgccaccgctccacacgtcgcagctgccgtggaacaactccggcttgccggagggccaaccggccatattccagctcctcacccggaacaacgaggccagagacctcgccgaggtcatcgtctgcaactcgttccgggacgcggaacctgaagcgttcaagctgtaccccgacgtcatgcccatcggccccctgttcgcggaccgtcagttccacaagccggtggggcagttcttgccggaggacaccgggtgcctcgagtggctcgacgcgcaggccgaccgctccgtcgtgtacgtggcgttcggcagcttcaccgtcttcaacccgcggcagttcgaggagcttgcgctggggctggagctcgctggccggccgttcctgtgggtggtgcggccggacttcaccgctgctggcctgagcaaagcgtggctcgacgagttccgggaccgtgtcggcggcaggggcatgatcgtgagctggtgcccccagcagcaggtgctggctcaccgtgcggtggcgtgcttcgtgtcgcactgcgggtggaactcgacgatggaaggggtgaggaacgcggtgccgttcctgtgctggccctacttcacggaccagttccagaacgagagctacatctgcaacgtgtggaggaccggcttggcggtggcgccggggccggacggcgtcgtgacgaaggaggagctgagcggcaaagtggagcgagtccttggagacgacgggatcagggagagggtgagcgcgctcagggatgcggcgtgcaggtccatcgccgagggtgggtcgtcgcgtgacaacttcaagaagtttgtggagctcctgaaactgaaagactaa

SEQ ID NO: 345 - protein, 459 aa, Sorghum bicolor
  misc_feature (4)..(459): Pfam Name: UDPGT Pfam Description: UDP-glucoronosyl and UDP-glucosyl transferas
  misc_feature: Ceres Annot ID no. 8632621
  misc_feature: Bit score of 1094.3 for HMM based on sequences of Figure 14
  misc_feature: Functional Homolog Of SEQ ID NO. 335
MAAPHVLALPFPAQGHVIPLMQLSHRLVENGIEVTFVNTELNHALVLDAMPADGTGRSLDGIHLVGVPDGLADGDDRKDLGKLVDGFSRHMPGYLEELVGRTEASGGTKISWLIADEAMGWAFEVAMKLGIRAAAFWPGSAAFLATILRIPQMIQDGIIDEKGWPNRQETFQFAPGMPPLHTSQLPWNNSGLPEGQPAIFQLLTRNNEARDLAEVIVCNSFRDAEPEAFKLYPDVMPIGPLFADRQFHKPVGQFLPEDTGCLEWLDAQADRSVVYVAFGSFTVFNPRQFEELALGLELAGRPFLWVVRPDFTAAGLSKAWLDEFRDRVGGRGMIVSWCPQQQVLAHRAVACFVSHCGWNSTMEGVRNAVPFLCWPYFTDQFQNESYICNVWRTGLAVAPGPDGVVTKEELSGKVERVLGDDGIRERVSALRDAACRSIAEGGSSRDNFKKFVELLKLKD

SEQ ID NO: 346 - protein, 460 aa, Oryza sativa subsp. japonica
  misc_feature (4)..(459): Pfam Name: UDPGT Pfam Description: UDP-glucoronosyl and UDP-glucosyl transferas
  misc_feature: Public GI ID no. 115455443
  misc_feature: Bit score of 1185.7 for HMM based on sequences of Figure 14
  misc_feature: Functional Homolog Of SEQ ID NO. 335
MAKGHVLVLPMPCQGHVIPFMELSHRLADEGFEVTFVNTEVDHALVVAALPPGGAAELRQRGIHLTAIPDGLAEDEDRKDLNKLIDAYSRHMPGHFERLIGEIEAGGGRPKVRWLVGDVNMGWSFAVARRLGIRVVYFSPASTACIAFMRKIPKLIEDGVLNEKGWPERQETLQLAPGMPPLHTSLLSWNNAGAAEGQHIIFDLVCRNNKFNDDLAEMTICNSFHEAEPAVFKLFPDLLPIGPLVADRELRRPVGHFLPEDAGCLDWLDAQPDGSVVYVAFGSMAIFDARQFQELAVGLELTGRPFLWVVRPDFTPGLSTAWLDAFRCRVAGRGVIVEWCSQQRVLAHAAVACFVSHCGWNSTLEGVRNGVPFLCWPYFCDQFLDRSYITAVWRTGLAVAAGEEDGVVTRDEVRSKVEQVVGDGEIRERARLLRDTARACVSEGGSSHKNFRKFIDLLSE

SEQ ID NO: 347 - protein, 469 aa, Oryza sativa subsp. indica
  misc_feature (4)..(468): Pfam Name: UDPGT Pfam Description: UDP-glucoronosyl and UDP-glucosyl transferas
  misc_feature: Public GI ID no. 125545776
  misc_feature: Bit score of 1102.8 for HMM based on sequences of Figure 14
  misc_feature: Functional Homolog Of SEQ ID NO. 335
MAKGHVLVLPMPCQGHVIPFMELSHRLADEGFEVTFVNTEVDHALVVAALPPGGAAELRQRGIHLTAIPDGLAEDEDRKDLNKLIDAYSRHMPGHFERLIGEIEAGGGRPKVRWLVGDVNMGWSFAVARRLGIRVVYFSPASTACIAFMRKIPKLIEDGVLNEKGWPERQETLQLAPGMPPLHTSLLSWNNAGAAEGQHIIFDLVCRNNKFNDDLAEMTICNSFHEAEPAVFKLFPDLLPIGPLVADRELRRPVGHFLPEDAGCLDWLDAQPDGSVVYVAFGSMAIFDARQFQELAVGLELTGRPFLWVVRPDFTPGLSTAWLDAFRCRVAGRGVIVEWCSQQRVLAHAAVACFVSHCGWNSTLEGVRNGVPFLCWPYFCDQFLDRSYICDVWRTGLRMAAPAPATAPADEASARLVARQLIRRKVEELIGDQETKARAIVLRDAASLAVGDGGSSRRNLTRFLDLIRS

SEQ ID NO: 348 - DNA, 1392 bp, Sorghum bicolor
  misc_feature: Ceres Annot ID no. 8632620
  misc_feature: Encodes the peptide sequence at SEQ ID NO. 349
atggcggcaccacgcgtcctagtcctgccttaccccgcgcagggccatgtcaccccaatgatggagctctcccactgcctcgtcgagcacggcgtcaaggtcaccttcgtgaacaccgaggcaaaccacggtttgattcttggtgccttggcgaccggagacagcgaattcggcggggtcgacatggtgtccataccggacggcctgggctgcggcgaagaccggaaggatctcgcccgtctcaccgactccttctccaagttcatgcccgccgagctggagaagctcattgccagcatcaatgccgacgagcaagagcgcgagaaggccagctggttgattgccgatgtgaacatggcgtgggccttccccgtggcgaagaagcacggcctccggaccgccgggttctgcccgtcgtcggcggcgatgttcgcgatgaggatcaaaattcctgagatgataagcgacggcgttctcgacgagagaggctggcccaagcggcgcggcacgttccggctggctccggcgatgccggccatcgacacgtcggagttctcgtggaaccgcgccggcgacgccaagggccagccaatcatcttccagctgatcctccagaacaacgcggccacgcacctggccgagaccatcgtctgcaactccgtccaggagctcgagcccggggcctttgcgctcttccccggcgtcctccccgtgggcccgctctcggtctcctccgacaagccggtcggcggcttctgggccgaggacgcctcctgcgccgcgtggctggacgcgcagccggacagctccgtcgtgtacgtcgcgttcggcagcctcgccgcctacgacgcagcgcagctagtcgagctcgccgaggggctgctgctgacctcacggccgttcctgtgggtggtcaggccggggttggcgggcgagcacctccttgagcagctccgccgccgcgccgcgccgcgcgggcgcgtggtgagctggtgcccgcagcagagcgtgctggcgcacccggcggtcgcctgcttcctgacgcactgcggctggaactcgacgatggaggcggtgcggagcggcgtgccgctcctgtgctggccctacttcaccgaccagttcttgaaccagagctacatctgcgacgtgtgggggacagggctgaaggtgccattgccgcccgcggcggcggcggcggcggcacacggagcggggcttgtggggagagacgttgttcgggacaagatcgaggagctgctccgcgacaatgagaccaaggcgagggcgctcgcgctgcgggacctcgccggtcgggcagtcggcgatggcggctcgtcgcgccagaatctcaggcggttcttggatcttgtgcgaggagtgaagagctag

SEQ ID NO: 349 - protein, 463 aa, Sorghum bicolor
  misc_feature (4)..(462): Pfam Name: UDPGT Pfam Description: UDP-glucoronosyl and UDP-glucosyl transferas
  misc_feature: Ceres Annot ID no. 8632620
  misc_feature: Bit score of 856.9 for HMM based on sequences of Figure 14
  misc_feature: Functional Homolog Of SEQ ID NO. 335
MAAPRVLVLPYPAQGHVTPMMELSHCLVEHGVKVTFVNTEANHGLILGALATGDSEFGGVDMVSIPDGLGCGEDRKDLARLTDSFSKFMPAELEKLIASINADEQEREKASWLIADVNMAWAFPVAKKHGLRTAGFCPSSAAMFAMRIKIPEMISDGVLDERGWPKRRGTFRLAPAMPAIDTSEFSWNRAGDAKGQPIIFQLILQNNAATHLAETIVCNSVQELEPGAFALFPGVLPVGPLSVSSDKPVGGFWAEDASCAAWLDAQPDSSVVYVAFGSLAAYDAAQLVELAEGLLLTSRPFLWVVRPGLAGEHLLEQLRRRAAPRGRVVSWCPQQSVLAHPAVACFLTHCGWNSTMEAVRSGVPLLCWPYFTDQFLNQSYICDVWGTGLKVPLPPAAAAAAAHGAGLVGRDVVRDKIEELLRDNETKARALALRDLAGRAVGDGGSSRQNLRRFLDLVRGVKS

SEQ ID NO: 350 - protein, 457 aa, Oryza sativa subsp. japonica
  misc_feature (11)..(457): Pfam Name: UDPGT Pfam Description: UDP-glucoronosyl and UDP-glucosyl transferas
  misc_feature: Public GI ID no. 115455447
  misc_feature: Bit score of 921.4 for HMM based on sequences of Figure 14
  misc_feature: Functional Homolog Of SEQ ID NO. 335
MAAPPPPRPQPHVMVLPFPAQGHVMPLMELSHRLVGLGFEVEFVHTDFNRDRVINAMANETGAIPDGIHMVSFPDGMDPAGDRANIAKLGDGLPAAMLGGIEEMIRSEGIRWVIADVSMAWVTELAATVGVHVALFSTYSAAVVAHRLQVPKLIQDGVLDEIGNVRRNEMIQLRPTMPPVLAVELPWVTLSGTPDGRRMVIQNVFKTNPTISSAEVIICNTFQDIEPGALALVPNVLPVGPLEAPATSRLAGHFWPEDTTCLAWLDEQDACSVVYVAFGSFTVFDMARVQELADGLVLSGRPFLWVIRQNFTNGAGEGWLEEFRHRVSGKGMIVGWAPQQSVLSHPSIACFVSHCGWNSTMEGLRHGVPFLCWPYFADQYCNQSYICNVWGTGVKLQADERGVVTKEEIKNKVEQLVDDKEIKARAAKWKHAACTSIAEGGSSHENLLKFVNLLREQ

SEQ ID NO: 351 - protein, 448 aa, Oryza sativa subsp. japonica
  misc_feature (7)..(446): Pfam Name: UDPGT Pfam Description: UDP-glucoronosyl and UDP-glucosyl transferas
  misc_feature: Public GI ID no. 115455451
  misc_feature: Bit score of 960.7 for HMM based on sequences of Figure 14
  misc_feature: Functional Homolog Of SEQ ID NO. 335
MAAATQPHVMVLPFPAQGHVIPLMELSHRLADQGFKIDFVNTEFNHDRVLKALAEKGAIPGGIRMLSIPDGLDPADDHTDIGKLVQVLPDAMLSPLEKMIRSEKIKWVIVDVSMSWALELATTMGVRIALFSTYSAAIFALRMNLPKLIEDGILDETGNVKKHEMVQLMPPIDAAEIPWVSLGSTQERRRYNIQNVFKTNRLMALAEMIICNTFREIESEALELLSNALPVGPLLAPASGPTGHFLPEDMTCLTWLDTQAPGSVIYVAFGSSTIFDIAQFHELANGLAVSDQPFLWVVRPNFTNGIQEDWFNEYKDRIKGKGLVISWAPQQRVLSHPSIACFMSHCGWNSTMEGVLHGVPFLCWPYFSDQFCNQSYICNVWKTGIKLFRDKQGVVTQEEIKNKAAQLLEDKEIKERAVTLKTTARASIQEGGSSHQNFLELVNLLREQ

SEQ ID NO: 352 - DNA, 1374 bp, Sorghum bicolor
  misc_feature: Ceres Annot ID no. 8632618
  misc_feature: Encodes the peptide sequence at SEQ ID NO. 353
atggccgcggctcctcctcctcctcctcctcctccccggcctcgtctcatggtgctgcccttccctgcccagggtcatatcatgccgctcatggagctgtcccaccgcctcgtcgaccatggcttcgaggtcgacttcgtgaacaccgacttcaaccacgcccgcatcctcacggccttggcgacaggaggagacaccggagcagctgtccatgccgggatccacttggtctctttcccggacggcatgggccccgacggcgaccgcgcagacatcgttcggctggctcagggcttgccggcggcgatgctcggccaagttgaagagctgatcagagctcataagattcggtgggtggtggctgatgtctccatgagctgggtgctggacctggccggcacggcaggcgtgcgcgtcgccttgttctcgaccttctcggccgccaccttcgccgtaaggatgcgtattcccaagatggtagaggatggcatcattgacgaaaatgcgaatgtgaagaggaatgagaggatcaagctgagccccaacacgccagccttcgacgccgccgacatcccctgggtcaggcttcgaagccccatgataaagggcatgatcaagaccaaccaaatgttcgcgctcgctgacaccattgtctgcaacacgttccatgccatcgagtccgaggcgctggcgctcctccccaaggcggcactggccatcggccccctcgaggcgccggcatcgaactcagccagccatctctggcccgaagacatggcctgcctcgcctgcctcgacgcccaggcacccagatcagttgtctatgtggcattcgggagctttacagtcttcgacactgcaaggctccaggagctcgccgacgggctggcactcaccggacgcccgttcctgtgggtggtccggccgaactttgccaacggcgtcgatgaaggctggctggaccagttcagacgccgcgttggagacaaggggctagtcgtcggctgggcgccccagcagcgcgtgctctcgcacccttcggtggcatgcttcatctcgcactgtggatggaactccaccatggaaggggtgcgtcacggcgtcccgttcctgtgttggccatactttgccgaccagttcatgaaccagaactacatctgcgacgcgtggggcacgggcttgaggattgacgccgacgagcggggcatcttcaccaaggaggagatcagggacaaggtcgaccagctgctcggcgatgatgggatcagaacgagggcactgtctttgaagagagcagcgtgcgagagtatcacagatggagggtcctcgcatcaggatctgctcaagcttgtaaacctgctgagagaacaataa

SEQ ID NO: 353 - protein, 457 aa, Sorghum bicolor
  misc_feature (14)..(457): Pfam Name: UDPGT Pfam Description: UDP-glucoronosyl and UDP-glucosyl transferas
  misc_feature: Ceres Annot ID no. 8632618
  misc_feature: Bit score of 850.0 for HMM based on sequences of Figure 14
  misc_feature: Functional Homolog Of SEQ ID NO. 335
MAAAPPPPPPPPRPRLMVLPFPAQGHIMPLMELSHRLVDHGFEVDFVNTDFNHARILTALATGGDTGAAVHAGIHLVSFPDGMGPDGDRADIVRLAQGLPAAMLGQVEELIRAHKIRWVVADVSMSWVLDLAGTAGVRVALFSTFSAATFAVRMRIPKMVEDGIIDENANVKRNERIKLSPNTPAFDAADIPWVRLRSPMIKGMIKTNQMFALADTIVCNTFHAIESEALALLPKAALAIGPLEAPASNSASHLWPEDMACLACLDAQAPRSVVYVAFGSFTVFDTARLQELADGLALTGRPFLWVVRPNFANGVDEGWLDQFRRRVGDKGLVVGWAPQQRVLSHPSVACFISHCGWNSTMEGVRHGVPFLCWPYFADQFMNQNYICDAWGTGLRIDADERGIFTKEEIRDKVDQLLGDDGIRTRALSLKRAACESITDGGSSHQDLLKLVNLLREQ

SEQ ID NO: 354 - protein, 470 aa, Oryza sativa subsp. japonica
  misc_feature (6)..(469): Pfam Name: UDPGT Pfam Description: UDP-glucoronosyl and UDP-glucosyl transferas
  misc_feature: Public GI ID no. 13236658
  misc_feature: Bit score of 800.4 for HMM based on sequences of Figure 14
  misc_feature: Functional Homolog Of SEQ ID NO. 335
MANGESHVLALPFPAQGHVIPLMELAHCLVEHGVKVTFVNTEVNHGRILGALDDASHGGELGGVDMVSISDGLGHGDDRSDLGRLTESLLLAMPSELEKLVGRINASASAAGGGGREVTWMVADVNMAWAFPVAKKLGLRVAGFCPSSAAMFVTRIRIPELVRDGVLDESGMPRWRGAFRLAPAMPPVDTAEFSWNRAGDPRGQPAIFRLILRNNAATHLAEAIACNSFEELESGAFAVDVPGRVLPVGPLASGGKPVGGFWPEDASCAAWLDAQPAGSVVYVAFGSIAALGAAQLAELAEGLALTSRPFLWVVRPGTASERCLDGLRRRAAPRGRVVGWCPQRRVLAHASTACFVSHCGWNSVVEGVSNGVPFLCWPYFADQFLNQSYICDVWRTGLRMAAPAPATAPADEASARLVARQLIRRKVEELIGDQETKARAIVLRDAASLAVGDGGSSRRNLTRFLDLIRS

SEQ ID NO: 355 - protein, 470 aa, Oryza sativa subsp. japonica
  misc_feature (6)..(469): Pfam Name: UDPGT Pfam Description: UDP-glucoronosyl and UDP-glucosyl transferas
  misc_feature: Public GI ID no. 125587975
  misc_feature: Bit score of 798.4 for HMM based on sequences of Figure 14
  misc_feature: Functional Homolog Of SEQ ID NO. 335
MANGESHVLALPFPAQGHVIPLMELAHCLVEHGVKVTFVNTEVNHGRILGALDDASHGGELGGVDMVSISDGLGHGDDRSDLGRLTESLLLAMPSELEKLVGRINASASAAGGGGREVTWMVADVNMAWAFPVAKKLGLRVAGFCPSSAAMFVTRIRIPELVRDGVLDESGMPRWRGAFRLAPAMPPVDTAEFSWNRAGDPRGQPAIFRLILRNNAATHLAEAIACNSFEELESGAFAVDVPGRVLPVGPLASGGKPVGGFWPEDASCAAWLDAQPAGSVVYVAFGSIAALGAAQLAELAEGLALTSRPFLWVVRPGTASERCLDGLRRRAGPRGRVVGWCPQRRVLAHASTACFVSHCGWNSVVEGVSNGVPFLCWPYFADQFLNQSYICDVWRTGLRMAAPAPATAPADEASARLVARQLIRRKVEELIGDQETKARAIVLRDAASLAVGDGGSSRRNLTRFLDLIRS

SEQ ID NO: 356 - DNA, 1777 bp, Panicum virgatum
  misc_feature: Ceres Clone ID no. 1776335
  misc_feature: Encodes the peptide sequence at SEQ ID NO. 357
aaaaaaaatatccgcaggagccgccagcgtcccacatcaggctctaagctctgaaggtgcagctcaaggactccgtctccgtgcagtcgtagatagcacgaccagcgcagacacggtggccgcgactgcctccatggccgctgcggctgctcctccccgtcctcgtgtcatggtgctgcccttccctgcgcagggccatgtcatgccgctcatggagctgtcccgccgcctcgtcgaccatggcttcgaggtcgacttcgtgaacacagagtacaaccaagcccgcgtcctcgcggccttggagacagcgggaggagagaccggagctgctgtccatgccgggatccatttggtctccatcccggacggcatgggtgctgactgcgaccgcaccgacgtcgttaagctgggccagggcttgccggcggcgatgcttagccgcctcgaggagctgatcagagctaggaacactcgatgggtggtggccgacgtctccatgagctgggtgctggatctggtcgccacggtgagcgtgcgcgtcgccttgttcttgacctattccgctgccatcttcgcgctgagggcgcacgttcccaagctgatagaggatggcatcgttgacgaaaatgggaatgtgaagaggaatgagaggatccagctgagccccaagatgccggccatcacagcagccgagctcccatggactggtgttggtactagccctgaggcacgaagagcagtaatacagggcgcgatcaagtacaccccatacacgctcgctgacaccatcctctgcaacacgtttcaagagatcgagtccgaagcgctggccctcctccccaaggagccactggccatcggtccccttgtggcatccaagccgacgtcagccggccatttctggcctcaagacctgacctcccttgcctggctagacgcgcaggcccccagctcagttgtctatgtggcattcggaagctttacagtcttcgacactacaaggctccaggagcttgccgacgggctggtgctcaccggacggcagttcctgtgggtgatccggccgaacttcaccaatggtgtcgatgaaggctggctggacgagttcagatgccgtgttggaggcaaggggctggttgtcggctgggctccccagcagcgcgtgctctcgcacccctcggtggcatgcttcatctcgcactgtggatggaactcgaccatggaaggggtgtgtcatggtgtcccgttcctgtgctggccatacttcgctgaccagttcttgaaccagagctacatctgcgacatgtggggtaccggcttgaggatctgcacagacgaacaggggatcgtcaccaaggaggagatcagggacaaggtcgcccggctgcttggagatgaggggatcaaggcgagggcgttgtccttgaagagcaaggcgtgcatgagcatcgcagatggagggccctcaaatcaggatctgctcgagtttgtgaacctgctgagtgcctgagagagcaataatctttagttcgtcagatctttcttttctcgttcagaggtcagttggctggataaacagtattgcaagtcgcactcgaagttggatagaaagccatagagtgtaatgaaatactacaagacaactagattagaatctatgtcagtgtcactagacagcaaatgccaaatgcaatttgtcctcgtggtgttttggtcgctgctatgggccatgtactgaaggtgatacctggcagcatcttaagaaattgtttttttc

SEQ ID NO: 357 - protein, 458 aa, Panicum virgatum
  misc_feature (10)..(457): Pfam Name: UDPGT Pfam Description: UDP-glucoronosyl and UDP-glucosyl transferas
  misc_feature: Ceres Clone ID no. 1776335
  misc_feature: Bit score of 857.6 for HMM based on sequences of Figure 14
  misc_feature: Functional Homolog Of SEQ ID NO. 335
MAAAAAPPRPRVMVLPFPAQGHVMPLMELSRRLVDHGFEVDFVNTEYNQARVLAALETAGGETGAAVHAGIHLVSIPDGMGADCDRTDVVKLGQGLPAAMLSRLEELIRARNTRWVVADVSMSWVLDLVATVSVRVALFLTYSAAIFALRAHVPKLIEDGIVDENGNVKRNERIQLSPKMPAITAAELPWTGVGTSPEARRAVIQGAIKYTPYTLADTILCNTFQEIESEALALLPKEPLAIGPLVASKPTSAGHFWPQDLTSLAWLDAQAPSSVVYVAFGSFTVFDTTRLQELADGLVLTGRQFLWVIRPNFTNGVDEGWLDEFRCRVGGKGLVVGWAPQQRVLSHPSVACFISHCGWNSTMEGVCHGVPFLCWPYFADQFLNQSYICDMWGTGLRICTDEQGIVTKEEIRDKVARLLGDEGIKARALSLKSKACMSIADGGPSNQDLLEFVNLLSA

SEQ ID NO: 358 - protein, 454 aa, Vitis vinifera
  misc_feature (4)..(453): Pfam Name: UDPGT Pfam Description: UDP-glucoronosyl and UDP-glucosyl transferas
  misc_feature: Public GI ID no. 157341250
  misc_feature: Bit score of 1248.5 for HMM based on sequences of Figure 14
  misc_feature: Functional Homolog Of SEQ ID NO. 335
  misc_feature: in Figure 14
MGNPHILVIPYPAQGHVIPLLELSQHLVKHGFKITFVNTEFNHKRVTNALTKKDDVGDHIHLVSIPDGLEAWEDRNDLGKLTEVGFRIMPKKLEELIEEINGSDDDNITCVIADESMGWALEVAEKMGIQRAVFWPASATLLALFFSVQKLIDDGIVDNNGTPTKHQMIKLSETMPAMNTAQFVWACIGDLSTQKIVFDVILRNNKALLLAEWVICNSSYDLEPGTFTLAPEILPIGPLLASSRLGKSAGYFWPEDSTCLQWLDQQPPCSVIYVAFGSFTVFDKTQFQELALGLELSNRPFLWVVRPDITSGTNDAYPEGFQERVSSQGLMVGWAPQQMVLSHPSIACFLSHCGWNSTMEGVSNGVPFLCWPYFADQFLNKTYICDIWKVGLGFDPAENGIIMREEIRNKMELLFGESEFKARALNLKEMAMNGVQEGGCSSKNFKNFIEWIKA

SEQ ID NO: 359 - DNA, 1365 bp, Populus balsamifera subsp. trichocarpa
  misc_feature: Ceres Annot ID no. 1450062
  misc_feature: Encodes the peptide sequence at SEQ ID NO. 360
atgggcaagccacatattgtagtcataccttatccagcacagggccatgtgattcccttcatggaactctcacaatgcctggtaaaacaggggttcaaaatcacatttgtgagcacagagtataatcacaagagggtcttgaaagcattgagggggaacattaatcttgggggtgaaattagtcttgtttcgcttccagatgggctagaagcttgtggggatagaaatgaactgggaaagttgtctaaagcaatttttcaggtcatgccagggaagctagaagagctcatagacaggatcaatatgacagaagaagagaaaattacctgtataattactgattggagcatgggatgggctcttgaagtggcagagaagatgaaaatccgacgtgctatctactggcctgctgcagctgccatactatgctcactgatcagtattccaaagctactaagtgatggaatcattgacggcgatggaactccgctaaataaccagatgattcagttggcaccaacaatgcctgcaatggacactgcaaattttgtatgggcctgccttggtgactttaccacacagaaaattatatttgatctcatggttaaaaccaatgaggcagcgaaaatggcagacagaataatttctaactcggcttatgaccttgagcctggagctttttccttcgccccaaacattctacctataggaccacttctggcaagcaatcggctaggagatcagttgggatacttctggccagaagactcaacatgtttgaagtggctagaccagcagccgcccaagtcagttgtttacgtcgcatttggtagctttactgttttcgacaaaacacaattccaagagttagctcagggtcttgaactatccagtagatcattcttgtgggttgtcaggccagatattaccactgaaaccaacgatgcctatccagaaggatttcaagagagagtagccacacgtgggaggatggttggctgggctcctcaacagaaagtccttagtcacccttctatctcctgcttcttgagccactgtggttggaactccaccatggagggtgtaagcaatggggtccctttcttgtgctggccatattttgctgaccaattccttaatgagacctacatttgtgatgtttggaaggtgggattgaagtttgacaaaaacaaatgtgggatcatcacaagggaagaaataaagaataaggtggagacagttatcagtgatgaaaaaatcaaggcaagagctgcagaactcaaaagattggccatgcagaatgttggagaagctggttattcaagcgagaatttcaagaacttcattgaatggattaagtcatga

SEQ ID NO: 360 - protein, 454 aa, Populus balsamifera subsp. trichocarpa
  misc_feature (4)..(453): Pfam Name: UDPGT Pfam Description: UDP-glucoronosyl and UDP-glucosyl transferas
  misc_feature: Ceres Annot ID no. 1450062
  misc_feature: Bit score of 1220.5 for HMM based on sequences of Figure 14
  misc_feature: Functional Homolog Of SEQ ID NO. 335
  misc_feature: in Figure 14
MGKPHIVVIPYPAQGHVIPFMELSQCLVKQGFKITFVSTEYNHKRVLKALRGNINLGGEISLVSLPDGLEACGDRNELGKLSKAIFQVMPGKLEELIDRINMTEEEKITCIITDWSMGWALEVAEKMKIRRAIYWPAAAAILCSLISIPKLLSDGIIDGDGTPLNNQMIQLAPTMPAMDTANFVWACLGDFTTQKIIFDLMVKTNEAAKMADRIISNSAYDLEPGAFSFAPNILPIGPLLASNRLGDQLGYFWPEDSTCLKWLDQQPPKSVVYVAFGSFTVFDKTQFQELAQGLELSSRSFLWVVRPDITTETNDAYPEGFQERVATRGRMVGWAPQQKVLSHPSISCFLSHCGWNSTMEGVSNGVPFLCWPYFADQFLNETYICDVWKVGLKFDKNKCGIITREEIKNKVETVISDEKIKARAAELKRLAMQNVGEAGYSSENFKNFIEWIKS

SEQ ID NO: 361 - DNA, 1377 bp, Sorghum bicolor
  misc_feature: Ceres Annot ID no. 8632619
  misc_feature: Encodes the peptide sequence at SEQ ID NO. 362
atggcatcgtctcctcagcggcctcgtgtaatgatgctgccgttggccgcgcagggccatgtcatgcccctcatggagctctcccacctgctcgtcgagcacggattcgaggtcgtcttcgtgaacacggacttcaaccatgcccgcatcatcacggccctggaaggagcggcccctgcccccgtcgggatcgacctgatctccttcccggacggcatggcccccgacggtgaccgcaccgacatcggcaagctgctcgacggcctgccggcggcgatgctcggcggcctcgaggagacgatcaggtccaggaacatcaggtgggtggtggccgacgtgtccatgagcttcgtgctggagctagtccccaaagtgggcgtgcgtgtcgccttgttctccactttctccgccgccaacttcgcgctgaggatgcaccttcccaagatgctagaggatggcatcatcgacgaaacggggaatgtgaaaaggaacgagagggtccagctaaaccccaagatgccggccatcgacgcctccaagcttccatggatcactattggcaagagccccgagtcacggagagccatgatccagagcgccatcacgaccatcccgacactagcgctcgccgaaactattgtctgcaacactttccaggagatcgagtccgtggcgctggcccacctccccataccggcggtcgccatcggcccgctggaggcgcccaagtcgacgtcgtcggcatcggcggcgactggccatttctgggcgcaagacgtaacctgcctccgctggctcgacgcgcaggctcccggctccgtcgtctacgtggcgttcgggagcctcacggtgttcgacgtggaacggctccaggagctggccgacggcctggtgctcaccgggcggccgttcctgtgggtggtccggcccaacttcgcctacggtgtcggcgagggctggatcgacgggttccggcgccgcgtcgccggcaaggggctcatcgtcggctgggctccccagcagcgcgtgctctcgcacccctcggtggcgtgcttcgtgacgcactgcgggtggaactcgaccatggaagcggtgcggcacggcgtcccgctcctctgctggccctacttcgccgaccagttcttcaaccagacctacatctgcgacctgtggggcgttgggctgaaggtctgcgccgacgggaggggaattgtcaccaaggaggagatcagggacaaggtggagcggctgcttggggacgaagagatcaaggcgaggacgctggccttgaagagcgcggcgtgcgccagcgtcgcggatggagggtcctcgcatcaggatctgctcaagttagtgaatttgctaagagaaaattag

SEQ ID NO: 362 - protein, 458 aa, Sorghum bicolor
  misc_feature (8)..(456): Pfam Name: UDPGT Pfam Description: UDP-glucoronosyl and UDP-glucosyl transferas
  misc_feature: Ceres Annot ID no. 8632619
  misc_feature: Bit score of 841.9 for HMM based on sequences of Figure 14
  misc_feature: Functional Homolog Of SEQ ID NO. 335
MASSPQRPRVMMLPLAAQGHVMPLMELSHLLVEHGFEVVFVNTDFNHARIITALEGAAPAPVGIDLISFPDGMAPDGDRTDIGKLLDGLPAAMLGGLEETIRSRNIRWVVADVSMSFVLELVPKVGVRVALFSTFSAANFALRMHLPKMLEDGIIDETGNVKRNERVQLNPKMPAIDASKLPWITIGKSPESRRAMIQSAITTIPTLALAETIVCNTFQEIESVALAHLPIPAVAIGPLEAPKSTSSASAATGHFWAQDVTCLRWLDAQAPGSVVYVAFGSLTVFDVERLQELADGLVLTGRPFLWVVRPNFAYGVGEGWIDGFRRRVAGKGLIVGWAPQQRVLSHPSVACFVTHCGWNSTMEAVRHGVPLLCWPYFADQFFNQTYICDLWGVGLKVCADGRGIVTKEEIRDKVERLLGDEEIKARTLALKSAACASVADGGSSHQDLLKLVNLLREN

SEQ ID NO: 363 - protein, 456 aa, Vitis vinifera
  misc_feature (4)..(455): Pfam Name: UDPGT Pfam Description: UDP-glucoronosyl and UDP-glucosyl transferas
  misc_feature: Public GI ID no. 157342353
  misc_feature: Bit score of 859.4 for HMM based on sequences of Figure 14
  misc_feature: Functional Homolog Of SEQ ID NO. 335
MGRPHVLIIPCPAQGHVTPLMKFAYQISDHGIKVTFVNSDFIHEKLVAALPDEDEAQSRIGLASIPDGLGPGEDRKDLLKSTDSMLRVMPGHLKELIEKVNNSNDDEKITCVIADTTVGWALEVAEKMGIKSVAFCPCGPGSLALLFHIPRLIEAGHVNGIDGSLLNDELISLAKDIPAFSSNKLPWSCPSDPNLQKVIFQFAFKDISAMNLSNWLLCNSVYELDSSACDLIPNILPIGPLLASNHLGHYTGNFWPEDSTCISWLDKQPAGSVIYVAFGSVAILSQNQFNELALGIELVGRPFLWVVRSDFTNGSAAEYPDGFIERVAEHGKIVSWAPQEKVLAHPSVACFLSHCGWNSTMDGIGMGVPFLCWPYFADQFHNQSYICDKWKVGLGLNPDENGFISRHEIKKKIEMLVSDDGIKANAEKLKEMARKSVIEGGSSYKNFQTFVEALKQ

SEQ ID NO: 364 - protein, 449 aa, Sorghum bicolor
  misc_feature (8)..(449): Pfam Name: UDPGT Pfam Description: UDP-glucoronosyl and UDP-glucosyl transferas
  misc_feature: Public GI ID no. 21326128
  misc_feature: Bit score of 904.1 for HMM based on sequences of Figure 14
  misc_feature: Functional Homolog Of SEQ ID NO. 335
MAFAAPKPHVMVLPFPAQGHVIPLMELSHRLVDYGFKIDFINTEFNHDRIFKSMQNKGAIPEGLHMLSIPDGMDPDDDHTDIGKMVRGLSAAMLSPLEEMIRIKKIKWVIADVSMSWVLELTNTVGIRIALFSTYSASVFALRLKLPKLIEDGIIDESGNVKVHEMIQLMPPIDSTEIPWVSLGSTPERRRVNIQKVIRTNRLIALAEAIICNTFREVEPEALALLPNALPLGPLAVPMSKPTGHFLSEDLTCLTWLDTQAPGSVIYVAFGSSTVFDATRFHELANGLELSGWPFIWVVRPNFTKEIDEDWFNQFQQSVNGKGLIVTWAPQQRVLSHPSVACFMTHCGWNSTMEAVLHGVPFLCCPYFADQFCNQSYVCNVWKTGLKLYSNEQGVVTREEIKEKVVQLLSDEDIKARAVMWKNIACASIREGGSSHANLLSLVNLLQEG

SEQ ID NO: 365 - protein, 454 aa, Vitis vinifera
  misc_feature (5)..(453): Pfam Name: UDPGT Pfam Description: UDP-glucoronosyl and UDP-glucosyl transferas
  misc_feature: Public GI ID no. 157341249
  misc_feature: Bit score of 1128.2 for HMM based on sequences of Figure 14
  misc_feature: Functional Homolog Of SEQ ID NO. 335
MGKKPHVLALPYPAQGHVIPLIELSQWLVKLGFKVTFVNSDFNHKRVVNALSAKDDIGGQIRLVSIPDGLEAWEDRNDLGKLTKAILRVMPGKLEELIEEINGSDDEITCVIADGNLGWAMGVAEKMGIKRAAFWPAAAALLALIFSVRKLVDDGILTNEGIPVKNQMIKLSETMPAMNTAHFAWTCIGDLNTQKFLFDLIRRNNKDILPAEWLVCNSIYDLEPAAFNLAPEMLPIGPLLASNRLGKSIGNFWPEDSTCLRWLDNQTACSVIYVAFGSFTVFDETQFQELALGLELTNSPFLWVVRPDITTGKHEDYPEGFQERVGTRGLMVGWAPQQKVLSHPSIACFLSHCGWNSTMEGVSNGVPFLCWPYFADQFLNQGYICDVWKVGLGFNRDERGIIQQGEIKNKVNQLLLDEKIKARAMVLKEMAMNSVTEGGNSHKNFKNFIEWIKS

SEQ ID NO: 366 - DNA, 1371 bp, Populus balsamifera subsp. trichocarpa
  misc_feature: Ceres Annot ID no. 1450233
  misc_feature: Encodes the peptide sequence at SEQ ID NO. 367
atgggcaatccacatatcctagttataccttatccagagcaaggccatataattcctttactggagctttcacactgcttggctagttatgggttcaaaatcacatttgtaaacacacaacacaacgaagagcgtatcaggaatgcatcgggtttgaaagtgaaaggtgatacagaagatttgatacatctagtctcgttttctgatggtctggaatctggggaggataggtttaagccagggaaaagatctgaaacgttcctgacgcttatgccaggaaaaatagaggagttaatagaaagtattaatgcatcggacagtgacaagatcagttgcatccttgctgatcagactattggatgggccttggaacttgcagagaagaaggggatcaagcgagctgccttttgttctgctgcagctgcaatgttagtccagggattcagcatcccaaaactgattgaagacggaatcatagacaaggaaggaacccccgtgaaaatgcagacaattatgctctcaccaaccatgcctgcaataaacacagcacaactcgtatgggcttgtcttggcaacatgaattcccagaaattattttttgcactaatggttaagaacatccaatccatgaagctaacagaatggctgctatgcaactcagcttatgaacttgagcctggagcattcaacttgtctccacacatcattccaataggaccacttgtagctagcaacagacttggagattcagtaggaagcttctggcaagaggactcaacatgtttggaatggctagatcagcagccaccacaatcagtcatctatcttgcttttggaagttcaactgttctaagccctactcagttccaagaattggctctgggattggatctgactaatagaccattcttgtgggtttcaaggccagatataaccaatggaacacctaatgcttttttacaagaatttaaagacagagtgagccctcagggtaagatagtgacttgggcaccacaacaaaatgtgctggcacacccttctgttgcttgttttgtgagtcactgtggatggaactctgtcattgaaggtgtatgcaatggagtacctttcctgtgctggccttactttgctgaccagttctttaatcaaagctacatttgcgatatttggaaggttggattaggatttaacaaggatgaacatgggataataacaagaggagaaatcaagaacagggtggagcaactgttgagtaatgaagagtttaaagcaacatcattggaactcaaggaaactgtcatgaatagtatcaaagaaggtggtagttcttatcaaaatttcaagagatttattgaatggatcaaggcttag

SEQ ID NO: 367 - protein, 456 aa, Populus balsamifera subsp. trichocarpa
  misc_feature (15)..(455): Pfam Name: UDPGT Pfam Description: UDP-glucoronosyl and UDP-glucosyl transferas
  misc_feature: Ceres Annot ID no. 1450233
  misc_feature: Bit score of 961.5 for HMM based on sequences of Figure 14
  misc_feature: Functional Homolog Of SEQ ID NO. 335
MGNPHILVIPYPEQGHIIPLLELSHCLASYGFKITFVNTQHNEERIRNASGLKVKGDTEDLIHLVSFSDGLESGEDRFKPGKRSETFLTLMPGKIEELIESINASDSDKISCILADQTIGWALELAEKKGIKRAAFCSAAAAMLVQGFSIPKLIEDGIIDKEGTPVKMQTIMLSPTMPAINTAQLVWACLGNMNSQKLFFALMVKNIQSMKLTEWLLCNSAYELEPGAFNLSPHIIPIGPLVASNRLGDSVGSFWQEDSTCLEWLDQQPPQSVIYLAFGSSTVLSPTQFQELALGLDLTNRPFLWVSRPDITNGTPNAFLQEFKDRVSPQGKIVTWAPQQNVLAHPSVACFVSHCGWNSVIEGVCNGVPFLCWPYFADQFFNQSYICDIWKVGLGFNKDEHGIITRGEIKNRVEQLLSNEEFKATSLELKETVMNSIKEGGSSYQNFKRFIEWIKA

SEQ ID NO: 368 - DNA, 1365 bp, Populus balsamifera subsp. trichocarpa
  misc_feature: Ceres Annot ID no. 1476898
  misc_feature: Encodes the peptide sequence at SEQ ID NO. 369
atgggcaacccacatatcgtagtcataccttatccagcacaaggccatgtgattccctttatggaactctcacaatgcctcgcaaaacaaggattcaaaatcacatttgtgaacacagaatataatcataagagggtcttgaaagctttgggagagaacaattatcttgggagtgaaattagtctcgtctcaatccctgatggtttagaaccttgggaggatagaaatgaactaggaaagttaactaaagcaatttttcaggtcatgccagggaagctacagcagctcataaacaggatcaatatgtcaggagaagaaagaattaccggtatcattactgattggtcaatgggctgggctctagaagtagcagagaagatgaatatccgccgtgctatcttttggcctgcctcaactgccgtactgtgctctatgcttagtatttcaaagttactaaatgatggaatcattgacaatgatggcactccactaaagaaccagacaattcagttggcaccaaaaatgccagtgatggacactgcaaattttgcatgggcttgccttcgtgactttaccacacagaaaattatttttgatgtcatggttaaaaccattgagacagtgaaagtggaagactggatagtttctaactcagcatatgaacttgagcctggagctttctctttcgccccaaacataatacctataggaccgcgtttggcaagcaatcggctaggagatcaacaaggatacttctggccagaagattcaacatgtttgaaatggctggaccaacagccgcccaactcagttgtttacattgcatttggtagctttactgtttttgaccaaacacaatttcaagagttagctctaggtcttgaactatccaataggccgttcttgtgggttgtcaggccagatattacagcggagacaaatgatgcttatccagaaggatttcaagagagggtagccaaccgtgggcagatcgttggttgggctcctcaacagaaagtacttagtcacccttctgttttgtgcttcttgagccactgtgggtggaactccaccatggagggtgtaagcaatggggtacctttcttgtgttggccatattttgctgaccaatttcttaacgagacgtacatttgtgatgtttggaaggtgggattgaagctggacaaaaaccaaagtgggatcgtcacaggggaagaaataaagaataaggtggagaaagttgttggtgatgaaaaattcaaggcaagagctttagaactcaaaagattggccatgcagaatgttggagaaggtggttgctcaagcaataatttcaagaatttcgttgaatggatgaaggcatga

SEQ ID NO: 369 - protein, 454 aa, Populus balsamifera subsp. trichocarpa
  misc_feature (4)..(453): Pfam Name: UDPGT Pfam Description: UDP-glucoronosyl and UDP-glucosyl transferas
  misc_feature: Ceres Annot ID no. 1476898
  misc_feature: Bit score of 1167.7 for HMM based on sequences of Figure 14
  misc_feature: Functional Homolog Of SEQ ID NO. 335
MGNPHIVVIPYPAQGHVIPFMELSQCLAKQGFKITFVNTEYNHKRVLKALGENNYLGSEISLVSIPDGLEPWEDRNELGKLTKAIFQVMPGKLQQLINRINMSGEERITGIITDWSMGWALEVAEKMNIRRAIFWPASTAVLCSMLSISKLLNDGIIDNDGTPLKNQTIQLAPKMPVMDTANFAWACLRDFTTQKIIFDVMVKTIETVKVEDWIVSNSAYELEPGAFSFAPNIIPIGPRLASNRLGDQQGYFWPEDSTCLKWLDQQPPNSVVYIAFGSFTVFDQTQFQELALGLELSNRPFLWVVRPDITAETNDAYPEGFQERVANRGQIVGWAPQQKVLSHPSVLCFLSHCGWNSTMEGVSNGVPFLCWPYFADQFLNETYICDVWKVGLKLDKNQSGIVTGEEIKNKVEKVVGDEKFKARALELKRLAMQNVGEGGCSSNNFKNFVEWMKA

SEQ ID NO: 370 - protein, 456 aa, Vitis vinifera
  misc_feature (4)..(455): Pfam Name: UDPGT Pfam Description: UDP-glucoronosyl and UDP-glucosyl transferas
  misc_feature: Public GI ID no. 147802898
  misc_feature: Bit score of 835.4 for HMM based on sequences of Figure 14
  misc_feature: Functional Homolog Of SEQ ID NO. 335
MGRPHVLIIPFPAQGHVTPLMKFAYQISIHGIKVTFVNSDFIHEKLVAALPDEDEARSRIGLASIPDGLGPGEDRKDSLKLTDSILRVMPGHLKELIEKVNNSNDDEKITCVIADSAFGWALEVADKMGIKRVAFCPFGPGSLALAFHIPRLIEAGLLNSTDGSLLNHELICLAKDIPAFISNRLPWSCPTDPTVQEICFRLAFKAIQVMNLSNWLLSNSVYELDSSACELIPNILSIGPLLASHHLGHYAGNFWPEDSTCIGWLDKQPAGSVIYVAFGSLAIFNQRQFNELALGLELVGRPFIWVVRSDFADGSVAEYPDGFIGRVAENGKIVSWAPQEEVLDHPSVACFLSHCGWNSTMDGIGMGVPFLCWPYFADQFHNQSYICDKWKVGLGLNPDENGFISRREIKKKIEKLVSDDGIKANAEKLKEMARKSVIEGGSSYKNFQTFVEALKQ

SEQ ID NO: 371 - protein, 458 aa, Vitis vinifera
  misc_feature (5)..(457): Pfam Name: UDPGT Pfam Description: UDP-glucoronosyl and UDP-glucosyl transferas
  misc_feature: Public GI ID no. 157342349
  misc_feature: Bit score of 797.0 for HMM based on sequences of Figure 14
  misc_feature: Functional Homolog Of SEQ ID NO. 335
MGRRPHVLIIPLPAQGHVAPLMKLAHRISDHGIKVTFVNSDFIHAKLLAALPHEAEARSGIGLASIPDGLDPGDDRKNMLKLTESISRVMPGHLKDLIEKVNHSNDDEQITCVIADITLERWPMEVAEKMGIEGVPFCPMGAGIWALALHIPKLIEAGIVNSTDGSPLNDELICVSKGIPVLSSNSLPWQWPIDLKIQESVFRLYLTSIQIMDSSKWLLCNCVYELDSSACDLIPNLLPIGPLLASSDPGHYAANFWPEDSTCIGWLDKQPAGSVIYVAFGSFTILTQHQFNELALGIELVGRPFLWVVRSDFTDESAAEYPDGFIERVADHGKIVSWAPQEEVLAHPSVACFFSHCGWNSTMGGIGMGVPFLCWPYLGDQFHNQSYICEKWKVGLGLNPDKNGFISRHEIKMKIEKLVSDDGIKANAEKLKEMARKSVSEGGSSYRNFKTFIEAMKQ

SEQ ID NO: 372 - protein, 457 aa, Vitis vinifera
  misc_feature (5)..(456): Pfam Name: UDPGT Pfam Description: UDP-glucoronosyl and UDP-glucosyl transferas
  misc_feature: Public GI ID no. 157342357
  misc_feature: Bit score of 852.5 for HMM based on sequences of Figure 14
  misc_feature: Functional Homolog Of SEQ ID NO. 335
MGRRPHVLIIPFPAQGHVTPLMKFAYQISDHGIKVTFVNSDFIHEKLVAALPDEDEARSRIGLASIPDGLGPGEDRKDPLKSTDSILRVMPGHLKELIEKVNNSNDDEKITCVIADTTVGWALEVAEKMGIESVAFCPCGPGTLALVFDIPRLIEAGHVNGIDGSLLNEELICLAKDIPAFSSNRLPWGCPSDLTVQEILFRLALQCIPAKNLSNWLLCNSVYELDSSACDLIPNILPIGPLLASNHLGHYTGNFWPEDSTCIGWLDKQPAGSVIYVAFGSLAILSQNQFNELALGIELVGRPFLWVVRSDFTNGSAAEYPDGFIERVAEHGKIVSWAPQEKVLAHPSVACFLSHCGWNSTMDGIGIGVPFLCWPYFADQFHNQSYICDKWKVGLGLNPDENGFISRHEIKKKIEMLVSDDGIKANAEKLKEMARKSVIEGGSSYKNFQTFVEALKQ

SEQ ID NO: 373 - protein, 455 aa, Vitis vinifera
  misc_feature (4)..(454): Pfam Name: UDPGT Pfam Description: UDP-glucoronosyl and UDP-glucosyl transferas
  misc_feature: Public GI ID no. 147822731
  misc_feature: Bit score of 832.7 for HMM based on sequences of Figure 14
  misc_feature: Functional Homolog Of SEQ ID NO. 335
MGRPHVLIIPFPAQGHVTPFMKFAYQISDHGIKVTFVNSDFIHEKLVAALPDEDEARSRIGLASIPDGLGPGEDRKDSLKLTDSILRVMPGHLKELIEKVNNSNDDEKITCVIADSAFGWALEVADKMGIKRVAFCPFGPGSLALAFHIPRLIEAGLLNTTDGSLLNHEFICLAKDIPAFISNRLPWSCPTDPTLQEICFRLAFKAIQVMNLSNWLLSNSVYELDSSACELIPNILSIGPLLASHHLGHYAGNFWHEDSTCIGWLDKQPAGSVIYVAFGSLAIFNQRQFNELALGLELVGRPFLWVVRSDFADGSVAEYPDFIERVAENGKIVSWAPQEKVLAHPSVACFLSHCGWNSTMDAIGMGVPFLCWPYFADQFHNQSYICDKWKVGLGLNPDENGFISRHEIKKKIEKLVSDDGIKANAEKLKEMARKSVIEGGSSYKNFQTFVEALKQ

SEQ ID NO: 374 - protein, 454 aa, Vitis vinifera
  misc_feature (2)..(453): Pfam Name: UDPGT Pfam Description: UDP-glucoronosyl and UDP-glucosyl transferas
  misc_feature: Public GI ID no. 157341247
  misc_feature: Bit score of 1041.8 for HMM based on sequences of Figure 14
  misc_feature: Functional Homolog Of SEQ ID NO. 335
MGSLHVLAIPYAAQGHVIPLMELSQNLVMHGFKVTFVNTDFSQERIVKSFAGKDDVRDQIRLVSIPDGLEAWEDRNDLGKACEGILRVMPKKLEELIQEINRTDDHEIACVIADGHMGWALEVAEKLGIKRAAFWPSAAAMMVLTFRMQNLIDDGIVDDDGTPVKSQKFHLSPNMPTINTANLPWTSIGDSTAQTLVFKYLLRNNKSITVADWLICNSTYDLEPDAFSLAQTLLPVGPLLASNRQANTAGHFWPEDSTCLEWLDQQPACSVIYVAFGSFTVFDKAQFRELALGLELCNRPFLWVVRPDISAGANDAYPEGFQERVSTRGLMVGWAPQQKVLSHPSVACFLSHCGWNSTMEGVSNGVPFLCWPYFGDQILNKGYICDVWRVGLGLDPDERGVILGEEIQNKVDQLLMDEKFKARAMELKEMTGHNVREGGKSHNNLKNFIEWIKS

SEQ ID NO: 375 - protein, 458 aa, Vitis vinifera
  misc_feature (5)..(457): Pfam Name: UDPGT Pfam Description: UDP-glucoronosyl and UDP-glucosyl transferas
  misc_feature: Public GI ID no. 157342350
  misc_feature: Bit score of 763.0 for HMM based on sequences of Figure 14
  misc_feature: Functional Homolog Of SEQ ID NO. 335
MGRRPHVLIIPLPAQGHVAPLMRLANRISDHGIKVTFVNSDFIHAKLLAALPHEAEAQSGIRLASIPDGLDPGDDRKNLLKITESSSRVMPGHLKDLIEKVNRSNDDEQITCVIADITLERWPMEVAEKMGIEGVLFCPMGAGIWALALHIPKLIEAGIVNSTDGTPLKDELICVSKGIPVLSCNGLPWKWPIDLKVQEWVFRIYLTSIQFMNSSKRLLCNCVYELDSSACDLIPNLLPIGPLPASRDPGHYAANFWPEDSTCIGWLDKQPAGSVIYVAFGSTGNLTQHQFNELALGIELVGRPFLWVVRSDFTDGSAAEYPDGFIERVADHGKIVSWAPQEEVLAHPSVACFFSHCGWNSTMDSIIMGVPFLCWPYVGDQFLDQNYICDKWKVGLGLNPDENGLISRHEIKMKIEKLVSDDGIKANAEKLKEMTRKSVSEGGSSYKNFKTFIEAMKL

SEQ ID NO: 376 - DNA, 1415 bp, Gossypium hirsutum
  misc_feature: Ceres Clone ID no. 1933155
  misc_feature: Encodes the peptide sequence at SEQ ID NO. 377
gtatagagagaattagaaagcagaaaatgggcaatcctcatattctagcaataccatatccagcacaaggccatgtaattcctctaatggagctctctcataacatggttagccatggattcaaaatcacctttgtcaacacggatttcaatcacaagagagtgaaggatgcattcggcaacaaggttgatggagagggctcaattcgtctggtttcgatccccgacggcatggaacccgatgaggataggaagcaattagggaagttaaccgatggaatcagcaaagtgatgcccttggagctgaagaagctggtgaagaagattaatggatctgaagataataagatcagttgtgtcatagctgatgtgaacatgggatgggcacttgacattgctgcagagtttgaaatacctggagttgctttctggcctgcttccgccatgcttttggccttgctttttagcaccgataagttgcttgatgatcaagtcattgataaacatggaactccaatcaatggagaaaatatgattcaactgtacccaaacacacctgcaatgcaccctaacaactttttgtgggtttgtcttggtgatttcaccgcacaaaagactatattcgagtttgctatgagaaacaacaaagctgttaaaaatgttgagtggctaatctgcaacacaactttcgaccttgaaccaggagcacttagcttaatccctgagatcctacccattggtccactctcagcaaccaaccagcttggacccttgaccggaagtttttggcctgaggatgcaacctgtttgaaatggctcgaccaacagcctccaggctcagtcatatatgtagcatttggtagcttcacggtttttgacccaatccagttccaagaactggctctcggtctggaactctcaaacaggccatttctatgggttgttagaccagataccactgacgggactccatctgatgaactttaccctatagggttcaaagcgagagttgcaggtcgagggaaaatggtgggatgggcaccccaacgagccgttctagctcatccatccattgcttgcttcattagccactgtggttggaactccactgttgaaggtctcagcaatgggatccctttcctttgctggccctactttgctgatcagttcattaacgaaacctacatttgtgacatttggaagattggattaagcttcaacagagatgaaagagggatcattacaagagaagagattaagggtaaggttgagcaattggtagatgatgaaagattcaaagctaaagcactacaactcaagggatcggtgatgaacagtgttagcgaaaatggtagctccaacaggattttcaacaacttcattgaatggatgaaatcatagacatgttttcacttc

SEQ ID NO: 377 - protein, 457 aa, Gossypium hirsutum
  misc_feature (15)..(456): Pfam Name: UDPGT Pfam Description: UDP-glucoronosyl and UDP-glucosyl transferas
  misc_feature: Ceres Clone ID no. 1933155
  misc_feature: Bit score of 1199.1 for HMM based on sequences of Figure 14
  misc_feature: Functional Homolog Of SEQ ID NO. 335
  misc_feature: in Figure 14
MGNPHILAIPYPAQGHVIPLMELSHNMVSHGFKITFVNTDFNHKRVKDAFGNKVDGEGSIRLVSIPDGMEPDEDRKQLGKLTDGISKVMPLELKKLVKKINGSEDNKISCVIADVNMGWALDIAAEFEIPGVAFWPASAMLLALLFSTDKLLDDQVIDKHGTPINGENMIQLYPNTPAMHPNNFLWVCLGDFTAQKTIFEFAMRNNKAVKNVEWLICNTTFDLEPGALSLIPEILPIGPLSATNQLGPLTGSFWPEDATCLKWLDQQPPGSVIYVAFGSFTVFDPIQFQELALGLELSNRPFLWVVRPDTTDGTPSDELYPIGFKARVAGRGKMVGWAPQRAVLAHPSIACFISHCGWNSTVEGLSNGIPFLCWPYFADQFINETYICDIWKIGLSFNRDERGIITREEIKGKVEQLVDDERFKAKALQLKGSVMNSVSENGSSNRIFNNFIEWMKS

SEQ ID NO: 378 - protein, 453 aa, Vitis vinifera
  misc_feature (4)..(452): Pfam Name: UDPGT Pfam Description: UDP-glucoronosyl and UDP-glucosyl transferas
  misc_feature: Public GI ID no. 157341834
  misc_feature: Bit score of 927.8 for HMM based on sequences of Figure 14
  misc_feature: Functional Homolog Of SEQ ID NO. 335
MGKPHILVVPLPAQGHVLPLMELSLCLAKQGLRVTFVNTEFIHERLVNALMERDNLGDQFRLVSIPDGLTDADRIIPGKLSEAIWGIMGEKLEELIGMIKRAGDDVSCVVADRGVGSALEVAAKMGIRRAAFCPIAAIFTPLVFSIPKLINDGIIDNEGTPIKGQEIQYLPTNIPAINTKDFPWVRNGNLTMQKLMFKLIVRNNEAVKKADWLICNSAYDLEPAAFALAPEIIPVGPLLARNRLGNSAGSLWPEDSTCLKWLDQHPPCSVIYVAFGSMTIFNEKQFKELALGLELSNMPFLWVVRPNSIDCTKVAYPEGFQDRIANRRKIVGWAPQQKVLSHPSVACFLSHCGWNSTIEGVSNGVSFLCWPYSVDQFLNERYISDVWKVGLGFNPDERGIITREEIKHKVEQLLGDENFRIRASNLKESAMNCVREGGSSYNNFQRFIQWLKA

SEQ ID NO: 379 - protein, 453 aa, Vitis vinifera
  misc_feature (6)..(452): Pfam Name: UDPGT Pfam Description: UDP-glucoronosyl and UDP-glucosyl transferas
  misc_feature: Public GI ID no. 157341251
  misc_feature: Bit score of 1003.3 for HMM based on sequences of Figure 14
  misc_feature: Functional Homolog Of SEQ ID NO. 335
MGNPHVVVIPWPAQGHVIPLMEFSLCLVEHGCRVTFINTEFNHNRVMNAFTERHTIGDQLRLVSVPGLEFHEDKERPAKLTEGIWQFMPQKVEELMEEINSVDGDGITCVVSDQSIGWGLEIAAKMGIPQAAFFPASALVLALGQSVPKLIEDGVINCDGIPIEHQMIQLSPTAPAINTKNFPWVRMGNVTMQKATFEIGFRNREAAEKADWFFSNSTYDFEPAAFALIPKLIPIGPLVASNRHGNSAGNFWPEDQTCLEWLNQQPPCSVIYVAFGSSTIFNQTQFQELALGLELSNMPFLWVVRPDGTDGKNDAYPEGFQDRVATQGQIVGWAPQQKVLGHPSVACFLSHCGWNSTVEGVSNGVPFLCWPYFADQFVNETYICDVWKIGLGFNPDENGIITRKEIKNKVGQLLGDEKFRSRALNLKEMAIDSVKEGGPSHNNFKNFVEWLKA

SEQ ID NO: 380 - protein, 457 aa, Vitis vinifera
  misc_feature (5)..(456): Pfam Name: UDPGT Pfam Description: UDP-glucoronosyl and UDP-glucosyl transferas
  misc_feature: Public GI ID no. 157342355
  misc_feature: Bit score of 732.9 for HMM based on sequences of Figure 14
  misc_feature: Functional Homolog Of SEQ ID NO. 335
MGRRPHVLIIPLPAQGYVAPLMRLAHRISDHGIKVTFVNSDFIHAKLLAALPHEAEAQSGIGLVSIPDGLDPGDDRKNLLKITESSSRVMPGHLKDLIEKVNRSNDDEQITCVIADITLERWPMEVAEKMGIEGVLFCPMGAGIWALALHIPKLIENDSNISAGTPLKDELICVSKGIPVLSCNGLPWKWPIDLKVQEWVFRIYLTSIQFMDSSKRLPCNCVYELDSSACDLIPNLLPIGPLPASSDPGHYAANFWPEDSTCIGWLDKQPAGSVIYVAFGSTGNLTQHQFNELALGIELVGRPFLWVVRSDFTDGSAAEYPDGFIERVADHGKIVSWAPQEEVLAHPSVACFFSHCGWNSTMDSISMGVPFLCWPYVVDQFLDQNYICDKWKVGLGLNPDENGLISRHEIKMKIEKLVSDDGIKANAEKLKEMTRKSVSEGGSSYKNFKTFIEAMKH

SEQ ID NO: 381 - DNA, 1722 bp, Triticum aestivum
  misc_feature: Ceres Clone ID no. 678597
  misc_feature: Encodes the peptide sequence at SEQ ID NO. 382
atctctgtccatacggagtgtcgggctttgaatagtgcaaactttttgtgctcacacactattctagatagacaacctccatggctgctgctcctgctactcaacctcgtgtcatggtgttacccttccctgcacagggccatgtcatcccgctaatggagctgtctcgcaagctcgccgggcacggcgtcgaggtggacttcgtgaacaccgagttcaaccacgacctcgtcatggaagcaatggcagagaagggagcaattcctgatgggatccacatgctcaccgttccggacggcctgggccccggagacgaccacgcggacatcggcaagtttgtcaaggacctgcccgccgccatgtccggccgcctggaggagatgatccggtcgaggaagatcaagtgggtgatcgtggatgtgtccatgagctgggcactgcaggtggccaccacggcgggtgcccgtgttgcctcgttctcgacctactccgcggccgtgtttgctctcaggatgaacctccccaaattgatacaggacggtgttcttgatgaaagtggggatgtgaaggggcaggagcagatcaagatgatgccgcccatcgacgcgtcggagatcccctgggtcagcctggccagcaccagcgcccctgagaggcgcagaaacaatatcgagaacgtcctcaagaccaacctgtcgatgccactcgccgaggtggtcatcctcaacacttccttggagttggaacccgacgctctggccctcctccccaacgcgctgcctctcggcccgctagtggcgcccacgtcgaggccagccggacacttcttgcccgaggacctcgccagcctcgcttggctcgacgcgcagcccgccggctccgtcgtctacgtggccttcggcagctccggcttcctggacgcaacgcagttccaagagctcgccgacgggctcgcgctctccggccggccgttcctgtgggtggtccggccagacttcaccatcggagcagggcaggatcagttcgacctcgacgcgttcaggcgccgcgtagaggggaaggggctggtggtgggctgggcgccgcagcagcgcgtgctgtcgcacccggcggtggcctgcttcatgtcgcactgcgggtggaactcgaccgtggagggcgtgctgcacggcgtgccgttcctgtgctggccctacttcgcggaccagttctgcaaccagagctacgtgtgcaacgtgtggggcaccggcgccaagctccggcgagacgagagaggggtcgtcgcgaaggacgaggtccagagcaaggtcgcgtggctgctgggtgacgagggggtcaaggcgagggcggtggcgtggaaggaggccgcgtgtggcagcatccgggaaggagggtcctcgcatgggaacttgctcaagcttgtcagcttgctaagagcaagtataatagcgcctagtcagctggctacaagccgttccatctcagacaaagtctagctggagggaagagaagacaggagagagaagggagcgggcgctccgtgagtcgccggctgcagcgcaaggctcgagacaaagaaactgcatgcaagagcttaaagctagcgcagcttcctccactccaatcaactacaatttttctctctgtcatgcatgtagatattaattactatagccaatgcctacagccagcttgttatacgagagttcttttttggtggct

SEQ ID NO: 382 - protein, 471 aa, Triticum aestivum
  misc_feature (9)..(471): Pfam Name: UDPGT Pfam Description: UDP-glucoronosyl and UDP-glucosyl transferas
  misc_feature: Ceres Clone ID no. 678597
  misc_feature: Bit score of 1066.6 for HMM based on sequences of Figure 14
  misc_feature: Functional Homolog Of SEQ ID NO. 335
  misc_feature: in Figure 14
MAAAPATQPRVMVLPFPAQGHVIPLMELSRKLAGHGVEVDFVNTEFNHDLVMEAMAEKGAIPDGIHMLTVPDGLGPGDDHADIGKFVKDLPAAMSGRLEEMIRSRKIKWVIVDVSMSWALQVATTAGARVASFSTYSAAVFALRMNLPKLIQDGVLDESGDVKGQEQIKMMPPIDASEIPWVSLASTSAPERRRNNIENVLKTNLSMPLAEVVILNTSLELEPDALALLPNALPLGPLVAPTSRPAGHFLPEDLASLAWLDAQPAGSVVYVAFGSSGFLDATQFQELADGLALSGRPFLWVVRPDFTIGAGQDQFDLDAFRRRVEGKGLVVGWAPQQRVLSHPAVACFMSHCGWNSTVEGVLHGVPFLCWPYFADQFCNQSYVCNVWGTGAKLRRDERGVVAKDEVQSKVAWLLGDEGVKARAVAWKEAACGSIREGGSSHGNLLKLVSLLRASIIAPSQLATSRSISDKV

SEQ ID NO: 383 - protein, 456 aa, Vitis vinifera
  misc_feature (5)..(455): Pfam Name: UDPGT Pfam Description: UDP-glucoronosyl and UDP-glucosyl transferas
  misc_feature: Public GI ID no. 157342346
  misc_feature: Bit score of 809.0 for HMM based on sequences of Figure 14
  misc_feature: Functional Homolog Of SEQ ID NO. 335
MGRRPHVLVVPFPAQGHVAPLMKLAHKVSDHGIKVTFVNTEFIHAKIMASMPDKDGKQSRIELVSVPDGLNPEANRNDAVMLTESILTVMPGHVKDLIEKINRTNDDEKITCVIADTTVGWALEVAEKMGIKRAAVWPGGPGDLALALHIPKLIEARIIDTDGAPMKNELIHLAEDIPAFSITGLSWNLSDDPKIRDVIFGYAFRVSQTVKLSNWLLCNSFYELHSSACNLISDILPIGPLLASNHPAHSAGNFWAEDSTCLRWLDKQPAGSVIYVAFGSLAILSQHQFNELALGIELVGRPFLWVARSDFTNGSAVEYPDGFMQRVSEYGKIVEWADQEKVLAHPSVACFLSHCGWNSTMEGVSMGVPFLCWPQFADQFCNRNFICDIWKVGLGLDPDGNGIISRHEIKIKIEKLLSDDGIKANALKLKEMARESVSEDGSSSKNFKAFIEAVKH

SEQ ID NO: 384 - protein, 474 aa, Vitis vinifera
  misc_feature (5)..(471): Pfam Name: UDPGT Pfam Description: UDP-glucoronosyl and UDP-glucosyl transferas
  misc_feature: Public GI ID no. 147782587
  misc_feature: Bit score of 696.1 for HMM based on sequences of Figure 14
  misc_feature: Functional Homolog Of SEQ ID NO. 335
MGRRPHVLIIPLPAQGHVAPLMRLAHRISDHGIKVTFVNSDFIHAKLLAALPHEAEAQSGIGLASIPDGLDPGDDRKNLLKITESSSRVMPGHLKDLIEKVNRSNDDEQITCVIADITLERWPMEVAEKMGIEGVLFCPMGAGIWALALHIPKLIEAGIVNSTDGTPLKDELICVSKGIPVLSCNGLPWKWPIDLKVQEWVFRIYLTSIQFMNSSKRLLCNCVYELDSSACDLIPNLLPIGPLPASRDPGHYAANFWPEDSTCIGWLDKQPAGSVIYVAFGSTGNLTQHQFNELALGIELVGRPFLWVVRSDFTDGSAAEYPDGFIERVADHGKIVSWAPQEEVLAHPSVACFFSHCGWNSTMDSIIMGVPFLCWPYVGDQFLDQNYICDKWKVGLGLNPDENGLISRHEIKMKIEKLVSDDGIKANAEKLKEMTRKSEAKQHLQLQSVESSTSHSSIGVTVFHWRRCRRKPAG

SEQ ID NO: 385 - protein, 449 aa, Sorghum bicolor
  misc_feature (8)..(447): Pfam Name: UDPGT Pfam Description: UDP-glucoronosyl and UDP-glucosyl transferas
  misc_feature: Public GI ID no. 21326126
  misc_feature: Bit score of 738.7 for HMM based on sequences of Figure 14
  misc_feature: Functional Homolog Of SEQ ID NO. 335
MASSPQRPRVMMLPLAAQGHVMPLMELSHLLVEHGFEVVFVNTDFNHARIITALEGAAPAPVGIDLISFPDGMAPDGDRTDIGKLLDGLPAAMLGGLEETIRSRNIRWVVADVSMSFVLELVPKVGVRVALFSTFSAANFALRMHLPKMLEDGIIDETGNVKRNERVQLNPKMPAIDASKLPWITIGKSPESRRAMIQSAITTIPTLALAETIVCNTFQEIESVALAHLPIPAVAIGPLEAPKSTSSASAATGHFWAQDGLPAPSSTWRSGALTVFDVERLQELADGLVLTGRPFLWVVRPNFAYGVGEGWIDGFRRRVAGKGLIVGWAPQQRVLSHPSVACFVTHCGWNSTMEAVRHGVPLLCWPYFADQFFNQTYICDLWGVGLKVCADGRGIVTKEEIRDKVERLLGDEEIKARTLALKSAACASVADGGSSHQDLLKLVNLLREN

SEQ ID NO: 386 - protein, 493 aa, Oryza sativa subsp. indica
  misc_feature (20)..(490): Pfam Name: UDPGT Pfam Description: UDP-glucoronosyl and UDP-glucosyl transferas
  misc_feature: Public GI ID no. 125531499
  misc_feature: Bit score of 958.6 for HMM based on sequences of Figure 14
  misc_feature: Functional Homolog Of SEQ ID NO. 335
MASPPPARPHALVIPFPAQGHVIPLMEVAHALADRGVAVTFVNTEFNHGRVVAAMPSPPRRNGVTENGGSGKLGMGRNRIRLVAVPDGMEPDEDRNNLVRLTVLMQEHMAPPVEELIRRSGEEEAAVDGDGDGWGRITCVVADYNVGTWALDVARRTGVMSAAVWPASAAVVASLLSIPKLVRDKVIDAQDGSALTQEAFQLSPDMPMMQPAHLAWNCIGNDEGQELLFRYLLAGVRAVDECDYILCNSFRGAEAATFARFPKILPVGPLLTGERPGMPVGNFWRPEDGACMSWLDAQPARSVVYVAFGSFTMFDRRQFQELALGLELTGRPFLWVVRPDIVRGDVHEYPDGFLDRVVASGNGGGRGKLVAWAPQQRVLAHPAVACFVSHCGWNSIMEGVRNGVPFVAWPYFADQFVNRAYICDIWRVGLPAVADEKLGVVTKKHIAGRVEEVMGDSGMRKRIEAMMAVAHESVQEGGCSHGNFDMFVESIMP

SEQ ID NO: 387 - protein, 492 aa, Oryza sativa subsp. japonica
  misc_feature (20)..(489): Pfam Name: UDPGT Pfam Description: UDP-glucoronosyl and UDP-glucosyl transferas
  misc_feature: Public GI ID no. 22655755
  misc_feature: Bit score of 957.9 for HMM based on sequences of Figure 14
  misc_feature: Functional Homolog Of SEQ ID NO. 335
MASPPPARPHALVIPFPAQGHVIPLMEVAHALADRGVAVTFVNTEFNHGRVVAAMPSPPRRNGVTENGGSGKLGMGRNRIRLVAVPDGMGPDEDRNNLVRLTVLMQEHMAPPVEELIRRSGDEEAAVDGGDGWGRITCVVADYNVGTWALDVARRTGVMSAAVWPASAAVVASLLSIPELVRDKVIDAQDGSALTQEAFQLSPDMPMMQPAHLAWNCIGNDEGQELLFRYLLAGVRAVDECDYILCNSFRGAEAATFARFPKILPVGPLLTGERPGMPVGNFWRPEDGACMSWLDAQLARSVVYVAFGSFTMFDRRQFQELALGLELTGRPFLWVVRPDIVRGDVHEYPDGFLDRVVASGNGGGRGKVVAWAPQQRVLAHPAVACFVSHCGWNSTMEGVRNGVPFVAWPYFADQFVNRAYICDIWRVGLPAVADEKLGVVTKKHIAGRVEEVMGDSGMRKRIEAMMAVAHESVQEGGCSHGNFDMFVESIMP

SEQ ID NO: 388 - DNA, 1389 bp, Solanum lycopersicum
  misc_feature: Ceres Annot ID no. 8454605
  misc_feature: Encodes the peptide sequence at SEQ ID NO. 389
atggtgcaatttattccacatattgtagctataccttatccagcacaaggtcatgttcttccattaatggaactttccttatggttaatcaaagagcttggttgcaaaatcacttttgttaactctgaattcaatcacaaaagagtgatcaagtcattatctgaaaacgacgacgtagaggataagataagtttaatttcaattccagatggattagaacctcatgaagacagaacagaccttaaaaagttgacagaatcaataaatgaagctatgcctgggaaacttatggaagtcattcatatgattaatagtaatgaatcacaagtttcatgtgttgtagctgatgagaatatgggatgggcattagaagtagctgacaaattgaacattagaagcgttgcattctggcctgctgctgctgctacgctagcctctttatttagcgtctcaaaactcatcgatgatggaatcatagacaaagatggatctatattgaaggcagaggggattaagttatcaccaaacatgcccatcatgaatccatcagacttttcatgggctacattccctgatccagcaatgaggaaaatgataatggatcttgtagcagacaacaacgaaaaagtgaaattcgcagattggatcatttgtaactcagcaaaggaactggagcctgcagcatttgccatgttccctcaggtgtcaccaataggacctcttttggcaagcaacagattaggatcatcagcagggcatttctggccccaagactcgaattctctaaaatggcttgatcaacagccacataactccgtcatatacgtagcgtttggtagctttacaatcttggacttaactcaattccaggagctggcaatcgggttagaatcatccaaacgaccattcctatgggtggttcgggaagacctaattttggatggggacgattgcgcttaccccaaaggtttcaaagacagagtaggttctagaggccatatagtgaaatgggcacctcaacaaaaagtgctagcacatccttctattgcttgttttttgagtcactgtggatggaattcgactgtcgagagtgtaagcaatggggtacctttcttgtgttggccttattttgctgaccaattattcaatcaaagttatatttgtgatgtttggaaagtcggattgggatttaacaaaaatgaattcggagttattggaaaggaagaaattcagaataagatggataagttatttggagatgtaacatttaaagaaagggctttagatcttcaagcaaaggttaattcaagtgtcaataaaggaggaaattccaataagatatttggtaaatttattgaatggatcaagactcaaagaggttcaatttaa

SEQ ID NO: 389 - protein, 462 aa, Solanum lycopersicum
  misc_feature (17)..(459): Pfam Name: UDPGT Pfam Description: UDP-glucoronosyl and UDP-glucosyl transferas
  misc_feature: Ceres Annot ID no. 8454605
  misc_feature: Bit score of 1177.4 for HMM based on sequences of Figure 14
  misc_feature: Functional Homolog Of SEQ ID NO. 335
  misc_feature: in Figure 14
MVQFIPHIVAIPYPAQGHVLPLMELSLWLIKELGCKITFVNSEFNHKRVIKSLSENDDVEDKISLISIPDGLEPHEDRTDLKKLTESINEAMPGKLMEVIHMINSNESQVSCVVADENMGWALEVADKLNIRSVAFWPAAAATLASLFSVSKLIDDGIIDKDGSILKAEGIKLSPNMPIMNPSDFSWATFPDPAMRKMIMDLVADNNEKVKFADWIICNSAKELEPAAFAMFPQVSPIGPLLASNRLGSSAGHFWPQDSNSLKWLDQQPHNSVIYVAFGSFTILDLTQFQELAIGLESSKRPFLWVVREDLILDGDDCAYPKGFKDRVGSRGHIVKWAPQQKVLAHPSIACFLSHCGWNSTVESVSNGVPFLCWPYFADQLFNQSYICDVWKVGLGFNKNEFGVIGKEEIQNKMDKLFGDVTFKERALDLQAKVNSSVNKGGNSNKIFGKFIEWIKTQRGSI

SEQ ID NO: 390 - protein, 486 aa, Zea mays
  misc_feature (6)..(484): Pfam Name: UDPGT Pfam Description: UDP-glucoronosyl and UDP-glucosyl transferas
  misc_feature: Public GI ID no. 212721816
  misc_feature: Bit score of 1143.4 for HMM based on sequences of Figure 14
  misc_feature: Functional Homolog Of SEQ ID NO. 335
  misc_feature: in Figure 14
MAPPSPHALVIPYPAQGHVIPLLELAHALVDRGFTVTFANSEFNHRRVVAAAMPESESPTLLGRRGIRLVAVPDGMGPGEDRNDIVRLTLLTAEHMAPRVEDLIRRSRDGDGGAEGGPITCVVADYNVGAWALDVARRTGVRSAAIWPASAAVLASLLSIDKLIQDKIIDPQDGSALSQGTFQLSPDMPVMQTSHLAWNCIGNHDGQEALFRYLRAGVRAVEECDFILCNSFHDAEPATFARFPRIVPVGPLLTGERRRRGSGGKQAAAVVGHFWRPEDGACMAWLNAQAARSVVYVAFGSHTMFDARQFRELALGLELSGRPFLWVVRPDIVLGGGGIHGYPDGFLDRVSATGRGMVVAWSPQQRVLAHPAVACFVSHCGWNSTMEGVRNGVPFLAWPYFTDQFVNQAYICDVWKVGLPAEADESGVVTKEHIASRVEELMGDAGMRERVEDMKRAARGSVTPWGLGRTRNFDHVCSGNEKAWNQ

SEQ ID NO: 391 - protein, 445 aa, Vitis vinifera
  misc_feature (3)..(445): Pfam Name: UDPGT Pfam Description: UDP-glucoronosyl and UDP-glucosyl transferas
  misc_feature: Public GI ID no. 157342345
  misc_feature: Bit score of 718.0 for HMM based on sequences of Figure 14
  misc_feature: Functional Homolog Of SEQ ID NO. 335
MGRHVLVIPYPAQGHVSPLMKLAHRISDHGIKVTFVTTESIHARLMAAMPDKDEELSQMQLVSIPDPWVNKKDLVHVTNSILTVMPVHLKDLIEKVNQTNVDEQITYVVADTAVGWALEIAKKMGIEGSALWPAGPVTLAMGLHIPKLIEAGIIDSYGNPIKSELIRLSKDIPAFSSTNLSWNSTDDPTIRQISFEYAFRLSQTAKISNWLLCNSFYELDSSSFDLIPNVLTLGPLLASNRPGSSAGNLWPNDPTCISWLDKQPAESVIYVAFGSTTFFKQKQFNELALGIELVGRPFLWVVPSVAEYPNEFTQRVSEYGKIVGWADQEKVLAHPSVACFFSHCGWNSTMESLCMGVPFLCWPHTVDQLDNRFFICDIWKVGLGLDPDENGLVSRHQIKTKIENLLSDDGIKENALRLKEMARRSVCQGGSSANNFKTFIEALQN

SEQ ID NO: 392 - DNA, 1431 bp, Solanum lycopersicum
  misc_feature: Ceres Annot ID no. 8456560
  misc_feature: Encodes the peptide sequence at SEQ ID NO. 393
atgagcaaactacacatattgataataccatatccagtacaaggccatgttattcccttaatgcagctagctcaatccttagctaaatatggcttcaagatcacttttgtcaacacagagtccacacacaagagtattctgaattctttatcaggaaaaaatagtttgcatgatcagattcatctgatttcagttttagatgaatcggaatcgggggaggataagaatgtgccaggtaaattatctgaagcaatctttaaaatcatgcctggaaaaattgagaagttgattcaagtaactaatgtatcggaagacgaaaggattacttgcattattgctgatcagagccttggatgggctctggaacttgcagacaaaatgggaattaagagagcagcctttataactgctgcagctgctaatttgatacttggatttaacattccaaagttgattcatgatggcttgattgacaatgatgggactccaagaataaaagatcatacttttcagtttgaaccaactatgccaatcatgaacacatcagatttactttggacaagcatggggaattcaacaatgcaaaaaatcattttcaacatgttggttcacaacaataaatctgtgaaatcagcagattggcttatttgcaactcaacatatgatcttgaaccaggagccttcaaactagcaccagagatagtgcctataggtccacttttttcaaacaactcactcgaatcaaacgcgttgtcacttgaagcagaagcccttatatcttctagagaatctcctaattcactagccggatcgttctggcccgaggactcaacttgtctagactggcttgatcaacaaccattatgctcagttgtgtatgtagcctttgggagcttcacaatattcaatgaaactcagtttcaagaattggcattagggcttgaactatcaaacaaaccattcttatgggttgtgagaactactactctagatactaaaagtgacattttcttgaaaaaatttgaagaaaaaatagggaggcaaaaggggaaaatagtgagttgggcaccacaacaaaaggtgttgagtcattctagtataggttgttttgttagtcactgtggttggaattcgacgatagaagcaatgagtaacggggttccaatcttgtgttggccttattttgctgaccaatttatgaaccaaagttatgtttgtgatatatggaaagttggattaggactaaagaaaggggataatgggattattagttgtggagaaattaaggttaaagtggaacaattgttagggaatgatgtattcaagaaaagagctatgcaaatcaaggaaatgaatatgaactcagtgaaagaagggggaaagtctcaccaaaatttgataaattttattgaatggattaaatcatcatag

SEQ ID NO: 393 - protein, 476 aa, Solanum lycopersicum
  misc_feature (5)..(474): Pfam Name: UDPGT Pfam Description: UDP-glucoronosyl and UDP-glucosyl transferas
  misc_feature: Ceres Annot ID no. 8456560
  misc_feature: Bit score of 885.8 for HMM based on sequences of Figure 14
  misc_feature: Functional Homolog Of SEQ ID NO. 335
MSKLHILIIPYPVQGHVIPLMQLAQSLAKYGFKITFVNTESTHKSILNSLSGKNSLHDQIHLISVLDESESGEDKNVPGKLSEAIFKIMPGKIEKLIQVTNVSEDERITCIIADQSLGWALELADKMGIKRAAFITAAAANLILGFNIPKLIHDGLIDNDGTPRIKDHTFQFEPTMPIMNTSDLLWTSMGNSTMQKIIFNMLVHNNKSVKSADWLICNSTYDLEPGAFKLAPEIVPIGPLFSNNSLESNALSLEAEALISSRESPNSLAGSFWPEDSTCLDWLDQQPLCSVVYVAFGSFTIFNETQFQELALGLELSNKPFLWVVRTTTLDTKSDIFLKKFEEKIGRQKGKIVSWAPQQKVLSHSSIGCFVSHCGWNSTIEAMSNGVPILCWPYFADQFMNQSYVCDIWKVGLGLKKGDNGIISCGEIKVKVEQLLGNDVFKKRAMQIKEMNMNSVKEGGKSHQNLINFIEWIKSS

SEQ ID NO: 394 - DNA, 1419 bp, Sorghum bicolor
  misc_feature: Ceres Annot ID no. 8632034
  misc_feature: Encodes the peptide sequence at SEQ ID NO. 395
atgtccgccgccgacgccggcaaagtcgcccacacggcgccgcacgcgctcctgctcccgtacccggcgcaaggccacgtgatcccgttcatggagctggccgaccgcctcctcgaccgcggcttcgccgtcaccttcgtcaacaccgagttcaaccaccgccgcgtcgtcgtggccgccggcggagccgcggctggcggccggctgcggctcgtgggcgtcgccgacgggatgggcgacggcgaggaccgcgacaacctcgtccgcctcaacgcctgcatgcaggaggccatgccgccgcggctcgaggcgctcctcgtcgccgacgacgagcgcctcggcagggtgacgtgcgtcgtcgtcgacgccggcatgtcgtgggcgctggacgcggtcaagcggcgtgggctcccggccgccgccctctggcccgcgtcggcggccgtgctcgccgtgctcctgggcgccaagacgctcattcgcgatggcgtcatcgatgacgacggagctccagtaaagctggagaacaacacgttccggctggccgagtcgatgccgcccatggacgccgtcttcctagcctggaactacatgggcaaccgcgacgccgagcgcatggtgttccactacctcaccaccacggcgtggaccgccgtcgccaaggcagacgtcgtcctctgcaacaccttcgaggagctcgagccggacatcttcggcccctactccccggcggccaccaccatcctccccatcggcccgctgcgcacatggcggcgtcaaacgagccaggcgccggcggggcacttctggcgcgccgacgacgaggcctgcctgtccttcctcgacgcgcagcagccccatggctccgtggtgtacgtggcgttcggcagcctgacggtcatgagccccgtgcagctccaggagctcgcgctggctctgctggcctccgcccgcccgttcctgtgggtgttccggccgggtctggcggccgagctccccgccgcgttcacggatctcctgccacgccatgggaggggtaaggtggtggagtgggcgccgcaggagaaagtgctcgcgcatcctgcaattgggtgtttcttgacgcattgcgggtggaactcgacgttggagggcgtccgccatggcgtgcctttgctttgttggccctatttcactgaccagttcacgaaccaggcatatatctgtgatatatggagggtggggctaaggatggcgcccaatgacagtgatagcactgtcaccaaggagagaatcatggagagattggagagcctgatgggtgatagtggtgttaaggaaagagtgaaaggattgaaggatttggcagagagaaacatggggacaaagggtcaatctttgaagaacctcaacaccttcgtggagtttatgaggaagtga

SEQ ID NO: 395 - protein, 472 aa, Sorghum bicolor
  misc_feature (16)..(472): Pfam Name: UDPGT Pfam Description: UDP-glucoronosyl and UDP-glucosyl transferas
  misc_feature: Ceres Annot ID no. 8632034
  misc_feature: Bit score of 680.2 for HMM based on sequences of Figure 14
  misc_feature: Functional Homolog Of SEQ ID NO. 335
MSAADAGKVAHTAPHALLLPYPAQGHVIPFMELADRLLDRGFAVTFVNTEFNHRRVVVAAGGAAAGGRLRLVGVADGMGDGEDRDNLVRLNACMQEAMPPRLEALLVADDERLGRVTCVVVDAGMSWALDAVKRRGLPAAALWPASAAVLAVLLGAKTLIRDGVIDDDGAPVKLENNTFRLAESMPPMDAVFLAWNYMGNRDAERMVFHYLTTTAWTAVAKADVVLCNTFEELEPDIFGPYSPAATTILPIGPLRTWRRQTSQAPAGHFWRADDEACLSFLDAQQPHGSVVYVAFGSLTVMSPVQLQELALALLASARPFLWVFRPGLAAELPAAFTDLLPRHGRGKVVEWAPQEKVLAHPAIGCFLTHCGWNSTLEGVRHGVPLLCWPYFTDQFTNQAYICDIWRVGLRMAPNDSDSTVTKERIMERLESLMGDSGVKERVKGLKDLAERNMGTKGQSLKNLNTFVEFMRK

SEQ ID NO: 396 - protein, 462 aa, Phaseolus vulgaris
  misc_feature (4)..(461): Pfam Name: UDPGT Pfam Description: UDP-glucoronosyl and UDP-glucosyl transferas
  misc_feature: Public GI ID no. 10953887
  misc_feature: Bit score of 1109.1 for HMM based on sequences of Figure 14
  misc_feature: Functional Homolog Of SEQ ID NO. 335
  misc_feature: in Figure 14
MRDSTVLALPLPAQGHVNPMMTFSQKLLENGCKVIFVNTDFNHRRVVSSMVEQQDCSSLDEQESVLKLVSIPDGLGPDEDRNDQAKLYEAIPKTMPGALEKLIEDIHLKGENKINFIVADLCMAWALDVGSKLGIKGAVLCPASAAIFTLVYSIPVLIDEGIIDSDLGLTSTTKKRIQISPSMPEMDPEDFFWFNMGDLTTGKNVLKYLLHCARSLQLTQWWLCNSTHELEPGTLLFLPKIIPIGPLLRSNDNDHNKSAATKSMGQFWKEDQSCMSWLDEQADGSVLYVAFGSITLFDQNQFNELALGLDLTNRPFLWVIREDNKMAYPHEFQGHKGKIVNWAPQQKVLSHPAIACFVTHCGWNSTMEGLSSGVPLLCWPYFGDQLYNKAHICDELKVGLGIDKDQNGVVSRGELKTKVEQIFNDENIKFRCVVLKEKVMKNIAKGGTSYENFKNFVKEIKE

SEQ ID NO: 397 - DNA, 1560 bp, Glycine max
  misc_feature: Ceres Clone ID no. 463302
  misc_feature: Encodes the peptide sequence at SEQ ID NO. 398
atatttcaacctcctcagatttctttcttagcaaaccaattttcaaccacatgggtatccctcactttctcgttataccatatccagttctgggtcatgtgaatccccttatgcaattgtctgaggctctaaccaagcatggctgcaaaatcacatttctgaacacagagttcagccacaaaagagcaaacaacgctggtgctggactagacaaccttaaggaatcaggaatcaagtttgtgacactcccagatggcttggaacctgaagatgatagaagtgaccatgagaaagttattttgtctatccaaagcaacatgccttctttgcttccaaagctcatagaagatatcaatgctttggatgctgagaatagcataacttgcatagttgctactatgaatatgggttgggccttggaaattggacacaaacttggaattgaaggagctcttctttggactgcatctgcaacttccttggctgcatgctattgcattccaaggctgattgatgatggaattatagactcagaaggagtagcaaccaagaaacaagaattccagctttccctaaatatgcctatgatggaccctgcagaccttccatggggtggcctacgtaaggttttcttccctcaaatagttaaagagatgaaaatcttggagttaggagaatggtggctttgcaacaccacttgtgatcttgagcctggagcacttgccatatctccaaggttcctcccaattggcccattgatggaaagtgacaccaacaaaaattcattctgggaagaggacataacttgcctagattggttggatcagcagccacctcaatctgttgtgtatgtttcttttggtagtttagcaatagttgaacctaaccaattcaaagaactagctctaggacttgatctccttaacatgccttttctttgggttgtacgttccgacaataataacaaggtaaatagtgcataccctgatgaattccatggaagtaaaggtaaaattgtcaattgggtgcctcagaggaagatattgaaccaccctgccatagcttgcttcattagtcactgtggttggaattcaactatagaaggtgtatgcagtggcatacctttcttgtgttggccatttttctctgaccaatttgttaataggtcgtatatttgtgacgtgtggaaggttggattgaaattagacaaggatggaaatggattaatactgaagggagagataaggaagaaggtggaccaattgcttgggaatgaagacatcaaagctagatcgttgaaactgaaggaattgactgtgaataactcagttaatggtgatcaatcttcaaagaatctagaaaagtttattaactgggcaaagtagtactacctcctgctatagtttggattggaagttgtctctctttaatttttctcaatttttatgtctgaaattcgtttactatagctaaacagcagattgcatctccctgttgggtccaaagatactcaaaagaatcttttccaatttcaaaagaatagaagttaagtccaatgac

SEQ ID NO: 398 - protein, 444 aa, Glycine max
  misc_feature (4)..(444): Pfam Name: UDPGT Pfam Description: UDP-glucoronosyl and UDP-glucosyl transferas
  misc_feature: Ceres Clone ID no. 463302
  misc_feature: Bit score of 732.9 for HMM based on sequences of Figure 14
  misc_feature: Functional Homolog Of SEQ ID NO. 335
MGIPHFLVIPYPVLGHVNPLMQLSEALTKHGCKITFLNTEFSHKRANNAGAGLDNLKESGIKFVTLPDGLEPEDDRSDHEKVILSIQSNMPSLLPKLIEDINALDAENSITCIVATMNMGWALEIGHKLGIEGALLWTASATSLAACYCIPRLIDDGIIDSEGVATKKQEFQLSLNMPMMDPADLPWGGLRKVFFPQIVKEMKILELGEWWLCNTTCDLEPGALAISPRFLPIGPLMESDTNKNSFWEEDITCLDWLDQQPPQSVVYVSFGSLAIVEPNQFKELALGLDLLNMPFLWVVRSDNNNKVNSAYPDEFHGSKGKIVNWVPQRKILNHPAIACFISHCGWNSTIEGVCSGIPFLCWPFFSDQFVNRSYICDVWKVGLKLDKDGNGLILKGEIRKKVDQLLGNEDIKARSLKLKELTVNNSVNGDQSSKNLEKFINWAK

SEQ ID NO: 399 - DNA, 1566 bp, Zea mays
  misc_feature: Ceres Clone ID no. 337235
  misc_feature: Encodes the peptide sequence at SEQ ID NO. 400
gatactgatacacggctcagtggctcacccaagccaagaccaagaaccccgggcggacgaaaagatggccgccgatgccgcacgcacgccggcgccgcacgcgctgctgctcccttacccagcgcagggccacgtgatcccgttcatggagctggccgaccgcctcctcgacaggggcttcgccgtcaccttcgtcaacaccgagttcaaccaccgccgcgtcgtcgtggccgccgccggcggccgggcgcccgatggccggctgcggctcgttggtgtcgctgacgggatgggcgacggcgaggaccgcgacaacttcgtccgcctcaacgcctgcatgaaggaggccatgccgctgcggctcgacgcgctcctcgacgccgacgacgagcgcctcggcagggtcacgtgcgtcgtggtcgacgtcggcatgtcctgggcgctggacgcggtcaagcggcgtgggctcccggccgccgcactctggcccgcgtcggcggccgtgctcgccgtcctgttcggcgccaagaagctcatacgcgatggcgtcatcgatgacgacggagctccagtgaagctggagaaccactcgttccggctggccgagtcgatgccccccatggacgccgtcttcctggcgtggaactacatgggcaaccgcgacgtcgagcgcatggtcttccactacctgaccaccactgcgtgggccgccgtggctaaggcggacgtcgtcctctgcaacaccttcgaggacctcgagccggacatcttcggcgcccactccccggcggccgcctccatcctcccgatcggcccgctgcgcacctggcagcgccggacgagcgaggcgccggccgggcacttttggcgcgccgacgacgaggcctgcgcgtccttcctggacgcgcagccccgtgggtccgtgacgtacgtggcgttcgggagcctgacggtcatgagccccgcgcagctccaggagctcgcgctggccctgctggcctccgcccgccccttcctgtgggtgttccggccagggctggcggccgagctcccgcccgcgttcacggatctcctgccacgccatgcgaggggcaaggtggtggagtgggcgccgcaggagaaagtgctcgcgcaccctgctgtcggctgcttcctgacgcattgcgggtggaactcgacgctggagggcgtccgccatggcgtgcctttgctttgttggccctactttagcgaccagttcacgaaccaggcatacatttgtgatatctggaaggtggggttaagggtggtgcccgacggtggtgatggcattgtcgccaaggaaaggatcatggagaggttgacgagcctaatgggtgacagtggtgtgaaggaaagggtgaaaagattgaaggaattggcagagaggagcatggggcctgagggcaaatctttgaagaacatcaacgccttcatggaatccatgacgaagtgattgttattgtgttattgttttattttcgggaatgactaccactgatgtccaacgcatgttccaacatccaacaagatcatacaagatatctg

SEQ ID NO: 400 - protein, 469 aa, Zea mays
  misc_feature (13)..(469): Pfam Name: UDPGT Pfam Description: UDP-glucoronosyl and UDP-glucosyl transferas
  misc_feature: Ceres Clone ID no. 337235
  misc_feature: Bit score of 670.9 for HMM based on sequences of Figure 14
  misc_feature: Functional Homolog Of SEQ ID NO. 335
MAADAARTPAPHALLLPYPAQGHVIPFMELADRLLDRGFAVTFVNTEFNHRRVVVAAAGGRAPDGRLRLVGVADGMGDGEDRDNFVRLNACMKEAMPLRLDALLDADDERLGRVTCVVVDVGMSWALDAVKRRGLPAAALWPASAAVLAVLFGAKKLIRDGVIDDDGAPVKLENHSFRLAESMPPMDAVFLAWNYMGNRDVERMVFHYLTTTAWAAVAKADVVLCNTFEDLEPDIFGAHSPAAASILPIGPLRTWQRRTSEAPAGHFWRADDEACASFLDAQPRGSVTYVAFGSLTVMSPAQLQELALALLASARPFLWVFRPGLAAELPPAFTDLLPRHARGKVVEWAPQEKVLAHPAVGCFLTHCGWNSTLEGVRHGVPLLCWPYFSDQFTNQAYICDIWKVGLRVVPDGGDGIVAKERIMERLTSLMGDSGVKERVKRLKELAERSMGPEGKSLKNINAFMESMTK

SEQ ID NO: 401 - protein, 463 aa, Zea mays
  misc_feature (5)..(462): Pfam Name: UDPGT Pfam Description: UDP-glucoronosyl and UDP-glucosyl transferas
  misc_feature: Bit score of 1153.2 for HMM based on sequences of Figure 14
  misc_feature: Functional Homolog Of SEQ ID NO. 335
MAAKAHVLVLPMPCQGHVTPLMELSHLLVDQGFEVTFVNTDVDRAAVVAALEASGGGGGVAALGGGIHLASIPDGLADDEDRKDISKLVDAYTRHMPGYLERLLADMEAAGRPRAKWLVADTNMGWSFEVAKKLGIRVVSFWPAATACLAFMLKIPKLIQDGLLDDKGLPVRQETFQLAPGMPPLHSSQLSWNNAGEPEGQHIIFELVTRNNKLNDELAEMVVSNSFYEAEAGAFKLFPGILPIGPLSADGAFRKPVGHYLPEDERCVKWLDAHPDASSVVYVAFGSITIFSARQFEELAEGLELTGRPFLWVVRPDFTPGLSKAWLHEFQRRVAGRGMIVSWCSQQQVLAHRAVACFVSHCGWNSTMEGLRNGVPFLCWPYFCDQYLNRSYIVNVWRTGLAVTPDADGIVGREELRSKVEQVVGDADIKDRARVLKDEAHRCVAEGGSSNDNFKKLVNLLSE

SEQ ID NO: 402 - DNA, 932 bp, Arabidopsis thaliana
  misc_feature: Ceres Clone ID no. 5055
  misc_feature: Encodes the peptide sequence at SEQ ID NO. 403
atcttttgggagaggagaaagaaaaagaaaatgggaagagggagagtagaattgaagaggatagagaacaagatcaataggcaagtgacgtttgcaaagagaaggaatggtcttttgaagaaagcatacgagctttcagttctatgtgatgcagaagttgctctcatcatcttctcaaatagaggaaagctgtacgagttttgcagtagttcgagcatgcttcggacactggagaggtaccaaaagtgtaactatggagcaccagaacccaatgtgccttcaagagaggccttagcagaacttagtagccagcaggagtatctcaagcttaaggagcgttatgacgccttacagagaacccaaaggaatctgttgggagaagatcttggacctctaagtacaaaggagcttgagtcacttgagagacagcttgattcttccttgaagcagatcagagctctcaggacacagtttatgcttgaccagctcaacgatcttcagagtaaggaacgcatgctgactgagacaaataaaactctaagactaaggttagctgatgggtatcagatgccactccagctgaaccctaaccaagaagaggttgatcactacggtcgtcatcatcatcaacaacaacaacactctcaagctttcttccagcctttggaatgtgaacccattcttcagatcgggtatcaggggcaacaagatggaatgggagcaggaccaagtgtgaataattacatgttgggttggttaccttatgacaccaactctatttgaatctttctcacttaatcaatccctctctttttttttttgacatttttaagatgatgtttctattttattacctctctcatgttttctgtcttgtgtgcatgtgtgtgtgtaatgtttatgcccttctattattcaataattttttcgac

SEQ ID NO: 403 - protein, 250 aa, Arabidopsis thaliana
  misc_feature (75)..(176): Pfam Name: K-box Pfam Description: K-box region
  misc_feature (9)..(59): Pfam Name: SRF-TF Pfam Description: SRF-type transcription factor (DNA-binding a
  misc_feature: Ceres Clone ID no. 5055
  misc_feature: Bit score of 627.4 for HMM based on sequences of Figure 3
  misc_feature: Functional Homolog Of SEQ ID NO. 403
  misc_feature: in Figure 3
MGRGRVELKRIENKINRQVTFAKRRNGLLKKAYELSVLCDAEVALIIFSNRGKLYEFCSSSSMLRTLERYQKCNYGAPEPNVPSREALAELSSQQEYLKLKERYDALQRTQRNLLGEDLGPLSTKELESLERQLDSSLKQIRALRTQFMLDQLNDLQSKERMLTETNKTLRLRLADGYQMPLQLNPNQEEVDHYGRHHHQQQQHSQAFFQPLECEPILQIGYQGQQDGMGAGPSVNNYMLGWLPYDTNSI

SEQ ID NO: 404 - protein, 254 aa, Sinapis alba
  misc_feature (75)..(177): Pfam Name: K-box Pfam Description: K-box region
  misc_feature (9)..(59): Pfam Name: SRF-TF Pfam Description: SRF-type transcription factor (DNA-binding a
  misc_feature: Public GI ID no. 3912986
  misc_feature: Bit score of 618.5 for HMM based on sequences of Figure 3
  misc_feature: Functional Homolog Of SEQ ID NO. 403
  misc_feature: in Figure 3
MGRGRVELKRIENKINRQVTFAKRRNGLLKKAYELSVLCDAEVALIIFSNRGKLYEFCSSSSMIRTLERYQKCNYGPPEPNVPSREALAVELSSQQEYLKLKERYDALQRTQRNLLGEDLGPLSTKELELLERQLDSSLKQIRALRTQFMLDQLNDLQSKERMLNETNKTLRLRLADGYQMPLQLNPNQEDHHVDYGRHDQQQQQNSHHAFFQPLECEPILQMGYQGQQDHGMEAGPSENNYMLGWLPYDTNSI

SEQ ID NO: 405 - DNA, 1336 bp, Gossypium hirsutum
  misc_feature: Ceres Clone ID no. 1935363
  misc_feature: Encodes the peptide sequence at SEQ ID NO. 406
aaagaaaaagatcttatgagttgttttactttagatcacaaaccagtactatttttttttctttttttaaatttcatttcattttcattttcccataattattttagaatgtttttttagataatcctagattctaatgaagttcttagctcaagaatatcattaaaaaaaaaaaactctccaagaagataaatagagaaaaaaaagtatcattaaacaccttcaccaacaagaacaaaaaaaacaggtgaaaccccgttttcttttggtctcaaaacgattcaaaagggcaagattcttggttttagggtttgggttttcattgatttttagtgaaaaaattataaaaaaattatgggaagaggtagggttgaacttaagaggattgaaaacaagatcaacaggcaagtcacttttgcaaagagaagaaatggtcttttgaagaaagcttatgagctttccgttctttgtgatgctgaagttgctctcatcatcttctccaatagaggaaagttgtacgaattttgcagcagctcaagcatgatcaaaacattggagaggtaccaaaaatgcaactatggagctcctgagccaaatgtgtcatcgagggaggctgctttggaattaagcagtcggcaggaatatttgaagcttaaagcacgttacgatgccttacaaaggtcccaaaggaatttactgggagaagatttgggacctttgagcagcaaggaactcgagtcacttgagaaacagcttgattcatcattgaagctaattagatcgacgcggacccaatacatgcttgatcagctcaatgatcttcaaagaaaggaacatcttcttaatgaagccaataagaccctaaaacaaaggttggtggaagggtatcaagtaaattcgttacaattgaatccaaatgcaacggaagacgtcggctatggccgtcaacaggttcatcatcagcctcatggcgatgccttcttccatccattggattgtgagccgactttacaaatcggatatcagcatgatccaatgtcagtggtgactgcagggccaagtgtgaataattatatgacaggttggttaccatagtatatatatatctatatatctatatgaagaagaagaaaccatgggtatggatttcttcataagaaacttattttatgttattatatgaaacaaaagaaatgtgtaatgccatggatttattattattattattattattgtaactttgtgtttttaattaggatgcactataacaaactccatctgtgtgagctataatgtgcatctttctttgaacaatttaatttgtttttaagggatt

SEQ ID NO: 406 - protein, 246 aa, Gossypium hirsutum
  misc_feature (75)..(176): Pfam Name: K-box Pfam Description: K-box region
  misc_feature (9)..(59): Pfam Name: SRF-TF Pfam Description: SRF-type transcription factor (DNA-binding a
  misc_feature: Ceres Clone ID no. 1935363
  misc_feature: Bit score of 659.1 for HMM based on sequences of Figure 3
  misc_feature: Functional Homolog Of SEQ ID NO. 403
  misc_feature: in Figure 3
MGRGRVELKRIENKINRQVTFAKRRNGLLKKAYELSVLCDAEVALIIFSNRGKLYEFCSSSSMIKTLERYQKCNYGAPEPNVSSREAALELSSRQEYLKLKARYDALQRSQRNLLGEDLGPLSSKELESLEKQLDSSLKLIRSTRTQYMLDQLNDLQRKEHLLNEANKTLKQRLVEGYQVNSLQLNPNATEDVGYGRQQVHHQPHGDAFFHPLDCEPTLQIGYQHDPMSVVTAGPSVNNYMTGWLP

SEQ ID NO: 407 - DNA, 1170 bp, Glycine max
  misc_feature: Ceres Clone ID no. 511680
  misc_feature: Encodes the peptide sequence at SEQ ID NO. 408
agctaggtcgcagaaaatgccttccccactcacaaaacgaaacttttgatttccttaggcgcgtcattgtcatggagttagcagtgtgttaaacacaccagagggtgatagcagggagaaaaagacagagtgtgtaagaaagagaagagagagaaatgggaaggggaagagtggagttgaagagaattgagaacaagatcaacaggcaagtgacctttgcaaaacgaaggaacgggcttttgaagaaagcttacgagctttccgttctttgtgatgccgaggttgctctcatcatcttctccaatagaggaaaactgtacgagttctgcagcagttcaagcatgctcaaaacgctagagaggtaccagaaatgtaactatggtgcgcctgaggctaatgtgtctacacgggaagccttggagttaatcagtcaacaggagtacttgaagctgaaggcacgttatgaggccctacaacggtcccagaggaaccttatgggagaagatcttggtcctttaagcagcaaagagctcgagtctcttgaaaggcagctagattcgtccttgaagcaaataagatcaaccaggacccagttcatgttggatcagctctctgatcttcaacgtaaggaacacttgctaagtgaggctaacaggtctctcagacaaaggcagttggaagggtatcaaataaatccactccaactgaatcccggagttgaagagatgggatatggcaggcatccagctcaaactcatggtgaagccctctttcaacaaatggagtgtgagccaacgttacaaattgggtatcagcctgatccagtatcagtggtgacagcaggcccaagcatgagcaattacatggcaggatggttaccatagtttgcgtttcctgcataagatccactgcaccagcacatttgccgttccaattttatttgaaaacgaaaaaaaaaagaaggaagaaaatggctttggatgtaatgaagctgtaagtgtctgccgtgtatgaagtaggaacaaagttaagcagtgttgtttgtgtgtgctagctctttcataaaactgcacttctttgcttcggttactgtttcttcccttttaataagagtattgatgtcattaatgaactacatggttattttatatgctaccgtcagtgattttg

SEQ ID NO: 408 - protein, 242 aa, Glycine max
  misc_feature (75)..(175): Pfam Name: K-box Pfam Description: K-box region
  misc_feature (9)..(59): Pfam Name: SRF-TF Pfam Description: SRF-type transcription factor (DNA-binding a
  misc_feature: Ceres Clone ID no. 511680
  misc_feature: Bit score of 645.9 for HMM based on sequences of Figure 3
  misc_feature: Functional Homolog Of SEQ ID NO. 403
  misc_feature: in Figure 3
MGRGRVELKRIENKINRQVTFAKRRNGLLKKAYELSVLCDAEVALIIFSNRGKLYEFCSSSSMLKTLERYQKCNYGAPEANVSTREALELISQQEYLKLKARYEALQRSQRNLMGEDLGPLSSKELESLERQLDSSLKQIRSTRTQFMLDQLSDLQRKEHLLSEANRSLRQRQLEGYQINPLQLNPGVEEMGYGRHPAQTHGEALFQQMECEPTLQIGYQPDPVSVVTAGPSMSNYMAGWLP

SEQ ID NO: 409 - protein, 242 aa, Vitis vinifera
  misc_feature (75)..(175): Pfam Name: K-box Pfam Description: K-box region
  misc_feature (9)..(59): Pfam Name: SRF-TF Pfam Description: SRF-type transcription factor (DNA-binding a
  misc_feature: Public GI ID no. 225425372
  misc_feature: Bit score of 661.8 for HMM based on sequences of Figure 3
  misc_feature: Functional Homolog Of SEQ ID NO. 403
  misc_feature: in Figure 3
MGRGRVELKRIENKINRQVTFAKRRNGLLKKAYELSVLCDAEVALIIFSNRGKLYEFCSSSSMLKTLERYQKCNYGAPETNVSTREALELSSQQEYLKLKARYEALQRSQRNLLGEDLGPLSTKELESLERQLDVSLKQIRSTRTQYMLDQLTDLQRKEHMLNEANKTLKQRLLEGTQVNQLQWNPNAQDVGYGRQQAQPQGDGFFHPLECEPTLQIGYQPDPITVAAAGPSVNNYMPGWLP

SEQ ID NO: 410 - protein, 240 aa, Prunus persica
  misc_feature (75)..(175): Pfam Name: K-box Pfam Description: K-box region
  misc_feature (9)..(59): Pfam Name: SRF-TF Pfam Description: SRF-type transcription factor (DNA-binding a
  misc_feature: Public GI ID no. 126842923
  misc_feature: Bit score of 650.1 for HMM based on sequences of Figure 3
  misc_feature: Functional Homolog Of SEQ ID NO. 403
  misc_feature: in Figure 3
MGRGRVELKRIENKINRQVTFAKRRNGLLKKAYELSVLCEAEVALIIFSNRGKLYEFCSSSSMLKTLERYQKCNYGAPETNVSAREALELSSQQEYLKLKARYEALQRNQRNLLGEDLGPLSSKELESLERQLDMSLKQIRSTRTQCMLDQLTDLQRKEHMLNEANKTLKQRLFEGYHVNSLQMNPNADEYGRQQTQAHGDGFFHPLDCEPTLQIGYQNDPISVVTAGPSVSNYMAGWLP

SEQ ID NO: 411 - protein, 243 aa, Lotus japonicus
  misc_feature (75)..(175): Pfam Name: K-box Pfam Description: K-box region
  misc_feature (9)..(59): Pfam Name: SRF-TF Pfam Description: SRF-type transcription factor (DNA-binding a
  misc_feature: Public GI ID no. 60100342
  misc_feature: Bit score of 651.5 for HMM based on sequences of Figure 3
  misc_feature: Functional Homolog Of SEQ ID NO. 403
  misc_feature: in Figure 3
MGRGRVELKRIENKINRQVTFAKRRNGLLKKAYELSVLCDAEVALIIFSNRGKLYEFCSSSSMLKTLERYQKCNYGAPEANVSTREALELSSQQEYLKLKARYEALQRSQRNLMGEDLGPLNSKELESLERQLDSSLKQIRSTRTQFMLDQLSDLQRKEHMLSEANRSLRQRQLEGYQLNSLQLNPGVEDMGYGRHPAQTHGDAFYHSIECEPTLQIGYQPDPVSVVTAGPSMNNNYMAGWLP

SEQ ID NO: 412 - protein, 241 aa, Solanum lycopersicum
  misc_feature (75)..(175): Pfam Name: K-box Pfam Description: K-box region
  misc_feature (9)..(59): Pfam Name: SRF-TF Pfam Description: SRF-type transcription factor (DNA-binding a
  misc_feature: Public GI ID no. 31747210
  misc_feature: Bit score of 644.5 for HMM based on sequences of Figure 3
  misc_feature: Functional Homolog Of SEQ ID NO. 403
  misc_feature: in Figure 3
MGRGRVELKRIENKINRQVTFAKRRNGLLKKAYELSVLCDAEVALIIFSNRGKLYEFCSSSSMLKTLERYQKCNYGAPEPNISTREALEISSQQEYLKLKGRYEALQRSQRNLLGEDLGPLNSKELESLERQLDMSLKQIRSTRTQLMLDQLTDYQRKEHALNEANRTLKQRLMEGSQLNLQWQPNAQDVGYGRQTTQTQGDGFFHPLDCEPTLQIGYQNDPITVGGAGPSVNNYMAGWLP

SEQ ID NO: 413 - DNA, 729 bp, Populus balsamifera subsp. trichocarpa
  misc_feature: Ceres Annot ID no. 1438157
  misc_feature: Encodes the peptide sequence at SEQ ID NO. 414
atggggagaggtagggttgagttgaagagaattgagaacaagatcaacaggcaagtaacatttgcaaagagaaggaatggacttttgaagaaagcctatgagctttccgttctttgtgatgcagaggttgctctcatcatcttctccaatagaggaaagctgtacgagttttgcagtagttcaagcatgctcaaaactcttgagaggtaccagaagtgcaattatggagcaccagagccaaatgtgtctgcaagggaggccctggaactgagtagtcagcaggaatatctgaagcttaaagcacgttatgaagccctgcaaagaacccaaaggaatcttttgggagaagaacttggccctctaagcagcaaagagctagaatcacttgaaaggcagcttgatatgtcattgaagcagatcagatcaacaaggacccaatacatgctggatcagctccatgacctacagcataaggagcacatgctgactgcagctaataagtccctgaaagaaaggttgatggaaggctaccaattaaattcactccagttgaatccaagtgcagaagatgtggagtacgctagacaacaagcccaaccccagggtgatgggttttttcatgctttggagtgtgaacctacactacaaattgggtatcagccagaaaatataacaatggtcactgctggcccaagtatgactacttacatgccaggttggttagcatga

SEQ ID NO: 414 - protein, 242 aa, Populus balsamifera subsp. trichocarpa
  misc_feature (75)..(175): Pfam Name: K-box Pfam Description: K-box region
  misc_feature (9)..(59): Pfam Name: SRF-TF Pfam Description: SRF-type transcription factor (DNA-binding a
  misc_feature: Ceres Annot ID no. 1438157
  misc_feature: Bit score of 647.4 for HMM based on sequences of Figure 3
  misc_feature: Functional Homolog Of SEQ ID NO. 403
  misc_feature: in Figure 3
MGRGRVELKRIENKINRQVTFAKRRNGLLKKAYELSVLCDAEVALIIFSNRGKLYEFCSSSSMLKTLERYQKCNYGAPEPNVSAREALELSSQQEYLKLKARYEALQRTQRNLLGEELGPLSSKELESLERQLDMSLKQIRSTRTQYMLDQLHDLQHKEHMLTAANKSLKERLMEGYQLNSLQLNPSAEDVEYARQQAQPQGDGFFHALECEPTLQIGYQPENITMVTAGPSMTTYMPGWLA

SEQ ID NO: 415 - protein, 251 aa, Arabidopsis thaliana
  misc_feature (75)..(177): Pfam Name: K-box Pfam Description: K-box region
  misc_feature (9)..(59): Pfam Name: SRF-TF Pfam Description: SRF-type transcription factor (DNA-binding a
  misc_feature: Public GI ID no. 22329771
  misc_feature: Bit score of 626.0 for HMM based on sequences of Figure 3
  misc_feature: Functional Homolog Of SEQ ID NO. 403
MGRGRVELKRIENKINRQVTFAKRRNGLLKKAYELSVLCDAEVALIIFSNRGKLYEFCSSSSMLRTLERYQKCNYGAPEPNVPSREALAVELSSQQEYLKLKERYDALQRTQRNLLGEDLGPLSTKELESLERQLDSSLKQIRALRTQFMLDQLNDLQSKERMLTETNKTLRLRLADGYQMPLQLNPNQEEVDHYGRHHHQQQQHSQAFFQPLECEPILQIGYQGQQDGMGAGPSVNNYMLGWLPYDTNSI

SEQ ID NO: 416 - DNA, 938 bp, Brassica napus
  misc_feature: Ceres Clone ID no. 873647
  misc_feature: Encodes the peptide sequence at SEQ ID NO. 417
ataaaagaaaatgggaagagggagagtggagttgaagaggatagagaacaagatcaataggcaagtgacgtttgcaaagagaaggaatggccttttgaagaaagcatacgagctttccgttctatgtgatgcagaggttgctctcatcatcttctctagtaraggaaaacagtacgagttttgcagtagttcgagcatgcttcggactctagacaggtaccaaaagtgcaactatggagctccagagcccaatgtgccttcaagagaggccttagcagttgaacttaatagccagcaggagtatctcaagcttaaggagcgttacgatgccttacagagaactcagaggaatctattgggagaagatcttggacctcttartacaaaagagcttgagtcacttgagagacagcttgattcttctttgaagcagatcagagctctccggacacagttcatgctagaccagctcaatgatcttcagagtaaggaacgcatgctggctgagacaaataaaactctaaggctaaggttggccgatggatatcagatgccactccaactcaacccgaacccagaagatcatcaccatgttgactacggtcgtcatcaacaacatgaacattytcatcaagctttyttccagcctttggaatgcgaacccattcttcaaatggggtatcaggggcagcaagatcatggaatgggagcaggaccaagtgtgaataattacatgttgggttggttaccttatgataccaactctatttgaaactttcttccttttttttcactttttgacattttttattttctaaaactctctcctccgctcttaggcttcattatgatatgctcctctctctatattctgtcttgtgtgcatgtgtgtgttatgtttattatgtcggtctacaatgaaataattttttcaatat

SEQ ID NO: 417 - protein, 253 aa, Brassica napus
  misc_feature (75)..(177): Pfam Name: K-box Pfam Description: K-box region
  misc_feature (9)..(59): Pfam Name: SRF-TF Pfam Description: SRF-type transcription factor (DNA-binding a
  misc_feature: Ceres Clone ID no. 873647
  misc_feature: Bit score of 592.7 for HMM based on sequences of Figure 3
  misc_feature: Functional Homolog Of SEQ ID NO. 403
  misc_feature (51)..(51): Xaa is any aa, unknown, or other
  misc_feature (124)..(124): Xaa is any aa, unknown, or other
  misc_feature (206)..(206): Xaa is any aa, unknown, or other
  misc_feature (210)..(210): Xaa is any aa, unknown, or other
MGRGRVELKRIENKINRQVTFAKRRNGLLKKAYELSVLCDAEVALIIFSSXGKQYEFCSSSSMLRTLDRYQKCNYGAPEPNVPSREALAVELNSQQEYLKLKERYDALQRTQRNLLGEDLGPLXTKELESLERQLDSSLKQIRALRTQFMLDQLNDLQSKERMLAETNKTLRLRLADGYQMPLQLNPNPEDHHHVDYGRHQQHEHXHQAXFQPLECEPILQMGYQGQQDHGMGAGPSVNNYMLGWLPYDTNSI

SEQ ID NO: 418 - DNA, 1181 bp, Gossypium hirsutum
  misc_feature: Ceres Clone ID no. 1793863
  misc_feature: Encodes the peptide sequence at SEQ ID NO. 419
tcaccaacaagaacaaaaaaaaaaaaaaacaggtgaaatcccttttccttttggtctcaaaacaattcaaaagggaaagattgttggttttagggtttgggttctcattgatttttagtgaaaaaattataaaaaaaaattatgggaagaggtagggttgaacttaagaggattgaaaacaagatcaacgggcaagtcacttttgcaaagagaagaaatggtcttttgaagaaagcttatgagctttctgttctttgtgatgctgaagttgctctcatcatcttctccaatagaggaaagttgtacgaattttgcagcagctcaagcatgatcaaaacattggagaggtaccaaaaatgcaactatggagctcctgagccaaatgtgtcatctagggaggctgctttggaattaagcagtcgacaggaatatttgaagcttaaagcacgttacgatgccttacaaaggtcccaaaggaatttactaggagaagatttgggacctttgagcagcaaggagctcgagtcacttgagaaacaacttgattcatcattgaagctaatcagatcaacacggacccaatacatgcttgatcagctcaatgatctccaaagaaaggaacatcttcttaatgaagccaataagaccctaaaacaaaggttggtggaagggtatcaagtaaattcgttacaattgaatccaaatgcaacggaagacgtcggctatggccgtcaacaggttcatcatcagcctcatggcgatgccttcttccatccactggactgtgagccaactttacaaatcggatatcagcatgatccaatgtcagtggtgactgcagggccaagtgtgaataattatatgacaggttggttaccatagcatatatatctctatatatctatataaaggagaagaaaccatgggtatggatttcttcataagaaacttattttatgttattgtatgaaacaaaagaaatatgtagtgccatggatttattattattattattattgtaactttgtgtttttaattaggatgcactataacaaactccatctgtgtgagctataaagtgcatctttctttgaacaagttaatttgttgttaagagactaatgttttgtttcgcttatttattacttataattaatcctttctttagatggaagaattac

SEQ ID NO: 419 - protein, 246 aa, Gossypium hirsutum
  misc_feature (75)..(176): Pfam Name: K-box Pfam Description: K-box region
  misc_feature (9)..(59): Pfam Name: SRF-TF Pfam Description: SRF-type transcription factor (DNA-binding a
  misc_feature: Ceres Clone ID no. 1793863
  misc_feature: Bit score of 654.7 for HMM based on sequences of Figure 3
  misc_feature: Functional Homolog Of SEQ ID NO. 403
MGRGRVELKRIENKINGQVTFAKRRNGLLKKAYELSVLCDAEVALIIFSNRGKLYEFCSSSSMIKTLERYQKCNYGAPEPNVSSREAALELSSRQEYLKLKARYDALQRSQRNLLGEDLGPLSSKELESLEKQLDSSLKLIRSTRTQYMLDQLNDLQRKEHLLNEANKTLKQRLVEGYQVNSLQLNPNATEDVGYGRQQVHHQPHGDAFFHPLDCEPTLQIGYQHDPMSVVTAGPSVNNYMTGWLP

SEQ ID NO: 420 - protein, 242 aa, Vitis vinifera
  misc_feature (75)..(175): Pfam Name: K-box Pfam Description: K-box region
  misc_feature (9)..(59): Pfam Name: SRF-TF Pfam Description: SRF-type transcription factor (DNA-binding a
  misc_feature: Public GI ID no. 20385588
  misc_feature: Bit score of 656.7 for HMM based on sequences of Figure 3
  misc_feature: Functional Homolog Of SEQ ID NO. 403
MGRGRVELKRIENKINRQVTFAKRRNGLLKKAYELSVLCDAEVALIIFSNRGKLYEFCSSSSMLKTLERYQKCNYGAPETNVSTREALELSSQQEYLKLKARYEALQLSQRNLLGEDLGPLSTKELESLERQLDVSLKQIRSTRTQYMLDQLTDLQRKEHMLNEANKTLKQRLLEGTQVNQLQWNPNAQDVGYGRQQAQPQGDGFFHPLECEPTLQIGYQPDPITVAAAGPSVNNYMPGWLP

SEQ ID NO: 421 - protein, 243 aa, Glycine max
  misc_feature (79)..(177): Pfam Name: K-box Pfam Description: K-box region
  misc_feature (9)..(59): Pfam Name: SRF-TF Pfam Description: SRF-type transcription factor (DNA-binding a
  misc_feature: Public GI ID no. 58330675
  misc_feature: Bit score of 597.5 for HMM based on sequences of Figure 3
  misc_feature: Functional Homolog Of SEQ ID NO. 403
MGRGRVELKRIENKINRQVTFAKRRNGLLKKAYELSVLCDAEVALIIFSNRGKQYEFCSGSSMLKTLERYQKCNYGAPEDNVATKEALVLELSSQQEYLRLKARYEALQRSQRNLMGEDLGPLSSKELESLERQLDSSLKQIRSIRTQFMLDQLSDLQRKEHFLGESNRDLRQRLEEFQINPLQLNPSAEDMGYGRHPGQPQGHALFQPLECEPTLQIGYHPDPVSVVTEGPSMNNYMAGWLP

SEQ ID NO: 422 - protein, 241 aa, Nicotiana sylvestris
  misc_feature (75)..(175): Pfam Name: K-box Pfam Description: K-box region
  misc_feature (9)..(59): Pfam Name: SRF-TF Pfam Description: SRF-type transcription factor (DNA-binding a
  misc_feature: Public GI ID no. 5070138
  misc_feature: Bit score of 638.5 for HMM based on sequences of Figure 3
  misc_feature: Functional Homolog Of SEQ ID NO. 403
MGRGRVELKRIENKINRQVTFAKRRNGLLKKAYELSVLCDAEVALIIFSNRGKLYEFCSSSSMLKTLERYQKCNYGAPETNISTREALEISSQQEYLKLKARYEALQRSQRNLLGEDLGPLNSKELESLERQLDMSLKQIRSTRTQLMLDQLTDLQRKEHALNEANRTLKQRLMEGSQLNLQWQQNAQDMGYGRQTTQTQGDGFFHPLECEPTLQIGYQNDPITVGGAGPSVNNYMAGWLP

SEQ ID NO: 423 - protein, 241 aa, Petunia x hybrida
  misc_feature (75)..(175): Pfam Name: K-box Pfam Description: K-box region
  misc_feature (9)..(59): Pfam Name: SRF-TF Pfam Description: SRF-type transcription factor (DNA-binding a
  misc_feature: Public GI ID no. 1345965
  misc_feature: Bit score of 635.0 for HMM based on sequences of Figure 3
  misc_feature: Functional Homolog Of SEQ ID NO. 403
MGRGRVELKRIENKINRQVTFAKRRNGLLKKAYELSVLCDAEVALIIFSNRGKLYEFCSSSSMLKTLERYQKCNYGAPETNISTREALEISSQQEYLKLKARYEALQRSQRNLLGEDLGPLNSKELESLERQLDMSLKQIRSTRTQLMLDQLQDLQRKEHALNEANRTLKQRLMEGSTLNLQWQQNAQDVGYGRQATQTQGDGFFHPLECEPTLQIGYQNDPITVGGAGPSVNNYMAGWLP

SEQ ID NO: 424 - protein, 242 aa, Populus tremuloides
  misc_feature (75)..(175): Pfam Name: K-box Pfam Description: K-box region
  misc_feature (9)..(59): Pfam Name: SRF-TF Pfam Description: SRF-type transcription factor (DNA-binding a
  misc_feature: Public GI ID no. 30314024
  misc_feature: Bit score of 632.4 for HMM based on sequences of Figure 3
  misc_feature: Functional Homolog Of SEQ ID NO. 403
MGRGRVQLKRIENKINRQVTFAKRRNGLLKKAYELSVLCEAEVALIIFSNRGKLYEFCSGSSMLKTLERYQKCNYGAPEPNVSAREALELSSQQEYLKLKARYEGLQRTQRNLLGEELGPLSSKDLESLERQLDMSLKQIRSTRTQYMLDQLNDLQHKEHMLTAANKSLKERLMEGYQLNSLQLNPSAEDVEYARQQAQPQGDGFFHALECEPTLQIGYQPENITMVTAGPSMTTYMPGWLA

SEQ ID NO: 425 - protein, 247 aa, Pisum sativum
  misc_feature (75)..(177): Pfam Name: K-box Pfam Description: K-box region
  misc_feature (9)..(59): Pfam Name: SRF-TF Pfam Description: SRF-type transcription factor (DNA-binding a
  misc_feature: Public GI ID no. 75278480
  misc_feature: Bit score of 581.4 for HMM based on sequences of Figure 3
  misc_feature: Functional Homolog Of SEQ ID NO. 403
MGRGRVELKRVENKINRQVTFAKRRNGLLKKAYELSVLCDAEVALIVFSNRGKLYEFCSTSSMLKTLERYQKCNYGAPEGNVTSKEALVLELSSQQEYLKLKARYESLQRSQRNLMGEDLGPLSSKDLETLERQLDSSLKQIRSTRTQFMLDQLGDLQRKEHLLCEANRALRQRMEGYQINSLQLNLSAEDMGYGRHHQGHTHGDELFQVQPIECEPTLQIGYHQGDPGSVVTAGPSMNNYMGGWLP

SEQ ID NO: 426 - protein, 243 aa, Populus tomentosa
  misc_feature (75)..(175): Pfam Name: K-box Pfam Description: K-box region
  misc_feature (9)..(59): Pfam Name: SRF-TF Pfam Description: SRF-type transcription factor (DNA-binding a
  misc_feature: Public GI ID no. 90903289
  misc_feature: Bit score of 626.4 for HMM based on sequences of Figure 3
  misc_feature: Functional Homolog Of SEQ ID NO. 403
MGRGRVQLKRIENKINRQVTFAKRRNGLLKKAYELSVLCEAEVALIIFSNRGKLYEFCSGSSMLKTLERYQKCNYGAPEPNVSAREALELSSQQEYLKLKARYEGLQRTQRNLLGEELGPLSSKDLESLERQLDMSLKQIRSTRTQYMLDQLNDLQHKEHMLTAANKSLKERLMEGYQLNSLQMNPSAEDVEYARQQAQPQPGDGFFHALECEPTLQIGYQPENITMVTAGPSMTTYMPGWLA

SEQ ID NO: 427 - protein, 242 aa, Antirrhinum majus
  misc_feature (75)..(175): Pfam Name: K-box Pfam Description: K-box region
  misc_feature (9)..(59): Pfam Name: SRF-TF Pfam Description: SRF-type transcription factor (DNA-binding a
  misc_feature: Public GI ID no. 1239959
  misc_feature: Bit score of 615.8 for HMM based on sequences of Figure 3
  misc_feature: Functional Homolog Of SEQ ID NO. 403
MGRGRVELKRIENKINRQVTFAKRRNGLLKKAYELSVLCDAEVALIIFSNRGKLYEFCSSTSMLNTLERYQKCNYGPPETNVSTREALELSSQQEYLKLKARYEALQRSQRNLLGEDLGPLNSKELESLERQLDMSLKQIRSTRTQAMLDTLTDLQRKEHALNEANRSLKHRLMDGSQISLQWNPNAEDHVGYGRQPSQPSADGFYHPLECEPTLHIGFQSDQITVAGAGPSVNNYISGWLP

SEQ ID NO: 428 - protein, 236 aa, Gossypium hirsutum
  misc_feature (75)..(176): Pfam Name: K-box Pfam Description: K-box region
  misc_feature (9)..(59): Pfam Name: SRF-TF Pfam Description: SRF-type transcription factor (DNA-binding a
  misc_feature: Public GI ID no. 23194451
  misc_feature: Bit score of 599.4 for HMM based on sequences of Figure 3
  misc_feature: Functional Homolog Of SEQ ID NO. 403
MGRGRVELKRIENKINRQVTFAKRRNGLLKKAYELSVLCDAEVALIIFSNRGKLYEFCSSSSMIKILERYQKCNYGAPEPNVSSREAALELSSRQEYLKLKARYDALQRSQRNLLGEDLGPLSSKELESLEKQLDSSLKLIRSTRTQYMLDQLNDLQRKEHLLNEANRTLKQRLVEGYQVNSLQLNPNATEDVGYGRQQVHHQPHGDAFFHPLDCEPTLQIGYQHDPMSVVTAGPV

SEQ ID NO: 429 - protein, 239 aa, Pyrus bretschneideri
  misc_feature (75)..(175): Pfam Name: K-box Pfam Description: K-box region
  misc_feature (9)..(59): Pfam Name: SRF-TF Pfam Description: SRF-type transcription factor (DNA-binding a
  misc_feature: Public GI ID no. 121309556
  misc_feature: Bit score of 619.6 for HMM based on sequences of Figure 3
  misc_feature: Functional Homolog Of SEQ ID NO. 403
MGRGRVELKRIENKINRQVTFAKRRNGLLKKAYELSVLCDAEVALIIFSNRGKLYEFCSSSSMLKTLERYQKCNYGAPETNVSTREALELSSQQEYLKLKARFEALQRNQRNLLGEDLGPLSSKDLESLERQLDMSLKQIRSTRTQCMLDQLTDLQRKEHMLNEANKTLKERLFEGYHALQLNANADEYGRQQAQAAQGDVFFHPLDCEPTLQIGYQNDPISVVTAGPSLSNYMGGWLP

SEQ ID NO: 430 - protein, 240 aa, Petunia integrifolia subsp. inflata
  misc_feature (75)..(175): Pfam Name: K-box Pfam Description: K-box region
  misc_feature (9)..(59): Pfam Name: SRF-TF Pfam Description: SRF-type transcription factor (DNA-binding a
  misc_feature: Public GI ID no. 194247734
  misc_feature: Bit score of 624.4 for HMM based on sequences of Figure 3
  misc_feature: Functional Homolog Of SEQ ID NO. 403
MGRGRVELKRIENKINRQVTFAKRRNGLLKKAYELSVLCDAEVALIIFSNRGKLYEFCSSSSMLKTLERYQKCNYGAPETNISTREALEISSQQEYLKLKARYEALQRSQRNLLGEDLGPLNSKELESLERQLDMSLKQIRSTRTQLMLDQLQDLQRKEHALNEANRTLKQRLMEGSTLNLQWQQNAQDVGYGRQATQTQGDGFFHPLECEPTLQIGYQNDPITVGGAGPSVNNYMAGWL

SEQ ID NO: 431 - protein, 245 aa, Citrus unshiu
  misc_feature (76)..(176): Pfam Name: K-box Pfam Description: K-box region
  misc_feature (10)..(60): Pfam Name: SRF-TF Pfam Description: SRF-type transcription factor (DNA-binding a
  misc_feature: Public GI ID no. 116078097
  misc_feature: Bit score of 614.7 for HMM based on sequences of Figure 3
  misc_feature: Functional Homolog Of SEQ ID NO. 403
MARGGRVELKRIENKINRQVTFAKRRNGLLKKAYELSVLCDAEVALIIFSNRGKLYEFCSSSSMLKTLERYQKCNYGAPEPNVSAREALELSSQQEYLKLKARYEALQRSQRNLLGEELGPLNSKELESLERQLDMSLKQIRSTRTQYMLDTLTELQHKEQLLSEANKTLKQRLMEGYQVNTLQLNPSAEDCGYGLKPAQPQGDTFFHALECEPTLQIGYQPADPISVVTAGPSLNNYMQGWLPC

SEQ ID NO: 432 - protein, 241 aa, Misopates orontium
  misc_feature (75)..(175): Pfam Name: K-box Pfam Description: K-box region
  misc_feature (9)..(59): Pfam Name: SRF-TF Pfam Description: SRF-type transcription factor (DNA-binding a
  misc_feature: Public GI ID no. 113207077
  misc_feature: Bit score of 618.4 for HMM based on sequences of Figure 3
  misc_feature: Functional Homolog Of SEQ ID NO. 403
MGRGRVELKRIENKINRQVTFAKRRNGLLKKAYELSVLCDAEVALIIFSNRGKLCEFCSSTSMLKTLERYQKCNYGPPETNVSTREALELSSQQEYLKLKARYEALQRSQRNLLGEDLGPLNSKELESLERQLDMSLKQIRSTRTQAMLDTLTDLQRKEHALNEANRSLKHRLMDGSQISLQWNPNAEDVGYGRQPSQPSADGFYHPLECEPTLHIGFQADPITVAGAGPSVNNYISGWLP

SEQ ID NO: 433 - protein, 249 aa, Taihangia rupestris
  misc_feature (76)..(176): Pfam Name: K-box Pfam Description: K-box region
  misc_feature (9)..(59): Pfam Name: SRF-TF Pfam Description: SRF-type transcription factor (DNA-binding a
  misc_feature: Public GI ID no. 87116791
  misc_feature: Bit score of 598.7 for HMM based on sequences of Figure 3
  misc_feature: Functional Homolog Of SEQ ID NO. 403
MGRGRVELKRIENKINRQVTFAKRRNGLLKKAYELSVLCDAEVALIIFSNRGKLYEFCSSSSSMLKTLERYQKCNYSTPETHVSTREALELSSQQEYLRLKARYEALQRNQRNLLGEDLGPLNSKELESLERQLDMSLKQIRSTRTQCMLDQLTDLQRKEQMLNEANRSLKQRLFEGYNVNQLHQFQLNANAEDVGYGRHQQAHQPHSDVFYHPLELEPTLQIGYHQSDPIQVVAAGPSVSNFMGGWLP

SEQ ID NO: 434 - protein, 243 aa, Antirrhinum majus
  misc_feature (76)..(176): Pfam Name: K-box Pfam Description: K-box region
  misc_feature (9)..(59): Pfam Name: SRF-TF Pfam Description: SRF-type transcription factor (DNA-binding a
  misc_feature: Public GI ID no. 1239963
  misc_feature: Bit score of 604.2 for HMM based on sequences of Figure 3
  misc_feature: Functional Homolog Of SEQ ID NO. 403
MGRGRVELKRIENKINRQVTFAKRRNGLLKKAYELSVLCDAEVALIIFSNRGKLYEFCSNSGTMLKTLERYQKCNYGAPEANVSTREALELSSQQEYLKLKARYEALQRSQRNLLGEDLGPLNSKELESLERQLDMSLKQIRSTRTQAMLDTLTDLQRKEHALNEANRSLKHRLMEGSQISLQWNPNAHDMGYGRQAAAQPQGDGFFHPLECEPTLQMGFQSEITVGAAGPSVNNYNMTGWLP

SEQ ID NO: 435 - protein, 243 aa, Arachis hypogaea
  misc_feature (75)..(175): Pfam Name: K-box Pfam Description: K-box region
  misc_feature (9)..(59): Pfam Name: SRF-TF Pfam Description: SRF-type transcription factor (DNA-binding a
  misc_feature: Public GI ID no. 114309696
  misc_feature: Bit score of 612.0 for HMM based on sequences of Figure 3
  misc_feature: Functional Homolog Of SEQ ID NO. 403
MGRGRVELKRIENKINRQVTFAKRRNGLLKKAYELSVLCDAEVALIIFSNRGKLYEFCSSSSMLKTLERCQKCNYGAPETNVSTREALELSSQQEYLKPKARYEALQRSQRNLMGEDLGPLSSKELESLERQLDSSLKLIRSTRTQFMLDQLSELQRKEHLLSEANRALRQRQLEGYQINPMQLNPGGVDDMGYARHPPQPQPDPLFQQLDCEPTLQIGYQPDPVSVVTAGPSMGNYMGGWLP

SEQ ID NO: 436 - protein, 249 aa, Taihangia rupestris
  misc_feature (76)..(176): Pfam Name: K-box Pfam Description: K-box region
  misc_feature (9)..(59): Pfam Name: SRF-TF Pfam Description: SRF-type transcription factor (DNA-binding a
  misc_feature: Public GI ID no. 87045092
  misc_feature: Bit score of 594.8 for HMM based on sequences of Figure 3
  misc_feature: Functional Homolog Of SEQ ID NO. 403
MGRGRVELKRIENKINRQVTFAKRRNGLLKKAYELSVLCDAEVALIIFSSRGKLYEFCSSSSSMLKTLERYQKCNYSTPETHVSTREALELSSQQEYLRLKARYEALQRNQRNLLGEDLGPLNSKELESLERQLDMSLKQIRSTRTQCMLDQLTDLQRKEQMLNEANRSLKQRLFEGYNVNQLHQFQLNANAEDVGYGRHQQAHQPHSDVFYHPLELEPTLQIGYHQSDPIQVVAAGPSVSNFMGGWLP

SEQ ID NO: 437 - protein, 249 aa, Chrysanthemum x morifolium
  misc_feature (75)..(175): Pfam Name: K-box Pfam Description: K-box region
  misc_feature (9)..(59): Pfam Name: SRF-TF Pfam Description: SRF-type transcription factor (DNA-binding a
  misc_feature: Public GI ID no. 27804361
  misc_feature: Bit score of 577.5 for HMM based on sequences of Figure 3
  misc_feature: Functional Homolog Of SEQ ID NO. 403
MGRGRVELKRIENKINRQVTFAKRRNGLLKKAYELSVLCDAEVALIIFSNRGKLYEFCSSSSMLKTLERYQKCNYGAPETNVSAREALELSSQQEYLKLKARYEALQRSQRNLLGEDLGPLNCKELESLERQLDTSLKQIRSARTQFMLDTLTDLQKKEHALNDANRTLKQRLMEGHQVTSLHWNPHVQQEMGYDQQHEPQHQNGEAFFHPLDCGPTLQMGYPSDSLTAEAAASVAGPSCSNYMPGWYQ

SEQ ID NO: 438 - protein, 251 aa, Betula pendula
  misc_feature (75)..(175): Pfam Name: K-box Pfam Description: K-box region
  misc_feature (9)..(59): Pfam Name: SRF-TF Pfam Description: SRF-type transcription factor (DNA-binding a
  misc_feature: Public GI ID no. 8745070
  misc_feature: Bit score of 583.6 for HMM based on sequences of Figure 3
  misc_feature: Functional Homolog Of SEQ ID NO. 403
MGRGRVELKRIENKINRQVTFAKRRNGLLKKAHELSVLCDAEVALIIFSNRGKLCEFCSSPSMLKTLERYQKCNFGAPEPNVSAREALELSSQQEYLKLKARYEALQRTQRNLMGEDLGPLSSKELELLERQLNMSLKQIRSIRTQCMLDQLTDLQRKEHMLNEANRTLKQRLVDGYHIDTVLQLDQSANDVGYGRQPAQTQDDCFFHPLCEPTLQIGYQHDHPMTVVTAGSGSVVTAGPSVNNYMSGWMP

SEQ ID NO: 439 - protein, 325 aa, Taihangia rupestris
  misc_feature (75)..(175): Pfam Name: K-box Pfam Description: K-box region
  misc_feature (9)..(59): Pfam Name: SRF-TF Pfam Description: SRF-type transcription factor (DNA-binding a
  misc_feature: Public GI ID no. 87045090
  misc_feature: Bit score of 582.8 for HMM based on sequences of Figure 3
  misc_feature: Functional Homolog Of SEQ ID NO. 403
MGRGRVELKRIENKINRQVTFAKRRNGLLKKAYELSVLCDAEVALIIFSNRGKLYEFCSSSSMLKTLERYQKCNYSTPETHVSTGEALELSSQQEYLRLKARYEALQRNQRNLLGEDLGPLNSKELESLERQLDMSLKQIRSTRTQCMLDQLTDLQRKEQMLNEANRSLKQRLFEGYNVNQLHQFQLNANAEDVGYGRHQQAHQPHSDVFYHPLELEPTLQIGYHQSDPIQVVAAGPSVSNFMGRMVAMILITRRRRRRRRENYHGCVGEPMDDDPWIHVMMDYISSSSCMFMLFDYVVLFDEFDKNNYLQFVIVGNYPIINSPH

SEQ ID NO: 440 - protein, 242 aa, Akebia trifoliata
  misc_feature (75)..(175): Pfam Name: K-box Pfam Description: K-box region
  misc_feature (9)..(59): Pfam Name: SRF-TF Pfam Description: SRF-type transcription factor (DNA-binding a
  misc_feature: Public GI ID no. 48727596
  misc_feature: Bit score of 578.5 for HMM based on sequences of Figure 3
  misc_feature: Functional Homolog Of SEQ ID NO. 403
MGRGRVGLRRIENKINRQVTFAKRRNGLLKKAYELSVLCDAEVALIIFSNRGKLYEFCSSSSMFKTLERYQKCNFGAPEPNVSTREALEHSSHQEYLKLKARVEGLQRSQRNLLGEDLGPLSGKELETLERQLDMSLKQIRSTRTQYMLDQLSDYQRREQMLSEANKALRRRLEEGSQPNPHQWDPNVQVVNFGRQQAPAQGEGFFQHIECEPTLHIGYQPDQITVAAAGPSMNNYMQGWIG

SEQ ID NO: 441 - protein, 244 aa, Trochodendron aralioides
  misc_feature (75)..(175): Pfam Name: K-box Pfam Description: K-box region
  misc_feature (9)..(59): Pfam Name: SRF-TF Pfam Description: SRF-type transcription factor (DNA-binding a
  misc_feature: Public GI ID no. 148540546
  misc_feature: Bit score of 580.5 for HMM based on sequences of Figure 3
  misc_feature: Functional Homolog Of SEQ ID NO. 403
MGRGRVELKRIENKINRQVTFAKRRNGLLKKAYELSVLCDAEVALIVFSTRGKLYEFCSSSSMFKTLERYQKCNYTAPETDISARETLEQSSYQEYLKLKARYEALQRSQRNLLGEDLGPLSGKELESLERQLDVSLKQIRSIRTQCMLDQLTDLQRTEQMLSESNKNLARRLEEGSQANAHQWDPNAHGMRYGQQPAHAHPQGDGFFHPLECEPTLQIGYQPDQIAVMAPGPSVNNYMPGWLA

SEQ ID NO: 442 - protein, 244 aa, Silene latifolia
  misc_feature (75)..(176): Pfam Name: K-box Pfam Description: K-box region
  misc_feature (9)..(59): Pfam Name: SRF-TF Pfam Description: SRF-type transcription factor (DNA-binding a
  misc_feature: Public GI ID no. 42491278
  misc_feature: Bit score of 556.0 for HMM based on sequences of Figure 3
  misc_feature: Functional Homolog Of SEQ ID NO. 403
MGRGRVELKRIENKINRQVTFAKRRNGLLKKAYELSVLCDAEVALIIFSNRGKLYEFCSSPSMLKTLERYQKSNYGPPDNTAVSSREALEISSHQEYIRLKARYEALQRTHRNLMGEDLGPLSSKELESLERQLDMSLKHIRSTRTQYMLDQLADLQRKEHVLNEANITLKQRLIEADQVSSAQCYGHELDYGRQNPQAQADHVFFHPLECEPTLQIGYQPEQMNVTAAGPSINNFMTGWLPQN

SEQ ID NO: 443 - protein, 242 aa, Persea americana
  misc_feature (75)..(173): Pfam Name: K-box Pfam Description: K-box region
  misc_feature (9)..(59): Pfam Name: SRF-TF Pfam Description: SRF-type transcription factor (DNA-binding a
  misc_feature: Public GI ID no. 60265532
  misc_feature: Bit score of 553.6 for HMM based on sequences of Figure 3
  misc_feature: Functional Homolog Of SEQ ID NO. 403
MGRGRVELKRIENKINRQVTFAKRRNGLLKKAYELSVLCDAEVALIIFSNRGKLYEFCSSSSMLKTLERYQKCNYGAPETTVSTRETQSSHQEYLKLKARVEALQRSQRNLLGEDLGPLTSKELDTLEKQLDASLKQIRSTRTQYMLDQLADLQRREQMLSEANKNLKRRLEEGMQANPQVWDPNGHPVTYGRQQAPPQSDGFFHPLDTCEPTLHIGYQPADQITIAAPGPSVNNYMPGWLA

SEQ ID NO: 444 - protein, 242 aa, Elaeis guineensis
  misc_feature (75)..(173): Pfam Name: K-box Pfam Description: K-box region
  misc_feature (9)..(59): Pfam Name: SRF-TF Pfam Description: SRF-type transcription factor (DNA-binding a
  misc_feature: Public GI ID no. 33309873
  misc_feature: Bit score of 545.2 for HMM based on sequences of Figure 3
  misc_feature: Functional Homolog Of SEQ ID NO. 403
MGRGRVELKRIENKINRQVTFAKRRNGLLKKAYELSVLCDAEVALIIFSNRGKLYEFCSSSSMMKTLERYQKCNYGAPETNIISRETQSSQQEYLKLKARAEALQRSQRNLLGEDLGPLSSKELEQLERQLDASLKQIRSTRTQYMLDQLADLQRKEQMLCEANKSLRRRLEESNQAGQQQVWDPTAHAVGYGRQPPQPQSDGFYQQIDSEPTLQIGYPPEQITIAAAPGPSVNTYMPGWLA

SEQ ID NO: 445 - protein, 239 aa, Asparagus officinalis
  misc_feature (75)..(176): Pfam Name: K-box Pfam Description: K-box region
  misc_feature (9)..(59): Pfam Name: SRF-TF Pfam Description: SRF-type transcription factor (DNA-binding a
  misc_feature: Public GI ID no. 34979580
  misc_feature: Bit score of 531.1 for HMM based on sequences of Figure 3
  misc_feature: Functional Homolog Of SEQ ID NO. 403
MGRGRVELKRIENKINRQVTFAKRRNGLLKKAYELSVLCDAEVALIIFSNRGKLYEFCSSSSMLKTLERYQKCSYGAPDTSVQIRESQMLQSSHQEYLRLKARVEALQRSQRNLLGEDLGPLSSKELEQLERQLDSSLKQIRSTRTQYMLDQLADLQRREQMLCEANRSLRKRLEESSQANQQQVWEDANAMGYNRQPNQPHGDQFFHPLECQPTLQIGFQPDQMPGPSVSNYMPGWLA

SEQ ID NO: 446 - protein, 237 aa, Persea americana
  misc_feature (75)..(173): Pfam Name: K-box Pfam Description: K-box region
  misc_feature (9)..(59): Pfam Name: SRF-TF Pfam Description: SRF-type transcription factor (DNA-binding a
  misc_feature: Public GI ID no. 60265530
  misc_feature: Bit score of 525.0 for HMM based on sequences of Figure 3
  misc_feature: Functional Homolog Of SEQ ID NO. 403
MGRGRVELKRIENKINRQVTFAKRRNGLLKKAYELSVLCDAEVALIVFSTRGKLYEFCSTASMLKTLERYQKCNYGAPETTVSSRELQSSHQEYMKLKARVEALQRSQRNLLGEDLGPLTGKELDTLEKQLDVSLKHIRSTRTQYMLDQLGDLQRREHMLSEANKSLRRRLEEGMQENPNHAWDPNGYVRQQAPPQSDGFFHPIECEPTLQIGYQSSQITIAAPGPNVNNYMPGWLA

SEQ ID NO: 447 - protein, 239 aa, Asparagus virgatus
  misc_feature (75)..(176): Pfam Name: K-box Pfam Description: K-box region
  misc_feature (9)..(59): Pfam Name: SRF-TF Pfam Description: SRF-type transcription factor (DNA-binding a
  misc_feature: Public GI ID no. 85376980
  misc_feature: Bit score of 529.3 for HMM based on sequences of Figure 3
  misc_feature: Functional Homolog Of SEQ ID NO. 403
MGRGRVELKRIENKINRQVTFAKRRNGLLKKAYELSVLCDAEVALIIFSNRGKLYEFCSSSSMLKTLERYQKCSYGAPDTSVQIRESQMLQSSHQEYLRLKARVEALQRSQRNLLGEDLGPLSSKELEQLERQLDSSLKQIRSTRTQYMLDQLADLQRREQMLCEANRSLRKRLEESSQANQQQVWEDANAMGYNRQPNQPQGDQFFHPLECQPTLQIGFQPDQMPGPSVSNYMPGWLA

SEQ ID NO: 448 - protein, 242 aa, Liriodendron tulipifera
  misc_feature (75)..(173): Pfam Name: K-box Pfam Description: K-box region
  misc_feature (9)..(59): Pfam Name: SRF-TF Pfam Description: SRF-type transcription factor (DNA-binding a
  misc_feature: Public GI ID no. 60265524
  misc_feature: Bit score of 551.8 for HMM based on sequences of Figure 3
  misc_feature: Functional Homolog Of SEQ ID NO. 403
MGRGRVELKRIENKINRQVTFAKRRNGLLKKAYELSVLCDAEVALIIFSNRGKLYEFCSTSSMFKTLERYQKCNYGAPEAAVTTREIQSSHQEYLKLKARVEALQRSQRNLLGEDLGPLNGKELDTLERQLDVSLKQIRSTRTQYMLDQLTDLQRREQMLSEANKALKRRLDEGMQANPHQGWNHNPHAMEYVRQQGPPQGDGFFHPLDCEPTLQIGYQTDQITMSTAPGPSLNNYMPGWLA

SEQ ID NO: 449 - protein, 242 aa, Elaeis guineensis
  misc_feature (75)..(173): Pfam Name: K-box Pfam Description: K-box region
  misc_feature (9)..(59): Pfam Name: SRF-TF Pfam Description: SRF-type transcription factor (DNA-binding a
  misc_feature: Public GI ID no. 117582132
  misc_feature: Bit score of 537.4 for HMM based on sequences of Figure 3
  misc_feature: Functional Homolog Of SEQ ID NO. 403
MVRGKVELKRIENKINRQVTFAKRRNGLLKKAYELSVLCDAEVALIIFSNRGKLYEFCSSSSMMKTLERYQKCNYGAPETNIISRETQSSQQEYLKLKARAEALQRSQRNLLGEDLGPLSSKELEQLERQLDASLKQIRSTRTQYMLDQLADLQRKEQMLCEANKSLRRRLEESNQAGQQQVWDPTAHAVGYGRQPPQPQSDGFYQQIDSEPTLQIGYPPEQITIAAAPGPSVNTYMPGWLA

SEQ ID NO: 450 - protein, 238 aa, Crocus sativus
  misc_feature (75)..(176): Pfam Name: K-box Pfam Description: K-box region
  misc_feature (9)..(59): Pfam Name: SRF-TF Pfam Description: SRF-type transcription factor (DNA-binding a
  misc_feature: Public GI ID no. 172034210
  misc_feature: Bit score of 511.8 for HMM based on sequences of Figure 3
  misc_feature: Functional Homolog Of SEQ ID NO. 403
MGRGRVELKRIENKINRQVTFAKRRNGLLKKAYELSVLCDAEVALIVFSNRGKLYEFCSSSSIMKTLERYQKCSYGAPDNIVQIRETQLLQSSHQEYLKLKAHVEALQRSQRNLLGEDLGPLSSKELEQLERQLDSSLKQIRSTRTQCMLDQLGDLQRKEHMLCEANRSLRKRLEESSQAHQQVWESNANAIAYARQANQQEEEFYQPLDCQPTLQIGFQADQMAGPSVTNYMPGWLQ

SEQ ID NO: 451 - protein, 244 aa, Impatiens hawkeri
  misc_feature (75)..(175): Pfam Name: K-box Pfam Description: K-box region
  misc_feature (9)..(59): Pfam Name: SRF-TF Pfam Description: SRF-type transcription factor (DNA-binding a
  misc_feature: Public GI ID no. 99109356
  misc_feature: Bit score of 517.9 for HMM based on sequences of Figure 3
  misc_feature: Functional Homolog Of SEQ ID NO. 403
  misc_feature (198)..(198): Xaa is any aa, unknown, or other
MGRGRVELKRIENKINRQVTFAKRRNGLLKKAYELSVLCDAEVALIIFSNRGKLYEFCSSPSMLKTLERYQKCNYGAPEANISSRGALELSGQQEYLKLKQRYETLQRTQRNLLGEDLGPLDGKELDTIERQLDTSLKHIRSTRTQHMVDQLEDLQRKEQILNEANRALKQRLLESSFNWMQNGQHVDYSGPAVQPNXDELFHPLECEPTLQMAMGYQTHHDPTSVEAAGAGPSMNNYFPGWLS

SEQ ID NO: 452 - protein, 241 aa, Eschscholzia californica
  misc_feature (75)..(175): Pfam Name: K-box Pfam Description: K-box region
  misc_feature (9)..(59): Pfam Name: SRF-TF Pfam Description: SRF-type transcription factor (DNA-binding a
  misc_feature: Public GI ID no. 60265520
  misc_feature: Bit score of 525.8 for HMM based on sequences of Figure 3
  misc_feature: Functional Homolog Of SEQ ID NO. 403
MGRGRVELKRIENKINRQVTFAKRRNGLLKKAYELSVLCDAEVALIIFSNRGKLYEFCSSSSMFKTLERYQKSNYGAPETNVSVRESQEHSSHQEYLKLKARVEALQRSQRNLLGEDLGPLSGKELESLERQLDMSLKQIRSTRTQYMLDQLTDLQRREQMLSDANKTLRRRLEEGTVTCHQWEQNMQYGQQQAHAQGEGFFHPIECEPTLQMGYQQDQITVAAAAGPSMTMNSYMPGPGW

SEQ ID NO: 453 - protein, 239 aa, Crocus sativus
  misc_feature (75)..(176): Pfam Name: K-box Pfam Description: K-box region
  misc_feature (9)..(59): Pfam Name: SRF-TF Pfam Description: SRF-type transcription factor (DNA-binding a
  misc_feature: Public GI ID no. 172034212
  misc_feature: Bit score of 510 for HMM based on sequences of Figure 3
  misc_feature: Functional Homolog Of SEQ ID NO. 403
MGRGRVELKRIENKINRQVTFAKRRNGLLKKAYELSVLCDAEVALIVFSNRGKLYEFCSSSSILKTLERYQKCSYGAPDNNVQIRETQLLQSSHQEYLKLKARVEALQRSQRNLLGEDLGPLSSKELEQLERQLDSSLKQIRSTRTQCMLDQLGDLQRKEHMLCEANRSLRKTLEESNQANHQQVWESNANAIAYDRQANQQREEFYQPLDCQPTLHIGFQGDQMAGPSVTTYMPGWLQ

SEQ ID NO: 454 - protein, 243 aa, Dendrobium crumenatum
  misc_feature (75)..(173): Pfam Name: K-box Pfam Description: K-box region
  misc_feature (9)..(59): Pfam Name: SRF-TF Pfam Description: SRF-type transcription factor (DNA-binding a
  misc_feature: Public GI ID no. 74053671
  misc_feature: Bit score of 526.6 for HMM based on sequences of Figure 3
  misc_feature: Functional Homolog Of SEQ ID NO. 403
MGRGRVELKRIENKINRQVTFAKRRNGLLKKAYELSILCDAEVALIIFSNRGKLYEFCSSSSMLKTLERYQKCNYEGPETNIISRETQSSQQEYLKLKARVEALQRSQRNLLGEDLGPLSSKELEHLERQLDASLKQIRSTRTQFMLDQLADLQRREQMLCEANKALKRRFEESNQTAHQQVWDPSTTHAVGYGRQPAQHHGDAFYHPLECEPTLQIGYHSDITMAPTTAPNVSNYMPPGWLV

SEQ ID NO: 455 - DNA, 861 bp, Gossypium hirsutum
  misc_feature: Ceres Clone ID no. 100031683
  misc_feature: Encodes the peptide sequence at SEQ ID NO. 456
gtttgttggggggggcgggggggttaattctgattacttgatggatgaagttgttagcgaaagcgtatcatccatgacagaataaatagagagaaaagcaagaagaagaacaaaagtgttaaagagagagtgtttgggggtattgcaaagataatatttttattggggaaaaaaagaatggggagaggtagggttgagttgaagagaattgagaacaagattaacaggcaagtaacttttgctaagagaaggaatgggcttttgaagaaagcctatgagctttccgttctttgtgatgcagaggttgctctcatcatcttctccaataggggaaaactgtacgagttttgcagtagttcaagcatgatgaaaacattggagaggtaccagaagtgcagccatggagcaccagagacaaatgtttcaactagggaggctctggagctaagcagccagcaggaatatctgaagcttaaagcacgttatgaagccttacaaaggtcccaaaggaatttacttggagaagatctggggcctttgagcagcaaagagcttgagtcacttgagaggcagcttgattcttcattaaagctgataagatcaacgcggacccaatacatgcttgatcagctcactgatctgcaacgaaaggaacatctacttaatgaagctaataagagtctaaaacaaaggttgatggaaggctaccaagtacattcactccagctgaatccaaatgccgatgacgtcggctacggccgacaaccaacccatcagcctcacggtgatgtcttcttcatccattggactgcgagccaacgttacaaatcggatatcagcccgatacgatatcgcggtcac

SEQ ID NO: 456 - protein, 228 aa, Gossypium hirsutum
  misc_feature (75)..(175): Pfam Name: K-box Pfam Description: K-box region
  misc_feature (9)..(59): Pfam Name: SRF-TF Pfam Description: SRF-type transcription factor (DNA-binding a
  misc_feature: Ceres Clone ID no. 100031683
  misc_feature: Bit score of 511.6 for HMM based on sequences of Figure 3
  misc_feature: Functional Homolog Of SEQ ID NO. 403
MGRGRVELKRIENKINRQVTFAKRRNGLLKKAYELSVLCDAEVALIIFSNRGKLYEFCSSSSMMKTLERYQKCSHGAPETNVSTREALELSSQQEYLKLKARYEALQRSQRNLLGEDLGPLSSKELESLERQLDSSLKLIRSTRTQYMLDQLTDLQRKEHLLNEANKSLKQRLMEGYQVHSLQLNPNADDVGYGRQPTHQPHGDVFFIHWTASQRYKSDISPIRYRGH

SEQ ID NO: 457 - protein, 242 aa, Elaeis guineensis
  misc_feature (75)..(173): Pfam Name: K-box Pfam Description: K-box region
  misc_feature (9)..(59): Pfam Name: SRF-TF Pfam Description: SRF-type transcription factor (DNA-binding a
  misc_feature: Public GI ID no. 33309876
  misc_feature: Bit score of 530.5 for HMM based on sequences of Figure 3
  misc_feature: Functional Homolog Of SEQ ID NO. 403
MGRGRVELKRIENKINRQVTFAKRRNGLLKKAYELSVLCDAEVALIIFSNRGKLYEFCSSSSMMKTLERYQKCNYGAPETNIISRETQSSQQEYLKLKARVEALQRSQRNLLGEDLGPLSSKELEQLERQLDASLKQIRSTRTQYMLDQLADLQRREQMLCEANKSLRRRLEESNQAGQQQVWDPTAHAVGYGRQPPQPQSDGFYQQIDGEPTLQIRYPPEQITIAAAPGSSVSTYMPGWLA

SEQ ID NO: 458 - DNA, 2056 bp, Panicum virgatum
  misc_feature: Ceres Clone ID no. 1726076
  misc_feature: Encodes the peptide sequence at SEQ ID NO. 459
gcaagcaaatgccgcgaagaggaggacgcgtgtagtagccgtcgcatactcgcatgtgaagcaggggccttgcccaattctcaagtagctgaaggagaaagaagaggccaggttgggcgatcgaggcggccggtcaggggatgggcaccgactcgccgtcgccgtcgacggcgccggtggccggcctcggggccaagggcgcggcgagggcggtggcgcagcaccaccaggccgtggtcgggttcctcctcggcttcttcctcgtcctgctgctctacaccaccgtttcctcccagttcggttcgcagaacgccattggtgtcctacagtctacgtcgacgtcgccggccgtgcgtacgggtcaaaacgccatgactccaacgtcgccatcgccgaagccgaacgacgtgaaaaaaggagatcatatcaaggaagacaataaagagcaacaaagcaatacacctaacaagatggaggaggatcgtacccaacatggtatcaatggaatcgaaaaggaaaatcaaactgaagccaaattggatgatgagaaagtgaaaaatccagagggaggtcaagcagcagtgaacgatgcaagaagtgacaggatggaggaggaagatcttatccggcaagaaatcgatcaaggcagcatgatcaagaatgataccaacatcggacaagttacgccacgcaagccaatctgcgacctctccgatcccagatacgacatctgcgagatctccggcgacgctcgcgccctgggagccaaccgcaccgtcctctacctcccgccggccggcgagcgcggcgcggacagccaggagtggagcatccgggaccagtcacgcaagtacctcgagttcgtgggcaacgtcaccgtcaggtcgctgaacgcctcccaggctgcggcggcgccggcgtgcacctcccggcacgccgtcccggccgtggtgttcgccatgaacgggctcacgtccaacccctggcacgacttcagcgacgtgctcatccccctcttcctcaccacgcgcgcgctggacggcgaggtccagttcctcgtctccgacctccagccgtggttcgtggacaagtaccggctcatcctccgcaacctctcccgccacgacgtcgtcgacttcaaccgggacggcggcgtccggtgctacccgcgcgtcaccgtcggcctccgcagccaccgcgacctcggcatcgaccccgcgcgcgcgccgcggaactacaccttgctcgacttccagctctacgtccgcgagatctacgggctgccgccgccgggcatcgacgtcccgtacaaggagcagcagcagcggaccatgccacggctgatgctgataaaccgtggccggacgaggaagttcgtcaacttcccggagatcgtcgcggcggcgcgggacgccgggttcgaggtggtgcccgtggagccgcgccgggacctcggcgtggaggagctcgcccgggcggtggactcgtgcgacgtgctcatgggcgcgcacggcgccgggctgaccaacttcttcttcctccggagcaacgcggtgatgctgcaggtggtgccgtgggggcacatggaacactcgtgcatggtgttctacggcgggccggcgagggagatgcggctgcgggacgtcgagtacagcatcgccgccgtggagagcacgctctacgataagtacggcgaggatagcccggtgatcagcgacccggagtcgatacacagacaagggtggcagtttgggatgaggtattactggatcgagcaggacatcaggctcaacgtcacaaggtttgctcccaccctgcaccaggtgctccagatgctcaaggaatagcaataggaggggggaattaaaagaaatatatggacagttagattattattacattacatccatgcttaattagaggggagatgtataggatgaagctttttacatttgttgtgatgatcatcattcgtcttctttctagattaatctgatggccaccaaaacctcccaatatgtgtgaacagattaccaaataaagaagattgtttccc

SEQ ID NO: 459 - protein, 491 aa, Panicum virgatum
  misc_feature (109)..(357): Pfam Name: DUF563 Pfam Description: Protein of unknown function (DUF563)
  misc_feature: Ceres Clone ID no. 1726076
  misc_feature: Bit score of 1331.1 for HMM based on sequences of Figure 13
  misc_feature: Functional Homolog Of SEQ ID NO. 459
  misc_feature: in Figure 13
MTPTSPSPKPNDVKKGDHIKEDNKEQQSNTPNKMEEDRTQHGINGIEKENQTEAKLDDEKVKNPEGGQAAVNDARSDRMEEEDLIRQEIDQGSMIKNDTNIGQVTPRKPICDLSDPRYDICEISGDARALGANRTVLYLPPAGERGADSQEWSIRDQSRKYLEFVGNVTVRSLNASQAAAAPACTSRHAVPAVVFAMNGLTSNPWHDFSDVLIPLFLTTRALDGEVQFLVSDLQPWFVDKYRLILRNLSRHDVVDFNRDGGVRCYPRVTVGLRSHRDLGIDPARAPRNYTLLDFQLYVREIYGLPPPGIDVPYKEQQQRTMPRLMLINRGRTRKFVNFPEIVAAARDAGFEVVPVEPRRDLGVEELARAVDSCDVLMGAHGAGLTNFFFLRSNAVMLQVVPWGHMEHSCMVFYGGPAREMRLRDVEYSIAAVESTLYDKYGEDSPVISDPESIHRQGWQFGMRYYWIEQDIRLNVTRFAPTLHQVLQMLKE

SEQ ID NO: 460 - DNA, 1941 bp, Zea mays
  misc_feature: Ceres Clone ID no. 219838
  misc_feature: Encodes the peptide sequence at SEQ ID NO. 461
acaaagaccacgcgcatagctaataccaccgtcgtcgcataagctaggccaggcctctgatccatcggccgatcaaagataaggagaccagcgaaggatgggtgccgactcgccgccgtcgtcgtcgttgtcaacggcgccggtggccggcgttggcgcgaagaacacggtgaaacagtaccaccggatcgtggtcggattcctcctcggcttcttcctcgtcctcgtgctctacaccactctttcttcccagttcggttcacgaactgccattggtgtcctgcagtctttgtctgccgtgcgtactgatcaggccaccggggctgccccaccattgccgtcgtcgaatacgccgagtaatttggcacaagaggaagatggcgggcacaaaaatgataaacctaacaagacggaggaggaacatatccaagacgatgctcatcgaatcgggaagaacaatcaatctgaagccaaattagatgtcaagaataatgggcaaaatgaagagcagacaggccaaccagcagcgaacgatgcaagtgataggatggaggaagagcttatccggcaagaaatcgatcaaggcagcaaaaagaacgataccatcatggagcctgcagctacggcgccacgcaagcctatatgcgacctttccgaccccaggtacgacatctgcgagatctccggcgacgcacgaacgatgggagccaaccgcaccgttctgtacgtaccaccggtcggcgagctcggctcggacggccaggaatggagcatccgtgaccagtctcgcaagcacctcgagttcgtgaacaaggtcaccgtcaagtcgctgaacgcctcccagtcgctgacggcgccagagtgcacctcccggcacgccgtccgcgcgctggtgttcgcgatgaacgggctgacgtccaacccgtggcacgacttcagcgacgtgctcatcccgctcttcatcaccacgcgtgccttggagggcgaggtgcagttcctcgtctccgatctccagccgtggttcgtggacaagtacaggctcgtcctcaagaacctctcccgctacaacatcatcgacttcaaccaggacggcggcgtccggtgctacccgcacgtcaccgtcggcctccgcagccaccgcgacctgggcatcgaccctgcgcgcaccgcgcggaactacaccatgctcgacttccgcctctacatccgcgagatctaccgcctgccgcccgcaggcgtcagcatcccatacaaggaggcgaacagcaacgctgcggcagctgcgcccggcgccccagctgagcagctgcagcggaagccacggctgatgcttatcaaccgtggccgcacgaggaagttcgtcaacttcccggagatcgtcggagcggtccagaacgctgggttcgaggtcatcccgatcgagccgcgtagagacctcagcgtggaggacttcgcccggaccgtcgactcgtgcgacgtgctcatgggcgcgcacggggccggcctcaccaacttcttcttcctccgtaccaacgcggtgatgctgcaggtggtgccgtgggggcacatggagcacccttccatggcgttctacggcgggccggccaaggagatgaggctgcgagatgtcgagtacagcatagcggacgtggagagcacgctctacgacaagtacggcaaggacaacccggtggttagcgacccagagtccatacacaagcaagggtggcagcttgggatgaggtattactggatagagcaggacatcaggctcaacgtcacaaggtttgctcccacgctgcagaaggtgcttcagatgatcagggaatagaggaaaatgagatcaatggatcatatgttacattacatttattattcatgcttagagatgaataggattaatcttgtttttttacatttggtatattggcctatacatgg

SEQ ID NO: 461 - protein, 577 aa, Zea mays
  misc_feature (181)..(443): Pfam Name: DUF563 Pfam Description: Protein of unknown function (DUF563)
  misc_feature: Ceres Clone ID no. 219838
  misc_feature: Bit score of 1520.5 for HMM based on sequences of Figure 13
  misc_feature: Functional Homolog Of SEQ ID NO. 459
  misc_feature: in Figure 13
MGADSPPSSSLSTAPVAGVGAKNTVKQYHRIVVGFLLGFFLVLVLYTTLSSQFGSRTAIGVLQSLSAVRTDQATGAAPPLPSSNTPSNLAQEEDGGHKNDKPNKTEEEHIQDDAHRIGKNNQSEAKLDVKNNGQNEEQTGQPAANDASDRMEEELIRQEIDQGSKKNDTIMEPAATAPRKPICDLSDPRYDICEISGDARTMGANRTVLYVPPVGELGSDGQEWSIRDQSRKHLEFVNKVTVKSLNASQSLTAPECTSRHAVRALVFAMNGLTSNPWHDFSDVLIPLFITTRALEGEVQFLVSDLQPWFVDKYRLVLKNLSRYNIIDFNQDGGVRCYPHVTVGLRSHRDLGIDPARTARNYTMLDFRLYIREIYRLPPAGVSIPYKEANSNAAAAAPGAPAEQLQRKPRLMLINRGRTRKFVNFPEIVGAVQNAGFEVIPIEPRRDLSVEDFARTVDSCDVLMGAHGAGLTNFFFLRTNAVMLQVVPWGHMEHPSMAFYGGPAKEMRLRDVEYSIADVESTLYDKYGKDNPVVSDPESIHKQGWQLGMRYYWIEQDIRLNVTRFAPTLQKVLQMIRE

SEQ ID NO: 462 - protein, 534 aa, Oryza sativa subsp. japonica
  misc_feature (153)..(400): Pfam Name: DUF563 Pfam Description: Protein of unknown function (DUF563)
  misc_feature: Public GI ID no. 115468072
  misc_feature: Bit score of 1472.1 for HMM based on sequences of Figure 13
  misc_feature: Functional Homolog Of SEQ ID NO. 459
  misc_feature: in Figure 13
MVSQSKTPAPEPSTTKMPSAPPAVKGVAKTLAQHHKAVIGFLLGFFLVLLLYTFLSGQLVSSEDAIVRAVTQQSTPAVHTDQDGRTTSPTSPTSTSSNTTQDNLEGKNTERSSQPAVNDEASDKMEEDLIRQDIDQAGTKNGTNHKPGAPRKPICDLLDPRYDICEISGDARTMGTNRTILYVPPVGERGLADDSHEWSIRDQSRKYLEYINKVTVRSLDAQAAPGCTSRHAVPAVVFAMNGLTSNPWHDFSDVLIPLFITTRVYEGEVQFLVSDLQPWFVDKYRLILTNLSRYDIVDFNQDSDVRCYPKITVGLRSHRDLGIDPARTQRNYTMLDFRLYIREVYSLPPAGVDIPFKESSMQRRPRAMLINRGRTRKFVNFQEIAAAVVAAGFEVVPVEPRRDLSIEEFSRVVDSCDVLMGAHGAGLTNFFFLRTNAVMLQVVPWGHMEHPSMVFYGGPAREMRLRDVEYSIAAEESTLYDKYGKDHPAIRDPESIHKQGWQFGMKYYWIEQDIKLNVTRFAPTLQQVLQMLRG

SEQ ID NO: 463 - DNA, 2114 bp, Triticum aestivum
  misc_feature: Ceres Clone ID no. 819125
  misc_feature: Encodes the peptide sequence at SEQ ID NO. 464
gtagatttagaatgtagttggaccagagggagagaagagatcaagagacggaaggagaagcgaccgtaagccggtcagggcggcgaccggatggctgccaactcgttctctgcaccggcgcaggcggtgaagggcgtggcgaaaacgttggctcaccgccgccaggccgtggttgggttcctgtttgctctcatcgtcatcctcgtgctccacaccaccgtggtgtttggcccgtcccggtccacgaatgacattgtcgttctgcagtccacatcgggcgagcaaaatgccaggatctcttctcctccagcgttcttggcacctaataattctattcaagataactgggagaaggacgacgcagccaataatgatggggaaagaagggaccagttaggccaaacagtaaaaaatgatactaatgacaagatgcaggaagagctcattcgtcaagaactcgatggagacgtcatacatggtgctccggggaagcccatctgcgacctctctgacccgaggtacgacatctgcgacatcaccggagacgcccgtgccatcggcgccaaccgtaccgtcctctatgtcccgccagccgacgagcgcggcaccgacggcccggagtgggccatcaaggaccagtcccgcaagaacctcggggacatcgtcgaggtgaatgtcaagaccctgagtgccgcgcagtccctggtggcgccggagtgcacctcacggcacgctgtccctgccgtcgttttcgccatgaatgggatcataggcaacccatggcacgacttgagcgatgtcctgatcccgctcttcatcaccacccgcgcctacgacggcgaggtccagttccttgtcaccgagctccagccgtggttcatggacaagtatcgtctcatcctcaccaacctgtcacgctatgatattgtcgacttcaacaaggacgccggcgtccgttgctacccgcacatcatagtcggcctccgcagccatggtgacctcgacatcgacccaacccgcacgccgcacaactacacattgctagattttcgcctctacatccgggaggtcttctcgcttccgccggagagccgaggaatcccgtacaaggaggccagtaagaagaacgcagccaacgacaacggcactgtcacggagaaaccaaagccgcggctcttgctcatcaatcgcggcgagagcaggaagttcgtcaaccttccggaggtctctgcggcagtgcaggcagccgggttcgagctgctggtcatggagccgagccgtgacatgaggctcgaggagttcgcccgggcggtggactcgtgcgacgtgctgatgggtgtgcacggggccgcgctcacaaacttcttcttcctacgcaccaacgcggtgctgctgcaggtggtggggttgggcctggagcgcgaggccttgcattactacggcaatcaggccaaggcggtgatggtgcaacacatccagtacttcatcagcgccgaggagagcacgctctatgaaaagtacggcaaggaccacccggcggtaagtgacccggactcggtacacaagcagggttggcagggtgcaaagcgctacttctgggcggagcaggacatcagactgaatgtcaccagatttactcccacgctgcatcagctgcttcgcacactccgggaataggggaacttgatacgtgatactagtacctctgttcctaaatgtaatgcaagatatcttggcagtttgaatttaagctgccaaaacgttttacggtgtaggttacaagaagcacaccatgggagcagagagcttgcttctttcttgttgtttcagtcgtcagatcaatagacaagaattaagcacaagcgaggtcacaactaatgcacggcgtccaaatcgatcaaccggaaaacaagacttgagcacgtgcatgacatcggcatgacctccttaactactcttatattttttttccttttttgagaatgacaaatgagtcaaatttgagctgcaagtgcatgaaatgttttgcaaaatttggtgaattatttttatttgtggtctttattctatgtttaggccttatctaagaaaaggaaatgaagttcaaacatctt

SEQ ID NO: 464 - protein, 528 aa, Triticum aestivum
  misc_feature (135)..(395): Pfam Name: DUF563 Pfam Description: Protein of unknown function (DUF563)
  misc_feature: Ceres Clone ID no. 819125
  misc_feature: Bit score of 1383.4 for HMM based on sequences of Figure 13
  misc_feature: Functional Homolog Of SEQ ID NO. 459
  misc_feature: in Figure 13
MAANSFSAPAQAVKGVAKTLAHRRQAVVGFLFALIVILVLHTTVVFGPSRSTNDIVVLQSTSGEQNARISSPPAFLAPNNSIQDNWEKDDAANNDGERRDQLGQTVKNDTNDKMQEELIRQELDGDVIHGAPGKPICDLSDPRYDICDITGDARAIGANRTVLYVPPADERGTDGPEWAIKDQSRKNLGDIVEVNVKTLSAAQSLVAPECTSRHAVPAVVFAMNGIIGNPWHDLSDVLIPLFITTRAYDGEVQFLVTELQPWFMDKYRLILTNLSRYDIVDFNKDAGVRCYPHIIVGLRSHGDLDIDPTRTPHNYTLLDFRLYIREVFSLPPESRGIPYKEASKKNAANDNGTVTEKPKPRLLLINRGESRKFVNLPEVSAAVQAAGFELLVMEPSRDMRLEEFARAVDSCDVLMGVHGAALTNFFFLRTNAVLLQVVGLGLEREALHYYGNQAKAVMVQHIQYFISAEESTLYEKYGKDHPAVSDPDSVHKQGWQGAKRYFWAEQDIRLNVTRFTPTLHQLLRTLRE

SEQ ID NO: 465 - DNA, 1566 bp, Sorghum bicolor
  misc_feature: Ceres Annot ID no. 8678791
  misc_feature: Encodes the peptide sequence at SEQ ID NO. 466
atggggtcgcccaaggcggccaagagcatggtgaagcagcgcatctggcgtcaccggctcgtcgcaccgttcgctgccgttcttgtcacggccgtcctcgccgtcgtcgtattctccggcctgttcgcgcaggatccaaacgccaccccggagttcactgctgtaaatgtgggcaacacccggccagtgcgcgataagtcggagttcacagcagccagtggatctcccaacaaggaggatcttgcaacatcggcatctgatcaagaattggatgatggaaattctgagcccaatcaagcttcccaaggcaccgtgcctgcaacaggggagggagggacagcaacggcagtgccgacccaaagagaaagaagcactggaggatctggtttagttcagtacacaacatgcacacctcgaactagaacaaccatctgtgatctctccaaccaacgcttcgacatctgtgagctttgtggtaatgctcgcaccattggccgctcctccactgtaatgtatgtcccacagtcccttacttccaatggagaagagtggaatattccagcacagtcacggaaaagccttccatggatcaagaaggtgactgtcaaaaccctgaaggcttcccaacaggtgccaagatgcacatccaggcatgccataccagccattgtctttgcattgggcgggtttacagcgaatgtctggcatgatgtcagtgatgttcttgtccctctgtttcttactgcccagcagtttgaccgagatgtccaattacttatcaccaataatcagccctggttcatcaagaaatactcagcaatctttcatcgcctcacaagacacaacattattgattttgatgcagacgatgaggtcaggtgctatccacatgtcattgttgggctgaggagccaccgggatcttggtattgatccaaactctacaccgcagaactacacaatgatggatttccgtttgtttgtccgtgaagcctatggattacctgcgcctgaagtggatataccatacagggttgacaaagatgaccctgaaaagaagcccaggataatgctcattgaccgaggcaagacacgaaggttcatgaatatgcctgatgttttacgagggcttgattggtttggtttcgaggtggtcagggcagatccaaggattgattctactcttgatgaatttgtccgcctagttgattcatgtgatgcaatgatgggtgttcacggtgcgggcttgactaacatggtgttcctgaggtcaggtgcagtggtggtgcacattgtaccctatggggttgagttcatggctaatggattctacggtgcacctgcaagggacatgggcctcagacacgtgcagtacagcatcagtccagatgagagcacactactggagaagtatggcgagaaccatatggtgattaaagatccagaagccataaggaacagtggatgggagaaggttggggagttgtatatgaccaaacaggacgttgtgctcaatatgacgaggtttgggcctagtttgttgaaggcaatagagttcattgtgtag

SEQ ID NO: 466 - protein, 521 aa, Sorghum bicolor
  misc_feature (143)..(389): Pfam Name: DUF563 Pfam Description: Protein of unknown function (DUF563)
  misc_feature: Ceres Annot ID no. 8678791
  misc_feature: Bit score of 1322.6 for HMM based on sequences of Figure 13
  misc_feature: Functional Homolog Of SEQ ID NO. 459
  misc_feature: in Figure 13
MGSPKAAKSMVKQRIWRHRLVAPFAAVLVTAVLAVVVFSGLFAQDPNATPEFTAVNVGNTRPVRDKSEFTAASGSPNKEDLATSASDQELDDGNSEPNQASQGTVPATGEGGTATAVPTQRERSTGGSGLVQYTTCTPRTRTTICDLSNQRFDICELCGNARTIGRSSTVMYVPQSLTSNGEEWNIPAQSRKSLPWIKKVTVKTLKASQQVPRCTSRHAIPAIVFALGGFTANVWHDVSDVLVPLFLTAQQFDRDVQLLITNNQPWFIKKYSAIFHRLTRHNIIDFDADDEVRCYPHVIVGLRSHRDLGIDPNSTPQNYTMMDFRLFVREAYGLPAPEVDIPYRVDKDDPEKKPRIMLIDRGKTRRFMNMPDVLRGLDWFGFEVVRADPRIDSTLDEFVRLVDSCDAMMGVHGAGLTNMVFLRSGAVVVHIVPYGVEFMANGFYGAPARDMGLRHVQYSISPDESTLLEKYGENHMVIKDPEAIRNSGWEKVGELYMTKQDVVLNMTRFGPSLLKAIEFIV

SEQ ID NO: 467 - protein, 505 aa, Hordeum vulgare
  misc_feature (117)..(370): Pfam Name: DUF563 Pfam Description: Protein of unknown function (DUF563)
  misc_feature: Public GI ID no. 55792425
  misc_feature: Bit score of 1251.8 for HMM based on sequences of Figure 13
  misc_feature: Functional Homolog Of SEQ ID NO. 459
  misc_feature: in Figure 13
MVKGWAQRYLNLGFVAGFLLVLLTYIVVSQQFAITSPEAVNTMTTPHRKQAIQAPAAGEAGLTQEAQGEETPEAKPQDQQQPDAEPEWKQPKDTVAKEEETPKRDDTAAKPIDNGKVVCTTEGPFSDTCDVFGDVRTNGTAHTVTLVPATETESQEWKIQPYARRGMSGISEFTVMQLDSTSAASPAPACTVTHRVPAIVFALGGLTGNYFHDFSDALVPLFVASRRYGGEVQLLASNIQPWWLGKYEAVVRKLSKYDVVDLDHDDQIRCFPNVTVGLRMHKEFDITPELVPGGVPLSMVDFTAFLRETYSLPRAAPISLMKDISPPEDQEKRKPRLMLLHRGHYRKLVNVPEIVKAAEKAGFEVAIADPRFDVRVEELARSVNSFDVLLGVHGAGLTNAVFLPTAAVVIQVVPYGNLERMAKVDFGDPVADMGLRYLEYSITAEESTLLEMLGPDHPVIKDPESVHRSGWDKVAEYYLGKQDVRVDVDRFAPTLALAIEHLRQK

SEQ ID NO: 468 - protein, 567 aa, Zea mays
  misc_feature (171)..(433): Pfam Name: DUF563 Pfam Description: Protein of unknown function (DUF563)
  misc_feature: Public GI ID no. 194702014
  misc_feature: Bit score of 1475.3 for HMM based on sequences of Figure 13
  misc_feature: Functional Homolog Of SEQ ID NO. 459
MGADSPPSSSSTAPVAGVGAKNTVKQYHRIVVGFLLGFFVVLVLYTTLSSQFGSRTAIGVLQSLSAVRTDQATGAAPPLPSSNTPSNLAQEEDGGHKNDKPNKTEEEHIQDDAHRIGKNNQSEAKLEKTGQPAANDASDRMEEELIRQEIDQGSNKNDTIMEPAATAPRKPICDLSDPRYDICEISGDARTMGANRTVLYVPPVGELGSDGQEWSIRDQSRKHLEFVNKVTVKSLNASQSLAAPECTSRHAVRALVFAMNGLTSNPWHDFSDVLIPLFITTRALEGEVQFLVSDLQPWFVDKYRLVLKNLSRYDIIDFNQDGGVRCYPHVTVGLRSHRDLGIDPARAPRNYTMLDFRLYIREIYRLPSAGVSIPYKEANSNAAAAAPGAPAEQLQRKPRLMLINRGRTRKFVNFPEIVGAVQKAGFEVIPIEPRRDLSVEDFARTVDSCDVLMGAHGAGLTNFFFLRTNAVMLQVVPWGHMEHPSMAFYGGPAKEMRLRDVEYSIADVESTLYDKYGKDNPVVSDPESIHKQGWQLGMRYYWIEQDIRLNVTRFAPTLQKVLQMIRE

SEQ ID NO: 469 - protein, 410 aa, Oryza sativa subsp. indica
  misc_feature (29)..(276): Pfam Name: DUF563 Pfam Description: Protein of unknown function (DUF563)
  misc_feature: Public GI ID no. 125563028
  misc_feature: Bit score of 1084.7 for HMM based on sequences of Figure 13
  misc_feature: Functional Homolog Of SEQ ID NO. 459
MEEDLIRQDIDQAGTKNGTNHKPGAPRKPICDLLDPRYDICEISGDARTMGTNRTILYVPPVGERGLADDSHEWSIRDQSRKYLEYINKVTVRSLDAQAAPGCTSRHAVPAVVFAMNGLTSNPWHDFSDVLIPLFITTRVYEGEVQFLVSDLQPWFVDKYRLILTNLSRYDIVDFNQDSGVRCYPKITVGLRSHRDLGIDPARTPRNYTMLDFRLYIREVYSLPPAGVDIPFKESSMQRRPRAMLINRGRTRKFVNFQEIAAAVVAAGFEVVPVEPRRDLSIEEFSRVVDSCDVLMGAHGAGLTNFFFLRTNAVMLQVVPWGHMEHPSMVFYGGPAREMRLRDVEYSIAAEESTLYDKYGKDHPAIRDPESIHKQGWQFGMKYYWIEQDIKLNVTRFAPTLQQVLQMLRG

SEQ ID NO: 470 - protein, 554 aa, Oryza sativa subsp. japonica
  misc_feature (176)..(422): Pfam Name: DUF563 Pfam Description: Protein of unknown function (DUF563)
  misc_feature: Public GI ID no. 115445865
  misc_feature: Bit score of 984.5 for HMM based on sequences of Figure 13
  misc_feature: Functional Homolog Of SEQ ID NO. 459
MGSPKMAKSAMKQGIWRRRIGAPFAAVLVAAVLAVVVFSGQFAKGPNASSQFAPVQVDNTLRPTRDKPVSADQDLERTVSSKLEGEDTEQIRLEDGQSPNKEAAIEEQKPSQAAAIDQDDNTLNPGLKQASGDERSAGGSDSLSKESPPQSQEGDGGTAESGAEPYIKCTAQSDIKICDLSNPRFDICELCGDARTIGQSSTVVYVPQNRASNGEEWIIRAQSRKHLPWIKKVTIKSVNSSEPEPICTSKHHIPAIVFALGGLTANVWHDFSDVLVPLFLTARQFNRDVQLIITNNQPWFIKKYSAIFSRLTRHEIIDFDSDGQIRCYPHVIVGLRSHRDLGIDPSSSPQNYTMVDFRLFVREAYGLPAAEVDIPYKADKDDPDKKPRIMLIDRGKSRRFVNVAHVVQGLDWFGFEVVKADPKIDSNLDEFVRLVDSCDAIMGVHGAGLTNMVFLRSGGVVVHIVPYGIKFMADGFYGAPARDMGLRHVEYSISPEESTLLEKYGWNHTVINDPETIRKGGWEKVAEFYMSKQDIVLNMTRFGPSLLNAIEFIM

SEQ ID NO: 471 - DNA, 1781 bp, Panicum virgatum
  misc_feature: Ceres Clone ID no. 1784280
  misc_feature: Encodes the peptide sequence at SEQ ID NO. 472
gccaggaaggaaaaataatggcggcatggggtcgcccaaggccgccaagagcatggtgaagcagcgcatctgccgccgccggctcggcgcgctgctcgctgccaccctcgtcgcggccgtcctcgctgtcgtcgtcttctccgacctgttcgcgcaggatccaaacgcctcctcgcagttcgacaccctccggccagtgcgcgatgcgtcggaacctacagacaccggaggatctcccaacaaggaggaccttgcaacatcgacatctgatcaagaactcgatgctggaaattctgagcccaatcaagaagaaaccacgcctgcggagagcgacggagggacagcaacgtcagtgccggaccaaggagaaaaaagcacaggaggatctggtttagttcagtacacaaaatgcacacctggaactggaacaactatctgtgatctttccaaccagcgctacgatatctgcaagctttgtggtgatgctcgcatcatcggccactcctccactgtaatgtatgtgccacagtccctcacttccaatggtgaagagtggagcattccggcacagtcccggaaaagccttccatggatcaagaaggtgactgtcaaatccctaaatgcttctcaactggagccaagttgcacatccaggcatgccataccggccattgtctttgcattaggtgggtttacagggaacatttggcatgacgtcagtgatgttctcctccctctgtttcttactgcccaccagtttgatcgagatgtccaattacttatcaccaacaatcagccctggttcatcaagaagtactcagcaatctttcatcgcatcacaaagcacaaaattattgattttgatacagacaaccaggtcaggtgctatccacatgtcattgttggactcaggagccaccgggactttggtattgatcctaacgctgcgccacataattacacaatgatggattttcgtttgtttgtccgggaatcctttggattgcctgcacccgaagtggatataccatacagggctgacaaagatgaccctgagaggaagcctcggataatgctcatcgaccgggtcaagactcggaggttcatgaatgctcctgatgttttgcaagggctcgattggtttggtttcgaggtggttaaggcagacccgaggattgagtccaatcttgatgaatttgtgcacttggtcgactcatgtgatgcaatcatgggtgctcacggcgcaggcttgaccaacatggtgttcctgcagtcaggtgcagtgttggtgcacattgtaccgtatgggattgagttcatggctgatggattctacggcgcacctgcaaggaacatgggcctcagacacgtgcagtacagcatcagtccggacgagagcacgctcctggagaagtatggctggaaccatacggtaatcaaagatccagaagccatcaggaacagcggatgggagaaggttggggagttgtatatgtccacgcaggacattgtgctcaacatgacaaggtttgggcctagcttgttgaaggcgatagagttcattatgtaggtggatgagacgaggtttctgttagctacggaaattcaccagttttcactgaagaaaggatcacattcacactttgttttatttctagggcttattgttttgtttttatagggtttattctgcttgtgatgctcctgtatagaattgaaaatgtaattcgattgatagtgctgtggatgttaaagaaaagatgataataagtccattatgt

SEQ ID NO: 472 - protein, 514 aa, Panicum virgatum
  misc_feature (136)..(382): Pfam Name: DUF563 Pfam Description: Protein of unknown function (DUF563)
  misc_feature: Ceres Clone ID no. 1784280
  misc_feature: Bit score of 1078.3 for HMM based on sequences of Figure 13
  misc_feature: Functional Homolog Of SEQ ID NO. 459
MGSPKAAKSMVKQRICRRRLGALLAATLVAAVLAVVVFSDLFAQDPNASSQFDTLRPVRDASEPTDTGGSPNKEDLATSTSDQELDAGNSEPNQEETTPAESDGGTATSVPDQGEKSTGGSGLVQYTKCTPGTGTTICDLSNQRYDICKLCGDARIIGHSSTVMYVPQSLTSNGEEWSIPAQSRKSLPWIKKVTVKSLNASQLEPSCTSRHAIPAIVFALGGFTGNIWHDVSDVLLPLFLTAHQFDRDVQLLITNNQPWFIKKYSAIFHRITKHKIIDFDTDNQVRCYPHVIVGLRSHRDFGIDPNAAPHNYTMMDFRLFVRESFGLPAPEVDIPYRADKDDPERKPRIMLIDRVKTRRFMNAPDVLQGLDWFGFEVVKADPRIESNLDEFVHLVDSCDAIMGAHGAGLTNMVFLQSGAVLVHIVPYGIEFMADGFYGAPARNMGLRHVQYSISPDESTLLEKYGWNHTVIKDPEAIRNSGWEKVGELYMSTQDIVLNMTRFGPSLLKAIEFIM

SEQ ID NO: 473 - DNA, 1374 bp, Sorghum bicolor
  misc_feature: Ceres Annot ID no. 8681869
  misc_feature: Encodes the peptide sequence at SEQ ID NO. 474
atgaagaagaccctaaacaagttatggccggcgctcgcggagagcaaactcgccgtcgcgctgctcgccggcctctttgtcgcggcggtgatctttctctccgtgccgacgcagttcgcagtccggggcacaaacggtgaagaaattgcaccggcgacagcgacggcgacggcgacctctgttgcgcctgtgcatcctcctctggagccgatctgcgacctctccgaccggcgctacgacggctgcgagatgtggggcgacgcgcgcacggcgagtggcgccgacaagtcggtggtctacttcatcccgccgccgcagcagctcgctaccgcggcggcggccacctggagcatccgctctcagtcccgcaagatcgtcggcgtccgtgaggtgatcgtccggtccctggacgcgtccagcctccacgaggcgcccggctgcacggtgcgccgggacgtgccggccgtggtgttcgcgctcggcggcctcacgtccaactactggcacgccttcagcgacgtgctggtgccgctcttcacgacggcgcgggccttcgggggcgacgtcgacctcctcgccaccggcgccggtggccaggcctggttcctcggcaagtacgaccgcgtcctccgcgcgctctcgcggtacgacgtggtcgacctcgacgccgacggtgacgtcgtgcggtgctaccaccacgtcgtcgtcggcctccgcggccaccgcgacttcgacatcgacgcggcgcgcgccccgaacgggtacgacatgctcgccttccgcgagttcgtccgtgccgcctactccctgccgccgccgcccgccgcagcgctaccgtgcaaatctggcggcggcggaacgaggccgcggctcatgctcgtcctccggggacgcacgcggcggttcgtgaacgagggcgcgatcgtggacgcgatcgagcgcgcgggcttcgaggtggcgcgcatggatgagacggcgtcctggggaagcgtgggcgcggtggcgcgcgaggtggacgcgtgcgacgtgctcgtgggcgcgcacggcgccgggctgaccaacatggtgttcctgcgcgcgggcgccgtggtggtgcaggtgatcccgtgggggaagatggagccctacggggaagggttcttcggcgccccggcggcgcacatggggctccggcacgtcgcctacagcatcgccgccgaggagagcacgctgtacgagaggtacggcaaggaccacccggtgatggccgaccccgacgtgttctacaggaacggcagcaacgccaagttctactggtgggagcagagcatccggctcaacaccaccaggttcgcgccgacgctgcagatggtgaagcggatgctgcgagagtga

SEQ ID NO: 474 - protein, 457 aa, Sorghum bicolor
  misc_feature (70)..(324): Pfam Name: DUF563 Pfam Description: Protein of unknown function (DUF563)
  misc_feature: Ceres Annot ID no. 8681869
  misc_feature: Bit score of 524 for HMM based on sequences of Figure 13
  misc_feature: Functional Homolog Of SEQ ID NO. 459
MKKTLNKLWPALAESKLAVALLAGLFVAAVIFLSVPTQFAVRGTNGEEIAPATATATATSVAPVHPPLEPICDLSDRRYDGCEMWGDARTASGADKSVVYFIPPPQQLATAAAATWSIRSQSRKIVGVREVIVRSLDASSLHEAPGCTVRRDVPAVVFALGGLTSNYWHAFSDVLVPLFTTARAFGGDVDLLATGAGGQAWFLGKYDRVLRALSRYDVVDLDADGDVVRCYHHVVVGLRGHRDFDIDAARAPNGYDMLAFREFVRAAYSLPPPPAAALPCKSGGGGTRPRLMLVLRGRTRRFVNEGAIVDAIERAGFEVARMDETASWGSVGAVAREVDACDVLVGAHGAGLTNMVFLRAGAVVVQVIPWGKMEPYGEGFFGAPAAHMGLRHVAYSIAAEESTLYERYGKDHPVMADPDVFYRNGSNAKFYWWEQSIRLNTTRFAPTLQMVKRMLRE

SEQ ID NO: 475 - protein, 505 aa, Hordeum vulgare
  misc_feature (117)..(370): Pfam Name: DUF563 Pfam Description: Protein of unknown function (DUF563)
  misc_feature: Public GI ID no. 31296712
  misc_feature: Bit score of 1241.9 for HMM based on sequences of Figure 13
  misc_feature: Functional Homolog Of SEQ ID NO. 459
MVKGWAQRYLNLGFVAGFLLVLLTYIVVSQQFAITSPEGVNTMTTPHRKQAIQAPAAGEAGLTQEAQGEETPEAKPQDQQQPGAEPEWKQPKDTVAKEEETPKRDDTAAKPIGNGKVVCTTEGPFSDTCDVFGDVRTNGTAHTVTLVPATETESQEWKIQPYARRGMSGISEFTVMQLDSTSAASPAPACTVTHRVPAIVFALGGLTGNYFHDFSDALVPLFVASRRYGGEVQLLASNIQPWWLGKYEAVVRKLSKYDVVDLDHDDQIRCFPSVTVGLRMHKEFDITPELVPGGVPLSMVDFTAFLRETYSLPRAGPISLMKDISPPEDQEKRKPRLMLLHRGHYRKLVNVPEIVKAAEKAGFEVAIADPRFDVRVEELARSVNSFDVLLGVHGAGLTNAVFLPTAAVVIQVVPYGNLERMAKVDFGDPVADMGLRYLEYSITAEESTLLEMLGPDHPVIKDPESVHRSGWDKVAEYYLGKQDVRVDVDRFAPTLALAIEHLRQK

SEQ ID NO: 476 - DNA, 1620 bp, Sorghum bicolor
  misc_feature: Ceres Annot ID no. 8659077
  misc_feature: Encodes the peptide sequence at SEQ ID NO. 477
atgggcggcgatccggggaaagtcatcaagaacatgaagggcgcggcgcagaagtacctcggcgttggcttcctcctcggcttcttcctcgtgctcctcacctacttcaccgtctccgagcagttcgccatcacggcgcccaacgctgttcggagggcatcaccggggcacgcgcacacctcggcgtcaccgatcaccccggccgttgaagagaagaggcagcaggaggcccctgtcatagaggagaagccacccaaggcagagcttgcaccagaggagaagcctccaaatgcagagcaggaggaggcccaagagaatcccccacgcgttgaggttgaagagccccacgctgaaacagagatggaccagcagaagcctgtctcagatgacgatgatggtaggaggagcagtagtatcgtcggcggcgatgacagtgctccggcgaagaagccggcgtgcgacatccagggtccatgggcgtccgacgtgtgcgacatcgacggcgacgtgcggatccacggctccgcgggcaccgtcctgatcgctccgtccatcgagagcggcggccgcaacccgaacacgcaggagtggcgcatccgcccttactcccggaagcaccagcccgggatcaaggaggtgacggtgcgcgagctggcgtcggccggcgacgcgccgccgtgcgacgtccgttcccccgtgccggcgctggtgctggccatgggcgggctgtcgggcaactactggcacgacttcagcgacatcctgatcccgctctacctccaggcggcgcggttcgacggcgaggtgcagctcgtcgtggagaacatccagccgtggtacgtcggcaagtaccggaccatcctgcgtcgcctgtcgcggcacgacgtcgtggacatggacaaggacgaccgcgtgcggtgcttcccgggcgccgtggtgggcatccggatgcacaaggagttcagcatcgacccggagcgggagccccggggccactccatgccggagttcaccgcgttcctccgggagaccttctcgctcccgcgcgccgcgccgacgaggctgacggccgccggcggcgaggacgaggaggacgagcgggtgaagccgcggatgatgatcatctcgcggcggcacccgcggaagctggtgaacgtggacgacgtggtggccctggcgcggcgcgtcgggttcgaggtggtgatcggtgacccgcccttcaacgtcgacgtcggggagttcgccagggaggtgaacgccgtggacgtgctggtgggcgtgcacggcgccgggctgaccaactcgctgttcctcccgacgggcgccgtgttcatccagatcaacccgtacggaaagatggagcacatcggggaggtggacttcggcatccccgccgtggacatggggctcaagtacatggcctactccgccggcgtggaggagagcacgctggtggacacgctgggccgggaccaccccgccgtcagggacccggagtccatccaccggagcgggtgggggaaggtggccgagttctacctcggcaagcaggacatccggctggacctccagcggttcgagcctgtgctccgcaaggccatgcagctcctcagggagtag

SEQ ID NO: 477 - protein, 539 aa, Sorghum bicolor
  misc_feature (151)..(405): Pfam Name: DUF563 Pfam Description: Protein of unknown function (DUF563)
  misc_feature: Ceres Annot ID no. 8659077
  misc_feature: Bit score of 678.5 for HMM based on sequences of Figure 13
  misc_feature: Functional Homolog Of SEQ ID NO. 459
MGGDPGKVIKNMKGAAQKYLGVGFLLGFFLVLLTYFTVSEQFAITAPNAVRRASPGHAHTSASPITPAVEEKRQQEAPVIEEKPPKAELAPEEKPPNAEQEEAQENPPRVEVEEPHAETEMDQQKPVSDDDDGRRSSSIVGGDDSAPAKKPACDIQGPWASDVCDIDGDVRIHGSAGTVLIAPSIESGGRNPNTQEWRIRPYSRKHQPGIKEVTVRELASAGDAPPCDVRSPVPALVLAMGGLSGNYWHDFSDILIPLYLQAARFDGEVQLVVENIQPWYVGKYRTILRRLSRHDVVDMDKDDRVRCFPGAVVGIRMHKEFSIDPEREPRGHSMPEFTAFLRETFSLPRAAPTRLTAAGGEDEEDERVKPRMMIISRRHPRKLVNVDDVVALARRVGFEVVIGDPPFNVDVGEFAREVNAVDVLVGVHGAGLTNSLFLPTGAVFIQINPYGKMEHIGEVDFGIPAVDMGLKYMAYSAGVEESTLVDTLGRDHPAVRDPESIHRSGWGKVAEFYLGKQDIRLDLQRFEPVLRKAMQLLRE

SEQ ID NO: 478 - DNA, 1542 bp, Sorghum bicolor
  misc_feature: Ceres Annot ID no. 8659066
  misc_feature: Encodes the peptide sequence at SEQ ID NO. 479
atgggcggcgaggtgaagcccggggggaggggtctcaagagctgggcgcagcgccacctcaacgtcggcttcgccgtcggcttcctcctcgtgctgctcacctacctcgtcgtctccaggcagctcgccgtcaccgcgcccggcgctgtcaccacgaaagcgccgaggctggcggataaacaggtgatcgtcggaaccgccggagatgatgcagagggcgggagcaaaaggcagcaggaatggcagccaaaagaggcggcggcggaggaggaggaggaggagtccggtgccgtcccaacggagtcgtcccccaaaacagacgaggccgacgtcaaaccgtccggtgcagcagagacgacgacgtcgagcaaggccgtgtgcaacacggacggcccggtctcggagacctgcgagctagacggcgacgtccggaccaacggcagcgctcgatcggtgaccttcgtgccagcgagcccgtcgtcgtcggagcgccgggagtggaaggtccggccgtactcgcgccggaccatgtccggcgtcgacagggtcaccgtgacgcagctggagtccccggcggcggcgtcgccaccgcccgcggcgtgcgcggtgacccacgacgtgccgggcgtgctgttcgcgctcggcgggctgacgggcaactactggcacgacttcagcgacgtgctggtgccgctgttcgccgcgtcgcggcggtacaagggcgaggtcctgttcctggtcagcaacatccagccgtggtggctgggcaagtacgaggccgtcgtgcgcgcgctgtccaggtacgacgccgtcgacctggaccgggacgcgcgggtgcgctgcttccgccacctcaccgtggggctccgcctgcacaaggagctcaccatcgtgccggaccttgcgccggaccgcctgaccatggccgacttcacggcgttcctgcgcgagacgtacgcgctgccgcgcggcgcgccggcgatcccgacgacggaggaggggaggaagccgcggctgctgctgatccaccgcgcgcactaccggcggttcgtgaacgtgccggagatcaggcgcgcggcggagtcggcggggttcgaggtgaccgtggcgagcccgcgcggcgacgcgcccgtggaggagacggcgcggacggtgaactcgcacgacgtgctgctgggcgtgcacggcgccgggctgacgaacgcggtcttcctccccgccggcggcgtggtgatccaggtggttccctacgggcggctggagcgcatggcgcggacggacttcggcgagcccgtggcggacatgggcctccggtacctggagtacggcgtggcggcggaggagagcacgctgctggagatgctggggccggagcacccggtgatcaaggacccggaggccatccaccgcagcgggtgggacaaggtcgccgagtactacctcgggaagcaggacgtgcgcatcgacgtcaaccgcttcgcgcccacgcttgcgcaggccatggaccacctgcggcaccggcaccggcaccggcagcagtga

SEQ ID NO: 479 - protein, 513 aa, Sorghum bicolor
  misc_feature (125)..(372): Pfam Name: DUF563 Pfam Description: Protein of unknown function (DUF563)
  misc_feature: Ceres Annot ID no. 8659066
  misc_feature: Bit score of 779.6 for HMM based on sequences of Figure 13
  misc_feature: Functional Homolog Of SEQ ID NO. 459
MGGEVKPGGRGLKSWAQRHLNVGFAVGFLLVLLTYLVVSRQLAVTAPGAVTTKAPRLADKQVIVGTAGDDAEGGSKRQQEWQPKEAAAEEEEEESGAVPTESSPKTDEADVKPSGAAETTTSSKAVCNTDGPVSETCELDGDVRTNGSARSVTFVPASPSSSERREWKVRPYSRRTMSGVDRVTVTQLESPAAASPPPAACAVTHDVPGVLFALGGLTGNYWHDFSDVLVPLFAASRRYKGEVLFLVSNIQPWWLGKYEAVVRALSRYDAVDLDRDARVRCFRHLTVGLRLHKELTIVPDLAPDRLTMADFTAFLRETYALPRGAPAIPTTEEGRKPRLLLIHRAHYRRFVNVPEIRRAAESAGFEVTVASPRGDAPVEETARTVNSHDVLLGVHGAGLTNAVFLPAGGVVIQVVPYGRLERMARTDFGEPVADMGLRYLEYGVAAEESTLLEMLGPEHPVIKDPEAIHRSGWDKVAEYYLGKQDVRIDVNRFAPTLAQAMDHLRHRHRHRQQ

SEQ ID NO: 480 - protein, 531 aa, Zea mays
  misc_feature (146)..(397): Pfam Name: DUF563 Pfam Description: Protein of unknown function (DUF563)
  misc_feature: Public GI ID no. 194690360
  misc_feature: Bit score of 674.3 for HMM based on sequences of Figure 13
  misc_feature: Functional Homolog Of SEQ ID NO. 459
MGGDPGKVIRNVKGAAQKYLGVGFLLGFFLVLLTYFTVSEQFAITAPNAVRRTSPGHAHTTRSPITSAVEEKRQQPPAIEEKPPKPEVAPEEKPPKEEKPPRVDVEGPHAETDEDQKKPVPDDDGRSSGISGGDGVATESAPAKKPACDIQGPWASDVCDIDGDVRIHGSAGTVLIAPSIESGGNPNPQEWRVRPYSRKHQGGIKEVTVRELASSADAPACDVRSPVPAMVLAMGGLTGNYWHDFSDIMIPLYLQAARFEGEVQLVVENIQPWYVGKYRAILRRLSRHDIVDMDRDDRVRCFPGAVVGIRMHKEFSIDPAREPLGHSMPEFTAFLRETYSLPRAAPARLAGADGEEDERARPRMMVISRRHPRKLVNLDAVVALARRVGFEVVIGDPPFNVDVGEFAKEVNAVDVLVGVHGAGLTNSLFLPTGAVFIQINPYGKMEHIGEVDFGIPAVDMGLKYIAYSAGVEETTLVDTLGRDHPAVKDPESIHRSGWGKVAEYYLGKQDVRLDLQRFEPVLRKAMQLLRE

SEQ ID NO: 481 - DNA, 1917 bp, Zea mays
  misc_feature: Ceres Clone ID no. 375289
  misc_feature: Encodes the peptide sequence at SEQ ID NO. 482
gcacacctccctttacccttccttctctcccatgcaagcaaggaatcgagggagggagggaggaagcaaaaggggaaaagctcgtgcaagacaagccgccctgccctgggaccattcccacccacatcgatcgtcagccagagagaggttcgttagttccagaaggacactggacagttggagacagcgagcgagcgagcgagcgagcgggaggagaggaagaagagctagggggcgatgggcggcgagatgaagcccgggaggggcctcaggacctgggcgcagcgccacctcaacgtcaccttcgccgtcggcttcctcctcgtgctgctcacctacctcgtcgtctcgcggcagctcgccgtcgccgcgcccggcggtgcagcgtcgagggtggtggcgggtaagcaggtggtcgtcagagacgccggagacaacgcagagggcgcgagcaaaaggcggcaggaatggcagccaaaacaggcggcggcggaggaggaggagacgtccggtgccgtcccaacggaggaggaggagtcgtatccgaaaagagatgaggccgacggcaaaccgtctgaggcagagacgacgacgacgacgacgagcaaggccgtgtgcaacacggacggccccgtgtccgagacgtgcgacctggacggcgacgtccgcaccaacggcagcgccctatctgtgacgttcgtcccggcgagcccgtcggagcggcgggagtggaaggtccggccgtactcgcgccggaccatggtgggcgtcgacagggtcaccgtgacgcggctggggtccccggatgacccggcggcgccgtgcgcggtggcgcacagcgtgccgggcgtgctgttcgcgctcggcgggctcacgggcaactactggcacgacttcagcgacgtgctgatgccgctgtacgccgcgtcgcggcggtacggcggggaggtcctgttcctggtcagcaacatgcagccgtggtggctgggcaagtacgaggccgtggtgcggcggctgtccaggtacgacgccgtggacctggaccgggacgcgcgggtgcgctgcttccgccgcctcaccgtgggcctgcgcctgcacaaggagctcggcgtcgcgccggagctcacggcgccggaccggctgaccacggccgacttcacggcgttcctgcgcgagacgtacgcgctccagcgcggcgcgccggcggcggtcccgacgacggaggggagaaagccgcggctaatgctgatccaccgcgcgcactaccgccggttcgtgaacgtgccggagatcacgcgcgcagcggaggcggcggggttcgaggtggcggtggcgagcccgcgcggcgacgcgcccgtggaggagacggcgcgggcggtgaactcgtgcgacgcgctgctgggcgtgcacggcgccgggctgacgaacgccgtgttcctgccccccggcgcggtgctgatccaggtggtgccgtacgggcggctggagcgcatggcgcgccgggacttcggggaccccgcggaggacatgggcctgcgctacctggagtacagcgtgtccgcggaggagagcaccctgctggagatgctggggccggagcacccggtgatcagggacccggactccgtgcaccgcagcggctgggacaaggtcgccgagtactacctcggcaagcaggacgtgcgcatcgacgtggaccgcttcgcgcccacgctcgcgcaggcgatggaccacctgcggcaccgccaccagtgagccttcattggtcgaacgagctgcacatggagggaggatacgtacatcataacacatctcactcacataagggacgcacatgcaaacttgcgtttggcggataggttagctccaaactgtaagtcatcgattgtttggtacagaatcgagcggcgtatacgc

SEQ ID NO: 482 - protein, 505 aa, Zea mays
  misc_feature (125)..(368): Pfam Name: DUF563 Pfam Description: Protein of unknown function (DUF563)
  misc_feature: Ceres Clone ID no. 375289
  misc_feature: Bit score of 752.8 for HMM based on sequences of Figure 13
  misc_feature: Functional Homolog Of SEQ ID NO. 459
MGGEMKPGRGLRTWAQRHLNVTFAVGFLLVLLTYLVVSRQLAVAAPGGAASRVVAGKQVVVRDAGDNAEGASKRRQEWQPKQAAAEEEETSGAVPTEEEESYPKRDEADGKPSEAETTTTTTSKAVCNTDGPVSETCDLDGDVRTNGSALSVTFVPASPSERREWKVRPYSRRTMVGVDRVTVTRLGSPDDPAAPCAVAHSVPGVLFALGGLTGNYWHDFSDVLMPLYAASRRYGGEVLFLVSNMQPWWLGKYEAVVRRLSRYDAVDLDRDARVRCFRRLTVGLRLHKELGVAPELTAPDRLTTADFTAFLRETYALQRGAPAAVPTTEGRKPRLMLIHRAHYRRFVNVPEITRAAEAAGFEVAVASPRGDAPVEETARAVNSCDALLGVHGAGLTNAVFLPPGAVLIQVVPYGRLERMARRDFGDPAEDMGLRYLEYSVSAEESTLLEMLGPEHPVIRDPDSVHRSGWDKVAEYYLGKQDVRIDVDRFAPTLAQAMDHLRHRHQ

SEQ ID NO: 483 - protein, 506 aa, Zea mays
  misc_feature (126)..(369): Pfam Name: DUF563 Pfam Description: Protein of unknown function (DUF563)
  misc_feature: Public GI ID no. 212274959
  misc_feature: Bit score of 750.5 for HMM based on sequences of Figure 13
  misc_feature: Functional Homolog Of SEQ ID NO. 459
MGGEMKPGRGLRTWAQRHLNVTFAVGFLLVLLTYLVVSRQLAVAAPGGAASRVVAGKQVVVRDAGDNAEGASKRRQEWQPKQAAAEEEETSGAVPTEEEESYPKRDEADGKPSAEAETTTTTTSKAVCNTDGPVSETCDLDGDVRTNGSALSVTFVPASPSERREWKVRPYSRRTMVGVDRVTVTRLGSPDDPAAPCAVAHSVPGVLFALGGLTGNYWHDFSDVLMPLYAASRRYGGEVLFLVSNMQPWWLGKYEAVVRRLSRYDAVDLDRDARVRCFRRLTVGLRLHKELGVAPELTAPDRLTTADFTAFLRETYALQRGAPAAVPTTEGRKPRLMLIHRAHYRRFVNVPEITRAAEAAGFEVAVASPRGDAPVEETARAVNSCDALLGVHGAGLTNAVFLPPGAVLIQVVPYGRLERMARRDFGDPAEDMGLRYLEYSVSAEESTLLEMLGPEHPVIRDPDSVHRSGWDKVAEYYLGKQDVRIDVDRFAPTLAQAMDHLRHRHQ

SEQ ID NO: 484 - protein, 518 aa, Oryza sativa subsp. japonica
  misc_feature (135)..(383): Pfam Name: DUF563 Pfam Description: Protein of unknown function (DUF563)
  misc_feature: Public GI ID no. 115434208
  misc_feature: Bit score of 645.6 for HMM based on sequences of Figure 13
  misc_feature: Functional Homolog Of SEQ ID NO. 459
MGGDHGKLMKSLKGAAQKYLGVGFLLGFFLVLLTYFTVSEQFAIAAPNAIRKTSPGHASPTIPPPVEEKRPQLPPIIEQRQAPKAEHEHAAVVQEKTPSAEEIEIQKETEEDHTKEKPTDDVTTTVEESAPAKKPACDIQGPWASDVCSIDGDVRIHGAAHDVVIPPPIEGGGSNPNPREWRVVPYSRKHMGGLKEVAVREVASAAEAPACDVRSPVPALVFAMGGLTGNYWHDFSDVLIPLYLQARRFDGEVQLVVENIQMWYVGKYKRVLDRLSRHDIVDMDRDDKVRCFPGAVVGIRMHKEFSIDPARDPTGHSMPEFTKFLRDTFSLPRDAPVSLVDNAAAVRPRLMIISRRHPRKLMNVEEVVRAAERIGFEVVIGDPPFNVDVGEFAKEVNRADVLMGVHGAGLTNSVFLPTGAVLIQVVPYGKMEHIGKVDFGDPAEDMRLKYMAYSAGVEESTLVETLGRDHPAVRDPESVHRSGWGKVAEYYLGKQDIRLDLARFEPLLRDAMDYLKHQ

SEQ ID NO: 485 - protein, 516 aa, Triticum aestivum
  misc_feature (127)..(381): Pfam Name: DUF563 Pfam Description: Protein of unknown function (DUF563)
  misc_feature: Public GI ID no. 56409854
  misc_feature: Bit score of 1019.5 for HMM based on sequences of Figure 13
  misc_feature: Functional Homolog Of SEQ ID NO. 459
MGAGEGKHGKGLVRSWAQRYLNLGFVAGFLLVLLAYIVVTQQFVITSPEAVPTMTPHRKQAISTPGAGETGTPEARGEEKAEEEQQQQRQQPDAEPEWKKPEDTVATEQEPPKRDDTAAEPLDNGRVVCTTEGPFSDTCDVFGDVRTNGTAHTVTLVPATQTESREWKIQPYARRTMSGISEVTVTQLDSTSAEYPAPACTVTHNIPGIVFALGGLTGNYFHDFSDALVPLVIASRGYGGEVQLLASNIQPWWLGKYEALVQRLSKYDVVDLDHDDQIRCFPSVTVGLNMHKEFNIVPELVPGGVPLSMLNFTAFLRETYSLPRAAPIRLTNKKSSPPVDGKKRSRRLMLLDRGHYRKLVNVPEIVKAAEKAGFEVTIADPRFNVRVKELALSVNSFDVLLGVHGAGLTNSAFLPPGAVVIQVVPYGNLEHMAKREFGDPAANMGLRYLEYSITAEESTLLEMLGPDHPVIKDPESVHRSGWDKVAEYYLGKQDVRVDVQRFAPTLALALDHLRQQ

SEQ ID NO: 486 - DNA, 2109 bp, Panicum virgatum
  misc_feature: Ceres Clone ID no. 1748522
  misc_feature: Encodes the peptide sequence at SEQ ID NO. 487
gaggcccaaccaacacaccacaacgcctcgcttcttctcgcctcccatgtaagcaacgaatcggccaggaggaaaggaaaagctcggcaaagagcttcgaacagcgtcgtccaccgtgtgtggttccatcggaggaataattcgggggcataccataccactgagcagtgagaggcgggtagggaggagcggcggcgcaggcgatgggcggcgaggcgaagcccgccgtgagggggctcaggagctgggcgcagcggcacctcaacgccggcttcgccgccggcttcctcctcgtcctcctcacgtacctcgtcgtttcgcagcagttcgccgtcaccgcgcccaacgctgtcgcgaccaaggggtcgcggattgctgataagcaggtgatcggaggtgcaggcgatgcagaggtcgacaagaaaagggagcaggaatggcagcccaaaacggcggcggaggagcccgacaagaaggatacgtcgggggccgtccaaaccgaggagtctccgaaaagagacggcacaaacgccaaatcgttcgcagagacggacagggtggtgtgcaacacggacggccccgtctccgagacctgcgacctcgacggtgacgtccgcgtcaacggcagcgccctgtccgtgaccttcgtcccgtcgagcccgtcggagcgccgggagtggagggtccggccgtactcgcgccggaccatgacgggcgtcgagagggtcaccgtgacgcggctggggttgtccccgcaggcccccgcggcggcggcggcgccgccgccgtgcgcggtgacccacgacgcaccggccgtgctgttcgcgctcggcgggctcacgggcaactactggcacgacttcagcgacgtgctggtgccgctgttcgcggcgtcgcggcggtacggcggggaggtactgttcctggtcagcaacatccagccctggtggctgggcaagtacgaggccgtcgtgcgccggctgtccaggtacgacgccatcgacctggaccgggacgcccaggtccggtgcttcaggcacctcaccgtggggctgcgcctccacaaggagctcagcatcgtgccggagctggcgccgggggggcaccgcctgaccatggccgacttcaccgcgttcctgcgcgagacgtacgcgctcccgcgcgccgcgccggcgagcctggcgcgggagcccggcaggaagccgcggctgctgctgatccaccgcgcgcactaccgccggttcgagaacgtgccggagatcaggaaggcggcggaggcggcggggttcgaggtgaccgtggcgagcccgcgcgccgacgcgcccctgggggagacggcgcgggcggtgaacgcgcacgacgtgctgctgggcgtgcacggcgccgggctgacgaacgcggtgttcctgccgcccggcgcggtggtcatccaggtggtgccgtacggcaagctggagcgcatggcgcggacggacttcggcgagcccgtcgccgacatggggctgcgctacctggagtacagcgtggcggcggaggagagcacgctgctggagatgctggggccggagcacccggtgatcaaggaccccgaggccgtccaccgcagcggctgggacaaggtcgccgagtactacctcggcaagcaggacgtgcgcatcgacgtgaaccggttcgcgccgacgctcgcgcgggcgatcgaccacctccggcagcggtgaaggccgccgcccggggggacggtacgttcgtctccggcgacggcgtgtcccgtcgccgttgggcaaagaaaagcacagggatcgcggccacaaggaacacatatacactgtatgcacttccagttgcagatagggtagcttcgaatttaaagcgatttggtacagaattcgagcgacgcattctttcagtttgttttgtctagagcatgtagatttattgttggcgtatccatctggtagagcagccgtcaaattaagttatttgatttggtctttgttggtagactgtactggtgtcgtgtacgcggcctctcattctgacatcctgatcttttttcgtgagaagaagatgacccgtgcaccaactcatgttgcacattgaatttttttt

SEQ ID NO: 487 - protein, 504 aa, Panicum virgatum
  misc_feature (119)..(369): Pfam Name: DUF563 Pfam Description: Protein of unknown function (DUF563)
  misc_feature: Ceres Clone ID no. 1748522
  misc_feature: Bit score of 796.1 for HMM based on sequences of Figure 13
  misc_feature: Functional Homolog Of SEQ ID NO. 459
MGGEAKPAVRGLRSWAQRHLNAGFAAGFLLVLLTYLVVSQQFAVTAPNAVATKGSRIADKQVIGGAGDAEVDKKREQEWQPKTAAEEPDKKDTSGAVQTEESPKRDGTNAKSFAETDRVVCNTDGPVSETCDLDGDVRVNGSALSVTFVPSSPSERREWRVRPYSRRTMTGVERVTVTRLGLSPQAPAAAAAPPPCAVTHDAPAVLFALGGLTGNYWHDFSDVLVPLFAASRRYGGEVLFLVSNIQPWWLGKYEAVVRRLSRYDAIDLDRDAQVRCFRHLTVGLRLHKELSIVPELAPGGHRLTMADFTAFLRETYALPRAAPASLAREPGRKPRLLLIHRAHYRRFENVPEIRKAAEAAGFEVTVASPRADAPLGETARAVNAHDVLLGVHGAGLTNAVFLPPGAVVIQVVPYGKLERMARTDFGEPVADMGLRYLEYSVAAEESTLLEMLGPEHPVIKDPEAVHRSGWDKVAEYYLGKQDVRIDVNRFAPTLARAIDHLRQR

SEQ ID NO: 488 - protein, 550 aa, Oryza sativa subsp. japonica
  misc_feature (168)..(419): Pfam Name: DUF563 Pfam Description: Protein of unknown function (DUF563)
  misc_feature: Public GI ID no. 115457236
  misc_feature: Bit score of 577.9 for HMM based on sequences of Figure 13
  misc_feature: Functional Homolog Of SEQ ID NO. 459
MRRGESKAATRGANRSSSSSSWKSRYIGYGLVLGFVLVLLYLMVNAQFSNSPNAYLGPATTSKTESIPATTYQGNQAWQEDGSRGLEEGHREEVASTHTERSTGQRQEKDDESEKQRTEKNSIEEQLGNDRSSNYWEEGRQSEKKDTIEFSEFGGGTDDFNNVANTKPICDTSFGKYDICVLDGDTRAQGGGGAGAAVVTLVSPRAAPREWKIKPYSRKYLDGLKPVTVRSVPNPEDAPPCTTRLNVPAMVIELGGLTGNYWHDFTDVLVPLFIGARRFGGEVQLLVVNLLPFWVDKYRRIFSQISRHDIVDLEKDDDRGVVRCYPHVVVGYGSRKEFTIDPSLDDTGGGYTMVNFTEFLRQSYSLPRDRPIKLGTNHGARPRMMILERTNSRKLMNLPEVAAAARAAGFEVTVAGGRPTSTYDEFAREVNSYDVMVGVHGAGLTNCVFLPTGAVLLQIVPYGRLESIAQTDFGEPARDMGLRYIEYDIAADESSLMDVFGKDHPMIKDPVAVHLSGWGNVAEWYLGKQDVRVNIERFRPFLTQALEHLQ

SEQ ID NO: 489 - protein, 550 aa, Oryza sativa subsp. indica
  misc_feature (168)..(419): Pfam Name: DUF563 Pfam Description: Protein of unknown function (DUF563)
  misc_feature: Public GI ID no. 116317832
  misc_feature: Bit score of 576.0 for HMM based on sequences of Figure 13
  misc_feature: Functional Homolog Of SEQ ID NO. 459
MRRGESKAATRGANRSSSSSSWKSRYIGYGLVLGFVLMLLYLMVNAQFSNSPNAYLGPATTSKTESIPATTYQGNQAWQEDGSRGLEEGHREEVASTHTERSTGQRQEKDDESEKQRTEKNSIEEQLGNDRSSNYWEEGRQSEKKDTIEFSEFGGGTDDFNNVANTKPICDTSFGKYDICVLDGDTRAQGGGGAGAAAVTLVSPRAAPREWKIKPYSRKYLDGLKPVTVRSVPNPEDAPPCTTRLNVPAMVIELGGLTGNYWHDFTDVLVPLFIGARRFGGEVQLLVVNLLPFWVDKYRRIFSQISRHDIVDLEKDDDRGVVRCYPHVVVGYGSRKEFTIDPSLDDTGGGYTMVNFTEFLRQSYSLPRDRPIKLGTNHGARPRMMILERTNSRKLMNLPEVAAAARAAGFEVTVAGGRPTSTYDEFAREVNSYDVMVGVHGAGLTNCVFLPTGAVLLQIVPYGRLESIAQTDFGEPARDMGLRYIEYDIAADESSLMDVFGKDHPMIKDPVAVHLSGWGNVAEWYLGKQDVRVNIERFRPFLTQALEHLQ

SEQ ID NO: 490 - protein, 482 aa, Oryza sativa subsp. japonica
  misc_feature (105)..(345): Pfam Name: DUF563 Pfam Description: Protein of unknown function (DUF563)
  misc_feature: Public GI ID no. 115434210
  misc_feature: Bit score of 770.6 for HMM based on sequences of Figure 13
  misc_feature: Functional Homolog Of SEQ ID NO. 459
MGSEVKPAKLGLRRHLNAGFFAGFLLVLLTYVIVSQQFAMETPTAVTSRAPRIDENESVTKARVETEKKREQEWQRPKDTSGAVSAEEFSKRDSTNAKPIENGKVVCGSNGFYSDTCDVDGDVRINGTALSVTLVPASRRSERRREWKIQPYPRRTVSGIAEVTVTRQQDRAAAPACTVTHGVPGVVFALGGLTGNYWHDFSDVLVPLFVASRRYGGEVQFLVSNIQPWWLGKYEAVVRRLSRYDAVDLDRDTEVRCFRRVAVGLRMHKEFSVKPELAPGGQRLTMADFAAFLRDTYALPRAAAAGARRPRLVVIRRAHYRKIVNMDEVVRAAEAAGFEAAVMSPRFDEPVEEVARKVNAFDAMVGVHGAGLTNAVFLPAGAVVIQVVPYGRLERMARADFGEPVADMGLRYMEYSVAADESTLLEMLGPEHQVVKDPEAVHRSGWDKVAEYYLGKQDVRINVARFAATLAAAFDHLRPSHS

SEQ ID NO: 491 - protein, 525 aa, Triticum aestivum
  misc_feature (139)..(391): Pfam Name: DUF563 Pfam Description: Protein of unknown function (DUF563)
  misc_feature: Public GI ID no. 56409856
  misc_feature: Bit score of 636.6 for HMM based on sequences of Figure 13
  misc_feature: Functional Homolog Of SEQ ID NO. 459
MGDDHGAKLVKSLRGAAQKYVGVGFFLGFFLVLLTYFTLSEQFAIAAPNAIRRTSAAHPTPTTPAVAEKTVQQQQLPVKKEEAPLPEHEQVQEKPPPVDEEPHRETEEPNSETEEDPKPIDEASKIVTTAEESAPAKKPACDIQGPWASDVCDLAGGSGGVRIHGSTHTVLVPPTIESGGSNPNPQEWRVLPYSRKHMSGIKEITVRELPTAADAPRCAVTSQVPALVFAMGGLTGNYWHDFSDVMIPLYLQAARFDGEVQLVVTNIQPWYAGKYRHIIARLSRYDVVDMDKGRQVRCFPSAVVGIRMHKEFSIDPTKEPTGHSMPEFTKFLRNVFALPRAAPMRVTAGLISDKKPRMMIISRRHPRKLVNVAEVVALAKRIGFEVVIGDPPFNVDVGDFAREVNAADVLMGVHGAGLTNSLFLPTGAVFIQVNPFGKMEHIGEVDFGTPAVDMGLKYMAYSCGMEESTLVDTLGRDHPAVKDPESIHRSGWSKVAEYYLGKQDVKLDLQRVEPVLIKAMAMLRE

SEQ ID NO: 492 - protein, 482 aa, Oryza sativa subsp. japonica
  misc_feature (105)..(345): Pfam Name: DUF563 Pfam Description: Protein of unknown function (DUF563)
  misc_feature: Public GI ID no. 125568815
  misc_feature: Bit score of 765.4 for HMM based on sequences of Figure 13
  misc_feature: Functional Homolog Of SEQ ID NO. 459
MGTEVNPAKLGLRRHLNAGFFAGFLLVLLTYVIVSQQFAMETPTAVTSRAPRIDENESVTKARVETEKKREQEWQRPKDTSGAVSAEEFSKRDSTNAKPIENGKVVCGSNGFYSDTCDVDGDVRINGTALSVTLVPASRRSERRREWKIQPYPRRTVSGIAEVTVTRQQDRAAAPACTVTHGVPGVVFALGGLTGNYWHDFSDVLVPLFVASRRYGGEVQFLVSNIQPWWLGKYEAVVRRLSRYDAVDLDRDTEVRCFRRVAVGLRMHKEFSVKPELAPGGQRLTMADFAAFLRDTYALPRAAAAGARRPRLVVIRRAHYRKIVNMDEVVRAAEAAGFEAAVMSPRFDEPVEEVARKVNAFDAMVGVHGAGLTNAVFLPAGAVVIQVVPYGRLERMARADFGEPVADMGLRYMEYSVAADESTLLEMLGPEHQVVKDPEAVHRSGWDKVAEYYLGKQDVRINVARFAATLAAAFDHLRPSHS

SEQ ID NO: 493 - protein, 525 aa, Hordeum vulgare
  misc_feature (138)..(391): Pfam Name: DUF563 Pfam Description: Protein of unknown function (DUF563)
  misc_feature: Public GI ID no. 31296713
  misc_feature: Bit score of 634.0 for HMM based on sequences of Figure 13
  misc_feature: Functional Homolog Of SEQ ID NO. 459
MGDDHGAKLVKSLRGAAQKYVGVGFFLGFFLVLLTYFTVSEQFAIAAPNGIRRTSPGHLTLTSPAVAEKTVQQQQLPVKREEAPLPEHEQVHEKPPPVDDDEEPHRETEEPNSQTEHPIGEASKIVTTAEESAPAKKPACDIQGPWASDVCDLAGGSGGVRIHGSAHTVLVPPTIESGGSNPNPQEWRVLPYSRKHMSGIKEITVRELATPADAPRCAVTSQVPALVFAMGGLTGNYWHDFSDVMIPLYLQASRFDGEVQLVVTNYQRWYAGKYRDIIARLSRYDVVDMDKDDQVRCFPSAVVGIRMPKEFSIDPAKEPTGHSMPEFTKFLRNVFALPRAGPMGVTAGPSDGKKKPRMMIISRRHPRKLVNVDEVVALAKRIGFEVVIGDPPFNVDVADFAREVNAADVLMGVHGAGMTNSLFLPTGAVFIQVNPFGKMEHIGEVDFGTPAVDMGLKYMSYSCGMEESTLVDTLGRDHPAVKDPESIHRSGWNKVAEFYLGKQDVKLDLQRFEPVLLKAMAMLRE

SEQ ID NO: 494 - protein, 443 aa, Oryza sativa subsp. indica
  misc_feature (66)..(306): Pfam Name: DUF563 Pfam Description: Protein of unknown function (DUF563)
  misc_feature: Public GI ID no. 125524186
  misc_feature: Bit score of 669.8 for HMM based on sequences of Figure 13
  misc_feature: Functional Homolog Of SEQ ID NO. 459
METPTAVTSRAPRIDENESVTKARVETEKKREQEWQRPKDTSGAVSAEEFSKRDSTNAKPIENGKVVCGSNGFYSDTCDVDGDVRINGTALSVTLVPASRRSERRREWKIQPYPRRTVSGIAEVTVTRQQDRAAAPACTVTHGVPGVVFALGGLTGNYWHDFSDVLVPLFVASRRYGGEVQFLVSNIQPWWLGKYEAVVRRLSRYDAVDLDRDTEVRCLRRVAVGLRMHKEFSVKPELAPGGQRLTMADFAAFLRDTYALPRAAAAGARRPRLVVIRRAHYRKIVNMDEVVRAAEAAGFEAAVMSPRFDEAVEEVARKVNAFDAMVGVHGAGLTNAVFLPAGAVVIQVVPYGRLERMARADFGEPVADMGLRYMEYSVAADESTLLEMLGPEHQVVKDPEAVHRSGWDKVAEYYLGKQDVRINVARFAATLAAAFDHLRPSHS

SEQ ID NO: 495 - protein, 529 aa, Hordeum vulgare
  misc_feature (141)..(394): Pfam Name: DUF563 Pfam Description: Protein of unknown function (DUF563)
  misc_feature: Public GI ID no. 55792424
  misc_feature: Bit score of 928.8 for HMM based on sequences of Figure 13
  misc_feature: Functional Homolog Of SEQ ID NO. 459
MVSVEKQSAPAAAPAGKGLTVGGWAQRHLNLCFVAGFLLVLIAYFVVSQQFAVASPDAVSAMTPHRKKHQATKSSGRAGEAGLTQRNGGGEATAEAGPAQEQRQRQRQQGPPKAEYRARGVGKRDRDDGAANAKPFDNGKVVCIASPFSYTCDVSGDVRTNGTAHTVTLVPATSLTERREWSIQPYARYNMTGIPNITVTQLDSTSAASPAPACTVTHRVPAIVIGLGGHLGNYFHDFSDALVPLFVASRRYGGEVQLLASNIQPWWLGKYEAVVRRLTKYDVVDLDHDDQIRCFRRVTVGLNMHREFDIVPELVPGDVPLSMANFTAFLRETYSLPRAAPIRLTKGSSPPVDKKKKKPRLMLLDRGHYRKLVNVPEIVKAAEKAGFEVVIADPRFNVRVKELAMSVNSFDVLLGVHGAGLTNAAFLPPGAVVIQVVPYGKLEPMAQREFGDPAADMGLRYLQYSITAEESTLLETLGPDHPAIKDPDSVHRSGWDKVAEFYLGKQNVRVDVERFAPTLALALDHLRRQ

SEQ ID NO: 496 - DNA, 1407 bp, Sorghum bicolor
  misc_feature: Ceres Annot ID no. 8659052
  misc_feature: Encodes the peptide sequence at SEQ ID NO. 497
atgaaaagcttggtgcacggccacgtcaacgtcggcctcatcgccggcgtcctcttcgtgctcctcacctacctcgtcgtctcgcagcagactgccctcagccgccccaacgttgtcactacggtatcacagtggctatcgactaataaacagcagaatgaaggtcccggtgaaacagttgtcactacggaagagcaacagatcgtggataaacagctgattcaaggctcaagtgaatcagagaaggtcagcaacaaggtggtgtgcagcacggaggagcgtttttctgactactgcgaactcgatggcgacgtccgcatcaacggcaaagcctggtcggtggacatcgtgcccccgggctggtcgtcggagcagcggcgggagtggaagatccggccgtactcgcgccggagcgcgtccaacgtcgacacgctcaacgtgacgcagctgcaggacccggcgtccgcgccggcgtgcacggtgacgcaccacgcgccgggcgtcgtgttcgcgctcggcgggtactcgggcaacgccttccacgaccacgccgacgtgctcctgccgctgtacctgacgtcgctgcggtacgacggcgaggtccagctcctcgtcatcaaccgggtgcagccgtggtggctgggcaagtacaggctcgccctccggcggatgtccaagtacgacgtggtgaacctggacggcgacgcccacgtccggtgcttcccgcacctcaccgtcggcctccgcctgcacatggacttcggcgtcgtccccgagatggttccggggcaggggcaccgccgcgtctccatgcccgacttcaccaggttcctgcgcgaggcgtacgcgctccctcgcggcgcgccggtgaagccgggcaagaatcggccgcggctcatgctgatccagcggcagcgcacccggcggttcctgaacgaggcggagatggtgcgggcggcggaggcggcggggttcgaggtggcggtgacggacctgctgatcgacgcggccgtggacgagcaggcgcgggtggtgaactcgttcgacgtgatggtgggcatccacggcgccgggatgacgaacgaggtgttcctgccgcccggcggggtgctcgtccaggtggtgccgtgggggaagctggacctgatggccagggtcgagtacggcgagccggcggcggacatggggctcaagtacctctgctacaacgtgacgctggaggagagctcgctgccggagctgctggggcgcgaccacccggcgatcaaggacccggactccatccaccgcaaaggctgggctgccatgttcgacatctacatgaccaagcaggacgttcggctcgacatcgaacgcttcgcgctcacgctcgcggaggccatggaccacctacgcagcctgcagtag

SEQ ID NO: 497 - protein, 468 aa, Sorghum bicolor
  misc_feature (87)..(332): Pfam Name: DUF563 Pfam Description: Protein of unknown function (DUF563)
  misc_feature: Ceres Annot ID no. 8659052
  misc_feature: Bit score of 527.9 for HMM based on sequences of Figure 13
  misc_feature: Functional Homolog Of SEQ ID NO. 459
MKSLVHGHVNVGLIAGVLFVLLTYLVVSQQTALSRPNVVTTVSQWLSTNKQQNEGPGETVVTTEEQQIVDKQLIQGSSESEKVSNKVVCSTEERFSDYCELDGDVRINGKAWSVDIVPPGWSSEQRREWKIRPYSRRSASNVDTLNVTQLQDPASAPACTVTHHAPGVVFALGGYSGNAFHDHADVLLPLYLTSLRYDGEVQLLVINRVQPWWLGKYRLALRRMSKYDVVNLDGDAHVRCFPHLTVGLRLHMDFGVVPEMVPGQGHRRVSMPDFTRFLREAYALPRGAPVKPGKNRPRLMLIQRQRTRRFLNEAEMVRAAEAAGFEVAVTDLLIDAAVDEQARVVNSFDVMVGIHGAGMTNEVFLPPGGVLVQVVPWGKLDLMARVEYGEPAADMGLKYLCYNVTLEESSLPELLGRDHPAIKDPDSIHRKGWAAMFDIYMTKQDVRLDIERFALTLAEAMDHLRSLQ

SEQ ID NO: 498 - DNA, 1410 bp, Sorghum bicolor
  misc_feature: Ceres Annot ID no. 8659059
  misc_feature: Encodes the peptide sequence at SEQ ID NO. 499
atgcgcggcagcgaggtgaagtcggggaagagccagaagagctcggcgcagaggcacatcaacgccggcttcgtcgtcgccggtctcctcatgctcctcatctaccttgtcgctcagcatttcgcggtcggcgcttcccatgttgttattacggaagcacaagttatcatggataatgtaaaagcgcccgatgaaacagttgtcattacagaagcgcaacgaatcatggatgatatcaaagctcccagtgaaacagagaatggcaaggtggtatgcaacatggaaggccgctcggacacctgcgaagtcgacggcgacgtccgcaccaacggcacggccctgtcagtgaccctcgtgccggcgagccggtcggagcacagcgagtggatgatccggccgtactcgcgcaggttcgccagcctcaggaaggtgacggtgacgcagctgcaggaccgggccgccgccgcgccgtgcacggcgacgcacgacatgccggcggtcctgttcgcgatcggcgggtacgcgggcaactactggcacgactacgccgacatcctggtgccgctgttcgtcgcgtcgcggcgatacaacggcgaggtcaagttcctgatcagcaacgcccagttccagccccagtggctggtcaagtacagggcgttcctgcgggggctgtccaggcacgacgtggtggacatggacggcgacgcggaggtccggtgcttcccgcacgtcacggtggggctccgcctggacaaggagttcagcatcgtccccgagctggtgccgggagaccgccgcctcaccatggcggacttcacccggttcctgcgcgagacgtacgcgctcccgcgcggcgcggtggcggcgtcccggtcccggggacagaagccgcggctgctgctgatccaccggggccactaccggcggatcacgaacgaggcggaggtggcgcgggcggcggaggcggcggggttcgaggcggtggtggcggagctgggcggcggcggcgggggcgacgaggcggagcaggcgcgggtggtgaacgcgttcgacgtggtgctgggcatgcacggcgccgggctgacgaacgcggtgttcctgccgcccggcggggtgctcatccaggtggtgccgtacgggaagatggagcacatcgcgcgggcggagttcggcgagccggccgcggacatggggctcgagtacctggactacagcgtgagcgcggaggagagctcgctgatggagacgctggggccggagcacccggcggtgaaggacccggactccgtccaccgcagcggctggggccaggtgttcgagctctacctcgccaagcagaacgtccgcgtcaacgtcacccgcttcgcgccgacgctggcgcaggcgctccatcacctacgccagcagtag

SEQ ID NO: 499 - protein, 469 aa, Sorghum bicolor
  misc_feature (90)..(332): Pfam Name: DUF563 Pfam Description: Protein of unknown function (DUF563)
  misc_feature: Ceres Annot ID no. 8659059
  misc_feature: Bit score of 565.8 for HMM based on sequences of Figure 13
  misc_feature: Functional Homolog Of SEQ ID NO. 459
MRGSEVKSGKSQKSSAQRHINAGFVVAGLLMLLIYLVAQHFAVGASHVVITEAQVIMDNVKAPDETVVITEAQRIMDDIKAPSETENGKVVCNMEGRSDTCEVDGDVRTNGTALSVTLVPASRSEHSEWMIRPYSRRFASLRKVTVTQLQDRAAAAPCTATHDMPAVLFAIGGYAGNYWHDYADILVPLFVASRRYNGEVKFLISNAQFQPQWLVKYRAFLRGLSRHDVVDMDGDAEVRCFPHVTVGLRLDKEFSIVPELVPGDRRLTMADFTRFLRETYALPRGAVAASRSRGQKPRLLLIHRGHYRRITNEAEVARAAEAAGFEAVVAELGGGGGGDEAEQARVVNAFDVVLGMHGAGLTNAVFLPPGGVLIQVVPYGKMEHIARAEFGEPAADMGLEYLDYSVSAEESSLMETLGPEHPAVKDPDSVHRSGWGQVFELYLAKQNVRVNVTRFAPTLAQALHHLRQQ

SEQ ID NO: 500 - DNA, 1143 bp, Panicum virgatum
  misc_feature: Ceres Clone ID no. 1902646
  misc_feature: Encodes the peptide sequence at SEQ ID NO. 501
acatcaggctgggcatacctgaaagcgtgtacttgagagctgggcgtacagactgcgcagcatcgtccatggcttcttccagactctgtcggcctctcgtcgccgcgtccttcttggctgccttcgccgccgtgtccagcgccggcaaggtcgccgtttactggggccagggcggcggggagggaaccctcgcggacacgtgcgcctccgggctgtacgacttcgtgaacatcgccttcgtcagcgcgttcggcaacggcggcggccagcccccggtcctcaacctcgccgaccactgcgaccccgccgcgggcacctgcgccgtgttcagctccgacatccggtcgtgccaggcgagaggcgtcaaggtgctcatctccctcggcggcgccacgccgacctactccctcacctccgccgaggaagcgcgcgggctcgccgactacctgtgggacaacttcctcgggggcgcctcggcggcgtcccgcccgctcggcgacgcggcgctcgacggcgtcgacttcgacatcgagcagggcggcggcgaccactacgacgagctggccagggccctgtcgtcccggtgcggcggcgcgtgcctgctcacggcggcgccgcagtgcccgtacccggacgcgcacctcggcaaggcgatcgggacggggctgttcagccacgtgtgggtgcagttctacaacaacccgatggccaggtgccagtacgcgccgggcggcgcgagcgacctggaggacgcgtgggcgcggtggacggccgccgtgccgccgccggcggacgtcttcctgggcctcccggcggcggagagcgcggcggaaaacggcgggtacatcgacgcggacacgctgaagtcgcaggtgctgccggcggtgcgaggcgcggccaactacggcggcctcatgctgtgggaccgcgccagagacgccgcctcgggttacagcagcagcgtgcgcgggagcgtgtgaacgcttgccaagtgaactgctaataatctgctactaggtgacccgagcatgctcagctcagttgcgtccccctttctccttcaaatgataccctgctcggctacaagtcctgtaatctctatacacaaataaatgaatccgacgagtagttcttttttttttc

SEQ ID NO: 501 - protein, 303 aa, Panicum virgatum
  misc_feature (26)..(290): Pfam Name: Glyco_hydro_18 Pfam Description: Glycosyl hydrolases family 18
  misc_feature: Ceres Clone ID no. 1902646
  misc_feature: Bit score of 705.3 for HMM based on sequences of Figure 45
  misc_feature: Functional Homolog Of SEQ ID NO. 501
  misc_feature: in Figure 45
MASSRLCRPLVAASFLAAFAAVSSAGKVAVYWGQGGGEGTLADTCASGLYDFVNIAFVSAFGNGGGQPPVLNLADHCDPAAGTCAVFSSDIRSCQARGVKVLISLGGATPTYSLTSAEEARGLADYLWDNFLGGASAASRPLGDAALDGVDFDIEQGGGDHYDELARALSSRCGGACLLTAAPQCPYPDAHLGKAIGTGLFSHVWVQFYNNPMARCQYAPGGASDLEDAWARWTAAVPPPADVFLGLPAAESAAENGGYIDADTLKSQVLPAVRGAANYGGLMLWDRARDAASGYSSSVRGSV

SEQ ID NO: 502 - protein, 302 aa, Oryza sativa subsp. japonica
  misc_feature (28)..(289): Pfam Name: Glyco_hydro_18 Pfam Description: Glycosyl hydrolases family 18
  misc_feature: Public GI ID no. 115439265
  misc_feature: Bit score of 681.5 for HMM based on sequences of Figure 45
  misc_feature: Functional Homolog Of SEQ ID NO. 501
  misc_feature: in Figure 45
MAPRLCCSSQFLLAVSFLAAFAAVSNAGKVAVYWGQGAGNGDGTLAETCATGLYDFVNIAFLNVYGSGLTPVLNLAAHCNPDAGTCKSLSSEISSCQQSGVKVLLSLGGERGQYSLSSADDARGVADYLWNTFLGGSSDSRPLGDAVLDGIDFDIEKDGDHYDELAMALSSKCNGACVLTAAPQCPYPDAHLDAAIKTGVFSHVWVQFYNNRQCQYASGDASALQAAWAQWTSGVPAPADVFLGLPTAPAAAPSGGYIDADTLLSQVLPAVEGAAANYGGVMLWNRWRDVTAGYGAKLKGKV

SEQ ID NO: 503 - protein, 293 aa, Ananas comosus [sequence omitted]

SEQ ID NO: 504 - protein, 299 aa, Malus x domestica
  misc_feature (27)..(288): Pfam Name: Glyco_hydro_18 Pfam Description: Glycosyl hydrolases family 18
  misc_feature: Public GI ID no. 83853955
  misc_feature: Bit score of 731.6 for HMM based on sequences of Figure 45
  misc_feature: Functional Homolog Of SEQ ID NO. 501
  misc_feature: in Figure 45
MASKTQTLALTLSLLILISSCKSSQAAGIATYWGQNGNEGTLAEACNSGNYQFVNIAFLSTFGNNQAPVLNLAGHCNPASGTCTGQSADIRTCQSKNIKVLLSIGGATETYSLTSADEARQVADYIWNNFLGGQSDSRPLGDAVLDGVDFDIELGGTQFYDELARSLKGHNGQGKTVYLAAAPQCPFPDTHLDGAIQTGLFDYVWVQFYNNPLAQCQYADGNADALLSSWNRWASVSATQVFMGLPAAPEAAPSGGFIPADALKSQVLPTIKNSPKYGGVMLWSRFYDNGYSASIKDSI

SEQ ID NO: 505 - DNA, 1269 bp, Zea mays
  misc_feature: Ceres Clone ID no. 100882327
  misc_feature: Encodes the peptide sequence at SEQ ID NO. 506
tcctttgaaccagcaactgaagcttcctcgtctcatcatcgagaccagtaagcaacatggcggctaatctcaagtgggctcctgttctagccctcgtcgtcgtcgttgctgccatggttggcaccacgagcgccggcaacatcgcagtgtactggggccagaacggcaacgaaggcagcctggcggacgcctgcaactccgggctctacgcctacgtcaacatcgcgttcctcacaaccttcggcaacggacagaccccagtcctcaacctcgccggacactgcgaccccggctctggcagctgcaccggccagagcagcgacatccagacctgccagtcgctgggcatcaaggtgctcctctccatcggcggcgccagcggcagctacggcctctcctccaccgacgacgccaacagcgtggccgactacctgtgggacaacttcctgggcggcagcggctcgtcccgcccgctcggcgccgccgtgctcgacggcatcgacttcgacatcgagaacggccagtcggcgcactacgatgacctggcgaacgcgctcaagggcaaggggagcgtgctgctgacggcggcgccgcagtgcccctacccggacgcgtcgctggggccggcgctgcagacgggccagttcgacaacgtgtggatacagttctacaacaaccccgggtgcgcgtacgccaacggggacgacaccaacctggtgaacgcatggaacacgtggaccagcagcatcaccgcggggagcttctacctcggcgtcccagcgtctccccaggccgcgggcagcgggtacatcgaccccggcaccctgacgggcacggtgatccccgccatccgaggcattggcaactacggcggcatcatggtgtgggaccgctttaacgacgtgcagaacaactacagcagccaggtgaagggcagcgtctgatgggcataccgcatacgaagcttcaagctacagcacctagccatgcatatatatatagtggctattcgtcaagttatcggactgctagatacaaatataataagagcggatcatcgggagacaaagacgcatgtcagctattgtctcgttttttaagcaacgagcgagagctgcatgcgctggttagatttaatatggatattgcccatacgttatgtaattaaatcaaataaatgttaagttcatattgaatgtgtcgaatcccatggtacaaccctatttaatatgagtctcttagggtttctatagaattaattgaaaaaat

SEQ ID NO: 506 - protein, 295 aa, Zea mays
  misc_feature (27)..(282): Pfam Name: Glyco_hydro_18 Pfam Description: Glycosyl hydrolases family 18
  misc_feature: Ceres Clone ID no. 100882327
  misc_feature: Bit score of 691.4 for HMM based on sequences of Figure 45
  misc_feature: Functional Homolog Of SEQ ID NO. 501
  misc_feature: in Figure 45
MAANLKWAPVLALVVVVAAMVGTTSAGNIAVYWGQNGNEGSLADACNSGLYAYVNIAFLTTFGNGQTPVLNLAGHCDPGSGSCTGQSSDIQTCQSLGIKVLLSIGGASGSYGLSSTDDANSVADYLWDNFLGGSGSSRPLGAAVLDGIDFDIENGQSAHYDDLANALKGKGSVLLTAAPQCPYPDASLGPALQTGQFDNVWIQFYNNPGCAYANGDDTNLVNAWNTWTSSITAGSFYLGVPASPQAAGSGYIDPGTLTGTVIPAIRGIGNYGGIMVWDRFNDVQNNYSSQVKGSV

SEQ ID NO: 507 - protein, 298 aa, Trifolium repens
  misc_feature (26)..(285): Pfam Name: Glyco_hydro_18 Pfam Description: Glycosyl hydrolases family 18
  misc_feature: Public GI ID no. 13560118
  misc_feature: Bit score of 732.2 for HMM based on sequences of Figure 45
  misc_feature: Functional Homolog Of SEQ ID NO. 501
  misc_feature: in Figure 45
MASLKQVSILLFPLFLISLFKSSSAAGIAVYWGQNGGEGSLEDACNTNNYQFVNIAFLSTFGNGQTPPLNLAGHCNPAANGCAIFSSQIQACQAKGVKILLSLGGGAGSYSLSSSDDATQVANYLWDNFLGGTSSSRPLGDAVLDGIDFDIEAGGEHFDELAKALNGFSSQSQKQIYLSAAPQCPYPDAHLDSAIPTGLFDYVGVQFYNNPQRQYSNGNTANLVNAWNQWTSSQATQVFLGVPANEGAAPSGGFIPSDVLINQVLPAIKSSAKYGGVMIWDRFNDGQSGYSDAIKGSV

SEQ ID NO: 508 - DNA, 903 bp, Sorghum bicolor
  misc_feature: Ceres Annot ID no. 8646122
  misc_feature: Encodes the peptide sequence at SEQ ID NO. 509
atggcgagcaacaagtcatcactgccgctgatggcgctagccatggcagcgctattcgtcgtcgggtcacacgccggcagcatctccatctactggggccagaacgagggcgaaggctcgcttgccgacacctgcgcgacgggcaactacaagttcgtcaatatcgccttcctggcggcgttcggcaacgggcagccgccggtgttcaacctggcggggcactgcgacccgaccaacggcgggtgcgcgagccagagcgccgacatcaagtcgtgccagagccgcggcgtcaaggtgatgctctccatcggcggcggcgccggcagctactacctcaactcctccgccgacgcccggaacgtggccacgtacctgtgggacgccttcctcggcggccggtcgtcctccaccccgcgcccgctcggcgacgccgtcctcgacggcgtcgacttcgacatcgagggcggcacgcccctgcactgggacgacctcgccaggtacctgaaagggtacagcagcagctccggcaggaaggtgtatctgacggcggcgccgcagtgcccgttcccggacgcctgggtcggcggcgccctcgccaccgggctgttcgactacgtctgggtgcagttctacaacaacccgccatgccagtacagctcaggcagcaccactgaccttgctgatgcatggaagcagtggctcacgatcccggcgaagcggatcttcctcggcctcccggcatcgcctcaggcggccggcagcgggtttattccggccgatgttctcaagtcgcaggtgcttccgttgatcaagagctccgggaagtatggagggatcatgctgtggtccaagtactatgatgaccaggatgactacagctcttcggttaagagcgatgtttag

SEQ ID NO: 509 - protein, 300 aa, Sorghum bicolor
  misc_feature (26)..(287): Pfam Name: Glyco_hydro_18 Pfam Description: Glycosyl hydrolases family 18
  misc_feature: Ceres Annot ID no. 8646122
  misc_feature: Bit score of 719.5 for HMM based on sequences of Figure 45
  misc_feature: Functional Homolog Of SEQ ID NO. 501
  misc_feature: in Figure 45
MASNKSSLPLMALAMAALFVVGSHAGSISIYWGQNEGEGSLADTCATGNYKFVNIAFLAAFGNGQPPVFNLAGHCDPTNGGCASQSADIKSCQSRGVKVMLSIGGGAGSYYLNSSADARNVATYLWDAFLGGRSSSTPRPLGDAVLDGVDFDIEGGTPLHWDDLARYLKGYSSSSGRKVYLTAAPQCPFPDAWVGGALATGLFDYVWVQFYNNPPCQYSSGSTTDLADAWKQWLTIPAKRIFLGLPASPQAAGSGFIPADVLKSQVLPLIKSSGKYGGIMLWSKYYDDQDDYSSSVKSDV

SEQ ID NO: 510 - protein, 293 aa, Cicer arietinum
  misc_feature (24)..(280): Pfam Name: Glyco_hydro_18 Pfam Description: Glycosyl hydrolases family 18
  misc_feature: Public GI ID no. 544006
  misc_feature: Bit score of 739.0 for HMM based on sequences of Figure 45
  misc_feature: Functional Homolog Of SEQ ID NO. 501
  misc_feature: in Figure 45
MEKCFNIIPSLLLISLLIKSSNAAGIAVYWGQNGNEGSLQDACNTNNYQFVNIAFLSTFGNGQNPQINLAGHCDPSTNGCTKFSPEIQACQAKGIKVLLSLGGGAGSYSLNSAEEATTLANYLWNNFLGGTSTSRPLGDAVLDGIDFDIESGGQHYDELAKALNGFSQQKVYLSAAPQCPYPDAHLDSAIQTGLFDYVWVQFYNNPQCQYSNGNINNLVNAWNQWTSSQAKQVFLGVPASDAAAPSGGLIPADVLTSQVLPAIKTSPKYGGVMIWDRFNDAQSGYSNAIKGSV

SEQ ID NO: 511 - protein, 298 aa, Psophocarpus tetragonolobus
  misc_feature (26)..(284): Pfam Name: Glyco_hydro_18 Pfam Description: Glycosyl hydrolases family 18
  misc_feature: Public GI ID no. 762879
  misc_feature: Bit score of 752.9 for HMM based on sequences of Figure 45
  misc_feature: Functional Homolog Of SEQ ID NO. 501
  misc_feature: in Figure 45
MESLKKASLVLFPILVLSLFNHSNAAGIAVYWGQNGGEGSLADTCNTGNYEFVNIAFLSTFGSGQTPQLNLAGHCDPSSNGCTGFSSEIQTCQNRGIKVLLSLGGSAGTYSLNSADDATQLANYLWDNFLGGQSGSRPLGDAVLDGVDFDIESGGSNHYDDLARALNSLSSQKKVYLSAAPQCIIPDQHLDAAIQTGLFDYVWVQFYNNPSCQYSNGGTTNLINSWNQWITVPASLVFMGLPASDAAAPSGGFVSTDVLTSQVLPVIKQSSKYGGVMLWDRFNDVQTGYSAAIIGSIN

SEQ ID NO: 512 - protein, 298 aa, Panax ginseng
  misc_feature (26)..(285): Pfam Name: Glyco_hydro_18 Pfam Description: Glycosyl hydrolases family 18
  misc_feature: Public GI ID no. 106647236
  misc_feature: Bit score of 742.3 for HMM based on sequences of Figure 45
  misc_feature: Functional Homolog Of SEQ ID NO. 501
  misc_feature: in Figure 45
MASHLSISLAFVFSVVLLLVANSDAGGISIYWGQNGGEGTLAETCATGNYEYVNLAFLTTFGNGQTPMLNLAGHCDPTSNGCTGLSSDIKSCQAQGIKVILSIGGASGSYSLVSAADAREVATYIWNNFLGGNSATRPLGNAVLDGVDFDIEGGTSAHWDDLARYLSAYSKRGKKVYLTAAPQCPYPDAWVGGALQTGLFDYVWVQFYNNPPCQYSSSAIGNLEDAWKQWTSDIPAKKIFLGLPAAPDAAGSGFIPASDLTSQVLPAIKGSSKYGGVMLWSKYYDDQSGYSSSIKSDV

SEQ ID NO: 513 - DNA, 897 bp, Populus balsamifera subsp. trichocarpa
  misc_feature: Ceres Annot ID no. 1471221
  misc_feature: Encodes the peptide sequence at SEQ ID NO. 514
atggcatttcaaccagcaactacattatcagttgccgcattagtattgctaattttagcaacaggatctgatgctggtggaatagcaatctactggggtcagaacggaaacgagggaaccctggcagatacttgtgcaactggaaactaccaatatgtaaacctggccttcctcgtgactttcggaaatggccagacgcccatgattaaccttgctgggcattgcgatccatacagcaatggctgcacaagcttgagttctgacattaaatcatgccaagcccaaggtgttaaggtgatgctttctataggaggagcttctggtagctactccctcgcctcctcagaggacgcgaggcaagtcgctacttatctgtggaacaatttcttggggggtcactcttcatcccgtcccctggggtctgctgtcctagatgggattgactttgacatcgaaggaggaacaggattgtactgggatgaccttgcaaggtacctttctgcttatagcaataaaggtaaaagggtgcacttaacagcagctccccagtgccccttccctgatgcttgggtgggaaatgccctgaaaaccggtcttttcgattacgtttgggtccaattctacaacaaccctccttgccaatacgcttctggggaggtcaccaatctggaggatgcttggaagcaatggacttcagccattccagccagcaagattttcttgggtttgcccgcatctcctgcggcagcaggcagcggcttcattcccgtgcctgatctcacatcaaacgtgcttccatccatcaaggactcttccaagtatgggggtgtaatgctgtggtccaagtattacgatgatcaaagcggatatagttcttccattaagaatgatgtctga

SEQ ID NO: 514 - protein, 298 aa, Populus balsamifera subsp. trichocarpa
  misc_feature (26)..(285): Pfam Name: Glyco_hydro_18 Pfam Description: Glycosyl hydrolases family 18
  misc_feature: Ceres Annot ID no. 1471221
  misc_feature: Bit score of 735.6 for HMM based on sequences of Figure 45
  misc_feature: Functional Homolog Of SEQ ID NO. 501
  misc_feature: in Figure 45
MAFQPATTLSVAALVLLILATGSDAGGIAIYWGQNGNEGTLADTCATGNYQYVNLAFLVTFGNGQTPMINLAGHCDPYSNGCTSLSSDIKSCQAQGVKVMLSIGGASGSYSLASSEDARQVATYLWNNFLGGHSSSRPLGSAVLDGIDFDIEGGTGLYWDDLARYLSAYSNKGKRVHLTAAPQCPFPDAWVGNALKTGLFDYVWVQFYNNPPCQYASGEVTNLEDAWKQWTSAIPASKIFLGLPASPAAAGSGFIPVPDLTSNVLPSIKDSSKYGGVMLWSKYYDDQSGYSSSIKNDV

SEQ ID NO: 515 - protein, 299 aa, Glycine max
  misc_feature (27)..(285): Pfam Name: Glyco_hydro_18 Pfam Description: Glycosyl hydrolases family 18
  misc_feature: Public GI ID no. 4835582
  misc_feature: Bit score of 739.5 for HMM based on sequences of Figure 45
  misc_feature: Functional Homolog Of SEQ ID NO. 501
  misc_feature: in Figure 45
MKTPNKASLLLFPLLSLSLFINHSHAAGIAVYWGQNGGEGTLAEACNTGNYQYVNIAFLSTFGNGQTPQLNLAGHCDPNNNGCTGLSSDINTCQDLGIKVLLSLGGGAGSYSLSSADDATQLANYLWENFLGGQTGSGPLGDVILDGIDFDIESGGSDHYDDLARALNSFSSQSKVYLSAAPQCIIPDAHLDAAIQTGLFDYVWVQFYNNPSCQYSSGNTNDLINSWNQWITVPASLVFMGLPASEAAAPSGGFVPADVLTSQILPVIKQSSNYGGVMLWDRFNDVQNGYSNAIIGSVN

SEQ ID NO: 516 - protein, 297 aa, Oryza sativa subsp. japonica
  misc_feature (26)..(284): Pfam Name: Glyco_hydro_18 Pfam Description: Glycosyl hydrolases family 18
  misc_feature: Public GI ID no. 27817953
  misc_feature: Bit score of 715.1 for HMM based on sequences of Figure 45
  misc_feature: Functional Homolog Of SEQ ID NO. 501
MANKSSLLQLLLIAAVASQFVSSQAGSIAIYWGQNNGEGTLADTCATGNYKFVNIAFLAAFGNGQPPVFNLAGHCDPTNGGCASQSSDIKSCQSRGVKIMLSIGGGAGSYYLSSSEDAKNVATYLWNNFLGGQSSSRPLGDAVLDGIDFDIEGGTNQHWDDLARYLKGYSNSGRRVYLTAAPQCPFPDACIGDALNTGLFDYVWVQFYNNPPCQYSSGSTSNLADAWKQWLSVPAKQIFLGLPASPQAAGSGFIPADDLKSQVLPVIKSSGKYGGIMLWSKYYDDQDDYSSSVKSDV

SEQ ID NO: 517 - protein, 299 aa, Malus x domestica
  misc_feature (27)..(286): Pfam Name: Glyco_hydro_18 Pfam Description: Glycosyl hydrolases family 18
  misc_feature: Public GI ID no. 10954033
  misc_feature: Bit score of 712.3 for HMM based on sequences of Figure 45
  misc_feature: Functional Homolog Of SEQ ID NO. 501
MASKSTATFLALLSLVTLVLALGANAGGIAIYWGQNGNEGTLAETCASGNYQFVNVAFLTTFGNGQTPAINLAGHCDPTTEECTKLSPEIKSCQAKGIKVILSIGGASGSYSLTSADDARQVATYLWNNFLGGQSSSRPLGAAVLDGIDFDIEGGTDQHWDDLARYLSGYSKRGKKVYLTAAPQCPFPDAYVGNALKTGLFDNVWVQFYNNPPCQYASGDVTNLEDAWKQWTSAIPADKIFLGLPAAPQAAGSGFIPATDLSSQVLPAIKSSAKYGGVMLWSKYYDDPDGYSSSIKNDV

SEQ ID NO: 518 - protein, 297 aa, Oryza sativa subsp. indica
  misc_feature (26)..(284): Pfam Name: Glyco_hydro_18 Pfam Description: Glycosyl hydrolases family 18
  misc_feature: Public GI ID no. 125557999
  misc_feature: Bit score of 714.7 for HMM based on sequences of Figure 45
  misc_feature: Functional Homolog Of SEQ ID NO. 501
MANKSSLIQLLLIAAVASQFVSSQAGSIAIYWGQNNGEGTLADTCATGNYKFVNIAFLAAFGNGQPPVFNLAGHCGPTNGGCASQSSDIKSCQSRGVKVMLSIGGGAGSYYLSSSEDAKNVATYLWNNFLGGQSSSRPLGDAVLDGIDFDIEGGTNQHWDDLARYLKGYSNSGRRVYLTAAPQCPFPDAWIGDALNTGLFDYVWVQFYNNPPCQYSSGSTSNLADAWKQWLSVPAKQIFLGLPASPQAAGSGFIPADDLKSQVLPVIKSSGKYGGIMLWSKYYDDQDDYSSSVKSDV

SEQ ID NO: 519 - DNA, 894 bp, Sorghum bicolor
  misc_feature: Ceres Annot ID no. 8646117
  misc_feature: Encodes the peptide sequence at SEQ ID NO. 520
atggcaaccagatcatcgctggtgccactgctgctcattgcagtagctgctgcgcagattgttgggtcacaagctggcagcatttccatatactggggtcagaatggtggcgagggcacactggccgacacctgcgccactggcaactacaagtttgtcaacttggcattccttgtagcctttggcaatggccagcaaccagtgctcaacctagcaggccactgtgacccctcaagtggtggctgcaccagcctaagcgacgacatcaagtcgtgccagagcaatggcgtcaaggtcatgctctcgatcggtggagcttctggtagctactaccttacctcagccgcggatgccaagactgttgcgacatacttgtggaacaatttcttaggggggcaatcatcttctcgccccttgggcgatgcggtccttgatggcatagactttgacatcgagggcggcaccacccagcactgggatgatcttgcaagatacttgaaagggtacagcaactctggcaggagggtgtacctgactgctgcacctcagtgcccgtttcctgatgcctatgtcggtgatgctctcaacaccggccagtttgactacgtctgggtgcagttctacaacaaccctccttgccagtacagctcaggcagcaccactgatcttgctgatgcatggaagcagtggctatcaattccggcaaagcaggtctttcttggcctcccagcttcgcctgaagctgctgggagtggttttataccagctgatgacctcaagtctcaggtgcttccattgatcaagagttcagggaaatatggagggatcatgctgtggtccaagtactatgatgaccaggatgactacagctcttcagtcaagagcgatgtttag

SEQ ID NO: 520 - protein, 297 aa, Sorghum bicolor
  misc_feature (26)..(284): Pfam Name: Glyco_hydro_18 Pfam Description: Glycosyl hydrolases family 18
  misc_feature: Ceres Annot ID no. 8646117
  misc_feature: Bit score of 714.9 for HMM based on sequences of Figure 45
  misc_feature: Functional Homolog Of SEQ ID NO. 501
MATRSSLVPLLLIAVAAAQIVGSQAGSISIYWGQNGGEGTLADTCATGNYKFVNLAFLVAFGNGQQPVLNLAGHCDPSSGGCTSLSDDIKSCQSNGVKVMLSIGGASGSYYLTSAADAKTVATYLWNNFLGGQSSSRPLGDAVLDGIDFDIEGGTTQHWDDLARYLKGYSNSGRRVYLTAAPQCPFPDAYVGDALNTGQFDYVWVQFYNNPPCQYSSGSTTDLADAWKQWLSIPAKQVFLGLPASPEAAGSGFIPADDLKSQVLPLIKSSGKYGGIMLWSKYYDDQDDYSSSVKSDV

SEQ ID NO: 521 - DNA, 894 bp, Sorghum bicolor
  misc_feature: Ceres Annot ID no. 8646118
  misc_feature: Encodes the peptide sequence at SEQ ID NO. 522
atggcgaccaggtcatcgctggtgccactgctgctcattacagtagttgttgcgcagattgttgggtcacaagctggcagcatttccatatactggggtcaaaatggtggcgagggcacactggccgacacctgcgccactggcaactacaagtttgtcaacttggcattccttgtagcctttggcaatggccagcaaccagtgctcaacctagcaggccactgtgacccctcaagtggtggctgcaccagcctaagcgacgacatcaagtcgtgccagagcaatggcgttaaggtcatgctctcgattggtggagcttctggtagctactaccttacctcagccgcggatgccaagactgttgcgacatacttgtggaacaatttcttaggggggcaatcatcttctcgccccttgggcgatgcggtccttgatggcatagactttgacatcgagggcggcaccacccagcactgggatgatcttgcaagatacttgaaagggtacagcaactctggcaggagggtgtacctgactgctgcacctcagtgcccgtttcctgatgcctatgtcggtgatgctctcaacaccggccagtttgactacgtctgggtgcagttctacaacaaccctccttgccagtacagctcaggcagcaccactgatcttgctgatgcatggaagcagtggctatcaattccggcaaagcaggtctttcttggcctcccagcttcgcctgaagctgctgggagtggttttataccagctgatgacctcaagtctcaggtgcttccattgatcaagagttcagggaaatatggagggatcatgctgtggtccaagtactatgatgaccaggatgactacagctcttcagtcaagagcgatgtttag

SEQ ID NO: 522 - protein, 297 aa, Sorghum bicolor
  misc_feature (26)..(284): Pfam Name: Glyco_hydro_18 Pfam Description: Glycosyl hydrolases family 18
  misc_feature: Ceres Annot ID no. 8646118
  misc_feature: Bit score of 716.4 for HMM based on sequences of Figure 45
  misc_feature: Functional Homolog Of SEQ ID NO. 501
MATRSSLVPLLLITVVVAQIVGSQAGSISIYWGQNGGEGTLADTCATGNYKFVNLAFLVAFGNGQQPVLNLAGHCDPSSGGCTSLSDDIKSCQSNGVKVMLSIGGASGSYYLTSAADAKTVATYLWNNFLGGQSSSRPLGDAVLDGIDFDIEGGTTQHWDDLARYLKGYSNSGRRVYLTAAPQCPFPDAYVGDALNTGQFDYVWVQFYNNPPCQYSSGSTTDLADAWKQWLSIPAKQVFLGLPASPEAAGSGFIPADDLKSQVLPLIKSSGKYGGIMLWSKYYDDQDDYSSSVKSDV

SEQ ID NO: 523 - DNA, 885 bp, Populus balsamifera subsp. trichocarpa
  misc_feature: Ceres Annot ID no. 1467383
  misc_feature: Encodes the peptide sequence at SEQ ID NO. 524
atggctttctgtacacaagctgttatcctgattctatccgtcttgattgtctcctggtgcaagccctcgtatggtgcaggcattgccatctactggggacaaaatggaaatgaaggcaccttggctgctacttgtaactcaggaaactatcaatttgttaacgtagctttcctatctgcttttggcaatggtcaaactccagtgctaaacctcgcaggccactgtaaccccagtgccaatacttgcactggcttaagtgctgatatcaaagcttgccaagggaaaggcatcaaagtgctcctttccatcggaggtgcttcaggtgcctactctctttcatcggccgatgatgcaaggcaagtggcaagttatatctggaataacttccttggtggtcagtccagttcgcgtccactaggcgacgccatcttagatggtgttgattttgatattgaggctggttcaggtcagttctgggatgatcttgcgagggcacttaatggatttcgccaacaaaagaaggtttacttagctgcagctccacaatgtcccttccccgatgctcatctagacactgcaattaaaactgggttgtttgattatgtgtgggtccaattctataacaatccgccatgtcaatactcaggaaacgcaaacaatttgttgagtgcatggagccaatggacaacagttcaagcaaatcaagtattcctgggactaccggctgctcctgaggcagcaaacagtggtggattcatccctgctgatgtgctcacttcccaggttcttccatctgtaaagaattcacccaaatatggaggtgtcatgctctggaacaagcaatttgacaatggatacagtgcagctataaagggcagtgtctaa

SEQ ID NO: 524 - protein, 294 aa, Populus balsamifera subsp. trichocarpa
  misc_feature (26)..(283): Pfam Name: Glyco_hydro_18 Pfam Description: Glycosyl hydrolases family 18
  misc_feature: Ceres Annot ID no. 1467383
  misc_feature: Bit score of 690.5 for HMM based on sequences of Figure 45
  misc_feature: Functional Homolog Of SEQ ID NO. 501
MAFCTQAVILILSVLIVSWCKPSYGAGIAIYWGQNGNEGTLAATCNSGNYQFVNVAFLSAFGNGQTPVLNLAGHCNPSANTCTGLSADIKACQGKGIKVLLSIGGASGAYSLSSADDARQVASYIWNNFLGGQSSSRPLGDAILDGVDFDIEAGSGQFWDDLARALNGFRQQKKVYLAAAPQCPFPDAHLDTAIKTGLFDYVWVQFYNNPPCQYSGNANNLLSAWSQWTTVQANQVFLGLPAAPEAANSGGFIPADVLTSQVLPSVKNSPKYGGVMLWNKQFDNGYSAAIKGSV

SEQ ID NO: 525 - DNA, 894 bp, Sorghum bicolor
  misc_feature: Ceres Annot ID no. 8646120
  misc_feature: Encodes the peptide sequence at SEQ ID NO. 526
atggcaaccagatcatcgctggtgccactgctgctcattgcagtagctgttgcacagattgttgggtcacaagctggcagcatttccatatactgggggcagaatggtggcgagggcacactggctgacacctgcgccagcggcaactacaagattgtcaacttggcattccttgtaacatttggcaatggccagactccagagctcaacctagcaggccactgtgatcccacaagtggtggctgcgcaagccaaagcgacgacatcaagtcatgccagagcaatggcgttaaggtcatgctctcgattggtggagcttccggtagctactaccttacctcagccgcggatgccaagactgttgccacatacttgtggaacaatttcttaggggggcactcatcttctcgccccttgggcgatgcggtcctcgatggcatagactttgacatcgagggcggcaccacccaacactgggatgatcttgcaagatacttgaaagggtacagcaactctggcaggagggtgtacctgactgctgcacctcagtgccagtttcctgatgcctatgtcggtgatgcgctcaacactggtttgtttgactacgtctgggtgcagttctacaacaaccctctttgccagtacagctcaggcagcaccactgatcttgctgatgcatggaagcagtggctgtcaattccggcgaagcaggtctttcttggcctcccagcttcgcctgaggcagctgggagtggttttataccagctgatgacctcaagtctcaggtgcttccattgatcaagagctcagggaaatatggagggatcatgctgtggtccaagtactatgatgaccaggatgactacagctcttcagtcaagagcgatgtttag

SEQ ID NO: 526 - protein, 297 aa, Sorghum bicolor
  misc_feature (26)..(284): Pfam Name: Glyco_hydro_18 Pfam Description: Glycosyl hydrolases family 18
  misc_feature: Ceres Annot ID no. 8646120
  misc_feature: Bit score of 704.3 for HMM based on sequences of Figure 45
  misc_feature: Functional Homolog Of SEQ ID NO. 501
MATRSSLVPLLLIAVAVAQIVGSQAGSISIYWGQNGGEGTLADTCASGNYKIVNLAFLVTFGNGQTPELNLAGHCDPTSGGCASQSDDIKSCQSNGVKVMLSIGGASGSYYLTSAADAKTVATYLWNNFLGGHSSSRPLGDAVLDGIDFDIEGGTTQHWDDLARYLKGYSNSGRRVYLTAAPQCQFPDAYVGDALNTGLFDYVWVQFYNNPLCQYSSGSTTDLADAWKQWLSIPAKQVFLGLPASPEAAGSGFIPADDLKSQVLPLIKSSGKYGGIMLWSKYYDDQDDYSSSVKSDV

SEQ ID NO: 527 - DNA, 888 bp, Sorghum bicolor
  misc_feature: Ceres Annot ID no. 8667904
  misc_feature: Encodes the peptide sequence at SEQ ID NO. 528
atggcgactaatctcaagtgggctcctgttctggcccttctcctcgttgctgccatggttggcagcaccagtgctggcaatatcgccgtgtactggggccagaacggcaacgaaggcaccctagcggacacctgcaactccgggctgtacgcctacgtcatcctggcgttcctcacgaccttcggcaacggacagaccccggtcctgaacctcgccgggcactgtgacccgggctccggcggctgcacgggcctgagcagcgacatccagacctgccagtcgcagggcatcaaggtgctcctctccatcggcggcgccaccggcagctacggcctgtcgtccaccgacgacgccaacagcgtggccgactacctgtggaacagctacctgggcggcagcgacggctcgacacgcccgctgggcgccgccgtgctcgacggcgtcgacttcgacatcgagaacgggcagtcggcgcactacgacgacctggcgaccgcgctcaagggcaaagggagcgtgctgctgtcggcggcgccgcagtgcccgtacccggacgcgtcgctgggagccgcgctgcagacggggcagttcgacaacgtgtggatccagttctacaacaaccccgggtgcgcgtacgccaacggcgacgacaccaacctggtgaacgcctggagcacgtggaccagcagcgtcacggcggggagcttctacctcggcctgccggcgtcgacccaggccgccggcagcgggtacatcgaacccggcacgctgacgggcacggtgctccccgctatcaagggcgttggcaagtacggcggcatcatggtgtggaaccgcttctacgatgtgcagaacaactacagcgcccaggtgaaggacagcgtctga

SEQ ID NO: 528 - protein, 295 aa, Sorghum bicolor
  misc_feature (26)..(282): Pfam Name: Glyco_hydro_18 Pfam Description: Glycosyl hydrolases family 18
  misc_feature: Ceres Annot ID no. 8667904
  misc_feature: Bit score of 668.9 for HMM based on sequences of Figure 45
  misc_feature: Functional Homolog Of SEQ ID NO. 501
MATNLKWAPVLALLLVAAMVGSTSAGNIAVYWGQNGNEGTLADTCNSGLYAYVILAFLTTFGNGQTPVLNLAGHCDPGSGGCTGLSSDIQTCQSQGIKVLLSIGGATGSYGLSSTDDANSVADYLWNSYLGGSDGSTRPLGAAVLDGVDFDIENGQSAHYDDLATALKGKGSVLLSAAPQCPYPDASLGAALQTGQFDNVWIQFYNNPGCAYANGDDTNLVNAWSTWTSSVTAGSFYLGLPASTQAAGSGYIEPGTLTGTVLPAIKGVGKYGGIMVWNRFYDVQNNYSAQVKDSV

SEQ ID NO: 529 - DNA, 885 bp, Populus balsamifera subsp. trichocarpa
  misc_feature: Ceres Annot ID no. 1467381
  misc_feature: Encodes the peptide sequence at SEQ ID NO. 530
atggctttctgtacacaagctgttatcctgattctatccgtcttgattgtctcctggtgcaagccctcgtatggtgcaggcattgccatctactggggacaaaatggaaatgaaggcaccttggctgctacttgtaactcaggaaactatcaatttgttaacgtagctttcctatctgcttttggcaatggtcaaactccagtgctaaacctcgcaggccactgtaaccccagtgccaatacttgcactggcttaagtgctgatatcaaagcttgccaagggaaaggcatcaaagtgctcctttccatcggaggtgcttcaggtgcctactctctttcatcggccgatgatgcaaggcaagtggcaagttatatctggaataacttccttggtggtcagtccagttcgcgtccactaggcgacgccatcttagatggtgttgattttgatattgaggctggttcaggtcagttctgggatgatcttgcgagggcacttaatggatttcgccaacaaaagaaggtttacttagctgcagctccacaatgtcccttccccgatgctcatctagacactgcaattaaaactgggttgtttgattatgtgtgggtccaattctataacaatccgccatgtcaatactcaggaaacgcaaacaatttgttgagagcatggagccaatggacaacagttcaagcaaatcaagtattcctgggactaccggctgctcctgaggcagcaaacagtggtggattcatccctgctgatgtgctcacttcccaggttcttccatctgtaaagaattcacccaaatatggaggtgtcatgctctggaacaagctgtttgacaatggatacagtgcagctataaagggcagtgtctaa

SEQ ID NO: 530 - protein, 294 aa, Populus balsamifera subsp. trichocarpa
  misc_feature (26)..(283): Pfam Name: Glyco_hydro_18 Pfam Description: Glycosyl hydrolases family 18
  misc_feature: Ceres Annot ID no. 1467381
  misc_feature: Bit score of 691.2 for HMM based on sequences of Figure 45
  misc_feature: Functional Homolog Of SEQ ID NO. 501
MAFCTQAVILILSVLIVSWCKPSYGAGIAIYWGQNGNEGTLAATCNSGNYQFVNVAFLSAFGNGQTPVLNLAGHCNPSANTCTGLSADIKACQGKGIKVLLSIGGASGAYSLSSADDARQVASYIWNNFLGGQSSSRPLGDAILDGVDFDIEAGSGQFWDDLARALNGFRQQKKVYLAAAPQCPFPDAHLDTAIKTGLFDYVWVQFYNNPPCQYSGNANNLLRAWSQWTTVQANQVFLGLPAAPEAANSGGFIPADVLTSQVLPSVKNSPKYGGVMLWNKLFDNGYSAAIKGSV

SEQ ID NO: 531 - protein, 301 aa, Oryza sativa subsp. japonica
  misc_feature (27)..(288): Pfam Name: Glyco_hydro_18 Pfam Description: Glycosyl hydrolases family 18
  misc_feature: Public GI ID no. 115438985
  misc_feature: Bit score of 657.1 for HMM based on sequences of Figure 45
  misc_feature: Functional Homolog Of SEQ ID NO. 501
MAANKLKFSPLLALFLLAGIAVTSRAGDIAVYWGQNGDEGSLADACNSGLYAYVMVAFLSTFGNGQTPVLNLAGHCEPSSGGCTGQSSDIQTCQSLGVKVILSIGGGAGSYGLSSTQDAQDVADYLWNNFLGGSSGSRPLGDAVLDGVDFDIETGNPAHYDELATFLSRYSAQGGGKKVILTAAPQCPYPDASLGPALQTGLFDSVWVQFYNNPPCQYANGDASNLVSAWNTWTGGVSAGSFYVGVPAAEAAAGSGYVAPGDLTSAVLPAVQGNAKYGGIMVWNRFYDVQNNFSNQVKSSV

SEQ ID NO: 532 - protein, 294 aa, Zea mays
  misc_feature (27)..(281): Pfam Name: Glyco_hydro_18 Pfam Description: Glycosyl hydrolases family 18
  misc_feature: Public GI ID no. 162462924
  misc_feature: Bit score of 671.8 for HMM based on sequences of Figure 45
  misc_feature: Functional Homolog Of SEQ ID NO. 501
MAANLKWAPVLALLVVVAAMVGTTSAGNIAVYWGQNGNEGSLADACNSGLYAYVNIAFLTTFGNGQTPVLNLAGHCDPGSGSCTGQSSDIQTCQSLGIKVLLSIGGASGSYGLSSTDDANSVADYLWDNFLGGSGSSRPLGAAVLDGIDFDIENGQSAHYDDLANALKGKGSVLLTAAPQCPYPDASLGPALQTGQFDNVWIQFYNNPGCAYANGDDTNLVNAWNTWTSSITAGSFYLGVPASPQAAGSGTSTPALTGTVIPAIRGIGNYGGIMVWDRFNDVQNNYSSQVKGSV

SEQ ID NO: 533 - protein, 298 aa, Medicago truncatula
  misc_feature (28)..(285): Pfam Name: Glyco_hydro_18 Pfam Description: Glycosyl hydrolases family 18
  misc_feature: Public GI ID no. 33562677
  misc_feature: Bit score of 698.4 for HMM based on sequences of Figure 45
  misc_feature: Functional Homolog Of SEQ ID NO. 501
MKMALKSTISFTFFSLVILALANDSNAGKISIYWGQNGNEGTLAEACATGNYEYVIIAFLPTFGDGQTPMINLAGHCDPYSNECTGLSSDIKSCQAKGIKVLLSLGGGAGSYSIASTQDAKSVATYLWNNFLGGQSSSRPLGPAVLDGIDFDIEGGSNQHWGDLAKYLKGYNGKKVYITAAPQCPFPDAWIGNALTTGLFDYVWVQFYNNPPCQYNPGEISNLEDAWKQWTSGIPANKIFLGLPASPEAAGSGFIPATDLTSTVLPAIKGSAKYGGVMLWSRYDDVQSGYSSSIKSHV

SEQ ID NO: 534 - protein, 298 aa, Gossypium hirsutum
  misc_feature (27)..(287): Pfam Name: Glyco_hydro_18 Pfam Description: Glycosyl hydrolases family 18
  misc_feature: Public GI ID no. 124294787
  misc_feature: Bit score of 682.4 for HMM based on sequences of Figure 45
  misc_feature: Functional Homolog Of SEQ ID NO. 501
MERKSQAKPILFFFVLVSALIETSYAGDIAIYWGQNGNEGTLSDTCATGRYKYVNIGFLNTFGNGATPGLNLAGHCNPASNGCTSLSGEIKSCQNQGIKVMLSLGGGAGSYSLASQEDAKSVADYLWNNFLGGTSSSRPLGDAVLDGIDFDIEAGSGQYWDDLARSLSAYSSQGRKVYLTAAPQCPFPDAHLGTAINTGLFDYVWIQFYNNPLAQCQYASGNTKDILNSWNQWTSINAGSISLGLPASPEAAGNGYIPPDVLTSQILPTIKSSAKYGGVMLWSKFFDTGYSAAIINSV

SEQ ID NO: 535 - protein, 298 aa, Vigna angularis
  misc_feature (30)..(285): Pfam Name: Glyco_hydro_18 Pfam Description: Glycosyl hydrolases family 18
  misc_feature: Public GI ID no. 116330
  misc_feature: Bit score of 698.5 for HMM based on sequences of Figure 45
  misc_feature: Functional Homolog Of SEQ ID NO. 501
MKPNMACLKQVSALLLPLLFISFFKPSHAGGISVYWGQNGNEGSLADACNTGNYKYVNIAFLFTFGGGQTPQLNLAGHCNPSINNCNVFSDQIKECQSKDIKVLLSLGGASGSYSLTSADDATQVANYIWNNFLGGQSSSRPLGDAILDGVDFDIESGTGEHWDDLARALKGFNSQLLLTAAPQCPIPDAHLDTAIKTGLFDIVWVQFYNNPPCQYSSGNTNDLISSWNQWTSSQAKQLFLGVPASTAAAGSGFIPADVLTSQVLPTIKGSSKYGGVMLWDRFNDGQSGYSGAIIGSV

SEQ ID NO: 536 - protein, 299 aa, Fragaria x ananassa
  misc_feature (25)..(286): Pfam Name: Glyco_hydro_18 Pfam Description: Glycosyl hydrolases family 18
  misc_feature: Public GI ID no. 4530607
  misc_feature: Bit score of 665.6 for HMM based on sequences of Figure 45
  misc_feature: Functional Homolog Of SEQ ID NO. 501
MASVSAAALLSLATLLLLAVGSNAGGIAIYWGQNGNEGTLAQTCASGNYQFVNIAFHSSFGNGRTPTLNLAGHCDPSSNTCTKFSSQIKSCQAEGIKVILSVGGGWGGQYSLASSEDARQVGAYLWNNFLGGHSTSRPLGDAVLDGVDFDIEGGNDQYWDDLARYLSAHSKKGGKKVYLTAAPQCPFPDANIGNALKTGLFDNVWVQFYNNPPCQYTSGNVTNLEDAWKQWTSAIPAQQVFLGLPAAPEAAGSGFIPAAALTTTVLPGIKTSDKYGGVMLWSKYYDDLYGYSSSIKNHV

SEQ ID NO: 537 - protein, 298 aa, Vitis vinifera
  misc_feature (26)..(285): Pfam Name: Glyco_hydro_18 Pfam Description: Glycosyl hydrolases family 18
  misc_feature: Public GI ID no. 157349836
  misc_feature: Bit score of 718.4 for HMM based on sequences of Figure 45
  misc_feature: Functional Homolog Of SEQ ID NO. 501
MALQLIISLSVLSLLMLILVRGSDAGGIAIYWGQNGNEGTLAETCGTGNYDFVNIAFLSTFGNGQTPMINLAGHCDPYSNGCTGLSSDINSCQAKGIKVILSIGGGAGSYYLTSKEDAGQVATYLWNNFLGGQSSSRPLGPAVLDGIDFDIEGGTNEHWDDLATFLSGFSKKGKKVYLTAAPQCPFPDAWVGGALKTGLFDYVWVQFYNNPPCQYTSGNVGSLEDAWKQWTSDIPATKIFLGLPAAPDAAGSGFIPVGDLKSTVLPAIKDSAKYGGVMLWSKYYDDQTGYSSSIKSEV

SEQ ID NO: 538 - protein, 291 aa, Citrullus lanatus
  misc_feature (26)..(280): Pfam Name: Glyco_hydro_18 Pfam Description: Glycosyl hydrolases family 18
  misc_feature: Public GI ID no. 75708015
  misc_feature: Bit score of 663.2 for HMM based on sequences of Figure 45
  misc_feature: Functional Homolog Of SEQ ID NO. 501
MASHKITTTLSIIFLLSSIFRSSDAAGIAIYWGQNGNEGSLASTCATGNYKFVNIAFLSSFGNGQTPVLNLAGHCNPDNNGCAFLSDEINSCKSLGIKVLLSIGGGAGSYSLSSAEDARDVANFLWNNFLGGQSSSRPLGDAVLDGIDFDIESGSGQWWDELARQLKGFGQVLLSAAPQCPIPDAHLDAAIKTGLFDFVWVQFYNNPPCMFADNADNLLNSWSQWTTFPAASLFMGLPAAPEAAPSGGFIPADVLISQVLPTIKTSSNYGGVMLWSKAFDSGYSDAIKGSI

SEQ ID NO: 539 - protein, 301 aa, Phytolacca americana
  misc_feature (28)..(288): Pfam Name: Glyco_hydro_18 Pfam Description: Glycosyl hydrolases family 18
  misc_feature: Public GI ID no. 20975280
  misc_feature: Bit score of 612.5 for HMM based on sequences of Figure 45
  misc_feature: Functional Homolog Of SEQ ID NO. 501
MVVKLCSPLALLVLTSLLLALPWKSSAGGIAIYWGQNGGEGTLRDTCNSGLYSYVNIGFLSTFGNGQTPQLNLAGHCDPSSGGCKQLSNSIKQCQSQGIKVMLSIGGGGGSYSIASADEGRNVANYLWDNFLGGQSSNRPLGDAILDGIDFDIEQGTDNYVTLAKTLSQHGQQSGRKVYLTAAPQCPFPDHWLNKGLKTGLFDFVWVQFYNNPQCNFDAGNPQGFKDAWNQWTSQIPAQKFFVGLPASRAAAGNGFVPSQTLINQVLPFVKGSGQKYGGVMLWDRFNDKNSGYSTRIKGSV

SEQ ID NO: 540 - protein, 298 aa, Vitis vinifera
  misc_feature (26)..(285): Pfam Name: Glyco_hydro_18 Pfam Description: Glycosyl hydrolases family 18
  misc_feature: Public GI ID no. 157349835
  misc_feature: Bit score of 712.5 for HMM based on sequences of Figure 45
  misc_feature: Functional Homolog Of SEQ ID NO. 501
MALQSIISLSVLSLVMLILARGSDAGGIAIYWGQNGNEGTLAETCGTGNYDFVNIAFLSTFGNGQTPMINLAGHCDPYSNGCTSLSSDINSCQAKGIKVILSIGGGAGSYYLTSKEDAGQVATYLWNNFLGGQSSSRPLGPAVLDGIDFDIEGGTNQHWDDLTTFLSGYSKKGKKVYLTAAPQCPFPDAWVGGALKTGLFDYVWVQFYNNPPCQYTSGNVGSLEDAWKQWTSDIPATKIFLGLPAAPEAAGSGFIPVADLTSTVLPAIKGSAKYGGVMLWSKYYDDQTGYSSSIKSHV

SEQ ID NO: 541 - DNA, 897 bp, Populus balsamifera subsp. trichocarpa
  misc_feature: Ceres Annot ID no. 1497300
  misc_feature: Encodes the peptide sequence at SEQ ID NO. 542
atggcattacattcagcaatcaagttttcagtttttgccttggtattgctaatactggcaacagattctgatgctggaggaatagcaatttactggggtcagaatggaaatgagggcaccctggcagagacttgcgcaaccggaaattatgaatatgtaaatctagctttcctgtcaactttcggaaatggtcagactcccatgattaatcttgctggccattgtgatccatacagcaatggttgtaccggcttaagttctgaaataaaatcatgtcaagcaaaaggtgtcaaggtcatgctttctattggaggagctgctggtagctactaccttgcctcctcagaggatgcgaggcaagtcgcagtttatctgtggaacaatttcttggggggcaacacttcatcccggcccctggggcctgctgttttagatggagttgactttgacattgaaggaggaacaaacctctactgggatgatcttgcaaggtacctgtcggcatatagcaagaaaggtaaaagggtgcacctaacagcagctccgcagtgcccattccctgatgcttgggtgggaaatgccctcaaaaccggtcttttcgattatgtttgggtccaattctacaacaaccctccctgtcactatgcttctggtgaggtcaccaatcttgaggacgcatggaaacaatggacttcagccattccagccagcaagattttcttgggcttgcctgcatctcccgaggcagcaggcagtggcttcattcctgtccctgatctcacatcaaacgtgcttccatccataaaggactcttccaggtatggaggcgtgatgctgtggtccaagtactacgatgatcaaagtggatacagttcttcgattaaaaatgatgtctga

SEQ ID NO: 542 - protein, 298 aa, Populus balsamifera subsp. trichocarpa
  misc_feature (26)..(285): Pfam Name: Glyco_hydro_18 Pfam Description: Glycosyl hydrolases family 18
  misc_feature: Ceres Annot ID no. 1497300
  misc_feature: Bit score of 720.8 for HMM based on sequences of Figure 45
  misc_feature: Functional Homolog Of SEQ ID NO. 501
MALHSAIKFSVFALVLLILATDSDAGGIAIYWGQNGNEGTLAETCATGNYEYVNLAFLSTFGNGQTPMINLAGHCDPYSNGCTGLSSEIKSCQAKGVKVMLSIGGAAGSYYLASSEDARQVAVYLWNNFLGGNTSSRPLGPAVLDGVDFDIEGGTNLYWDDLARYLSAYSKKGKRVHLTAAPQCPFPDAWVGNALKTGLFDYVWVQFYNNPPCHYASGEVTNLEDAWKQWTSAIPASKIFLGLPASPEAAGSGFIPVPDLTSNVLPSIKDSSRYGGVMLWSKYYDDQSGYSSSIKNDV

SEQ ID NO: 543 - protein, 297 aa, Vitis vinifera
  misc_feature (26)..(284): Pfam Name: Glyco_hydro_18 Pfam Description: Glycosyl hydrolases family 18
  misc_feature: Public GI ID no. 28971736
  misc_feature: Bit score of 691.6 for HMM based on sequences of Figure 45
  misc_feature: Functional Homolog Of SEQ ID NO. 501
MARTPQSTPLLISLSVLALLQTSYAGGIAIYWGQNGNEGTLTQTCNTGKYSYVNIAFLNKFGNGQTPEINLAGHCNPASNGCTSVSTGIRNCQNRGIKVMLSIGGGVGSYSLSSSNDAQNVANYLWNNFLGGQSSSRPLGDAVLDGIDFDIELGSTLHWDDLARALSGFSKRGRKVYLTAAPQCPFPDKFLGTALNTGLFDYVWVQFYNNPQCQYSSGNTNNLLNSWNRWTSSINSQIFMGLPASSAAAGSGFIPANVLTSQILPVIKRSPKYGGVMLWSKYYDDQSGYSSSIKSSV

SEQ ID NO: 544 - DNA, 1173 bp, Glycine max
  misc_feature: Ceres Clone ID no. 562682
  misc_feature: Encodes the peptide sequence at SEQ ID NO. 545
aaaccaaaccaaaaagctaagagaatacaccaaaacccaacatgaaaacccttaacaaagcctcacttattttattccctctcttgttcctttccctattcaagcattcccatgctgcaggaatcgctgtctactggggccaaaacggtggagaaggcaccttagcagaagcttgcaacactagaaactaccaatatgtgaacatagccttcttgtccacttttggcaacggccaaactccacaactcaaccttgcaggtcattgtgaccccaacaacaatggctgcactgggttgagcagtgacatcaaaacttgccaagaccttggcatcaaagtgttgctctcccttggtggtggtgctggaagctactccctcagctcagctgatgatgccactcaacttgcaaactacctctggcagaatttccttggaggtcaaaccggatcagggccattaggtaatgttatattggatggcattgactttgacattgaatctggtgggagtgaccattatgatgacctagccagggcattaaatagcttcagctcacaaaggaaggtgtacttgtctgcagccccacagtgcataatccctgatgctcacttggatagagccatccaaactgggctttttgactatgtgtgggttcaattctacaacaacccttcatgccaatactccagtggaaacaccaacaatttgatcaattcatggaaccaatggatcacagtgccagcttctcaaatcttcatggggcttcctgcatctgaggcagctgctccaagtggtggctttgtgcccgctgatgtgttgacttctcaggttcttcctgtgattaaacagtcttcaaagtatggtggagtcatgctctggaacagattcaatgatgtccaaaatggttatagtaatgctattattggaagtgtttaatcatgttatagacttatagaaaaactatgtcattaattccattatttaaataatactaatcaccactcgtgattggtttttctactatatatatatatatatatatatatatatatatatatattcaatgtgttttgaacgctacatatgtttattgtaatatgtcacctacaagttacatatggtataattaccaaaataataaatagttcattgcgcaatatgtcattttcaaccc

SEQ ID NO: 545 - protein, 297 aa, Glycine max
  misc_feature (26)..(284): Pfam Name: Glyco_hydro_18 Pfam Description: Glycosyl hydrolases family 18
  misc_feature: Ceres Clone ID no. 562682
  misc_feature: Bit score of 745.3 for HMM based on sequences of Figure 45
  misc_feature: Functional Homolog Of SEQ ID NO. 501
MKTLNKASLILFPLLFLSLFKHSHAAGIAVYWGQNGGEGTLAEACNTRNYQYVNIAFLSTFGNGQTPQLNLAGHCDPNNNGCTGLSSDIKTCQDLGIKVLLSLGGGAGSYSLSSADDATQLANYLWQNFLGGQTGSGPLGNVILDGIDFDIESGGSDHYDDLARALNSFSSQRKVYLSAAPQCIIPDAHLDRAIQTGLFDYVWVQFYNNPSCQYSSGNTNNLINSWNQWITVPASQIFMGLPASEAAAPSGGFVPADVLTSQVLPVIKQSSKYGGVMLWNRFNDVQNGYSNAIIGSV

SEQ ID NO: 546 - protein, 298 aa, Glycine max
  misc_feature (26)..(284): Pfam Name: Glyco_hydro_18 Pfam Description: Glycosyl hydrolases family 18
  misc_feature: Public GI ID no. 4835584
  misc_feature: Bit score of 745.0 for HMM based on sequences of Figure 45
  misc_feature: Functional Homolog Of SEQ ID NO. 501
MKTPNKASLILFPLLFLSLFKHSHAAGIAIYWGQNGGEGTLAEACNTRNYQYVNIAFLSTFGNGQTPQLNLAGHCDPNNNGCTGLSSDIKTCQDLGIKVLLSLGGGAGSYSLSSADDATQLANYLWQNFLGGQTGSGPLGNVILDGIDFDIESGGSDHYDDLARALNSFSSQRKVYLSAAPQCIIPDAHLDRAIQTGLFDYVWVQFYNNPSCQYSSGNTNNLINSWNQWITVPASQIFMGLPASEAAAPSGGFVPADVLTSQVLPVIKQSSKYGGVMLWNRFNDVQNGYSNAIIGSVN

SEQ ID NO: 547 - protein, 297 aa, Vitis vinifera
  misc_feature (26)..(284): Pfam Name: Glyco_hydro_18 Pfam Description: Glycosyl hydrolases family 18
  misc_feature: Public GI ID no. 157360148
  misc_feature: Bit score of 685.5 for HMM based on sequences of Figure 45
  misc_feature: Functional Homolog Of SEQ ID NO. 501
MARTPQSTPLLISLSVLALLQTSYAGGIAIYWGQNGNEGTLTQTCNTGKYSYVNIAFLNKFGNGQTPEINLAGHCNPASNGCTSVSTGIRNCQNRGIKVMLSIGGGVGSYSLSSSNDAQNVANYLWNNFLGGQSSSRPLGDAVLDGIDFDIELGSTLHWDDLARALSGFSKRGRKVYLTAAPQCPFPDKFLGTALNTGLFDYVWVQFYNNAPCQYSSGNTNNLLNSWNRWTSSINSRIFMGLPASSAAAGSGFIPANVLTSQILPVIKRSAKYGGVMLWSKYYDDQSGYSSSIKSSV

SEQ ID NO: 548 - protein, 297 aa, Vitis vinifera
  misc_feature (26)..(284): Pfam Name: Glyco_hydro_18 Pfam Description: Glycosyl hydrolases family 18
  misc_feature: Public GI ID no. 197253305
  misc_feature: Bit score of 692.6 for HMM based on sequences of Figure 45
  misc_feature: Functional Homolog Of SEQ ID NO. 501
MARTPQSTPLLISLSVLALLQTSYAGGIAIYWGQNGNEGTLTQTCNTGKYSYVNIAFLNKFGNGQTPEINLAGHCNPASNGCTSVSTGIRNCQNRGIKVMLSIGGGAGSYSLSSSNDAQNVANYLWNNFLGGQSSSRPLGDAVLDGIDFDIELGSTLHWDDLARALSGFSKRGRKVYLTAAPQCPFPDKFLGTALNTGLFDYVWVQFYNNPPCQYSSGNTNNLLNSWNRWTSSINSRIFMGLPASSAAAGSGFIPANVLTSQILPVIKRSPKYGGVMLWSKYYDDQSGYSSSIKSSV

SEQ ID NO: 549 - DNA, 885 bp, Populus balsamifera subsp. trichocarpa
  misc_feature: Ceres Annot ID no. 1483301
  misc_feature: Encodes the peptide sequence at SEQ ID NO. 550
atggcttgccaagcaaaagctatcacccttcttctatccatcttagctgtctccttatgcaaaccctcagatggtgcaggcatcgccatctattggggtcaaaatggcaatgaaggcagcttagctgatacttgtaacacaggaaactatcaatttgtgaacgtagctttcctatctagtttcggcaatggccaatctccagtgctgaacctagcaggccattgtgaccccagcgccggtacttgcaccggcataagcaatgacattagatcttgtcaaaatcaaggaatcaaggtgctactttccattggaggtggcgcaggcagctactccctttcatcggccgacgatgcagggcaagttgcaaactatatctggaataacttccttggtggtcagtccagctcacgtccgctaggcgatgccatcctagatggggttgattttgacatcgaggcaggttcaggccagttctgggatgatcttgctagggcacttaatggctttagccaacaaaggaaggtatacttagctgcagctccacaatgcatcttccctgatgctaatctagacactgcaatcaaaactggcctctttgattacgtgtgggttcaattctataacaatcctccatgtcaatacgtaaatgatgctaccggtctcttgagtgcatggaaccaatggaccacagttcaatccaatcaaatattcctgggactacctgctgctcccgaggcagcccctagtggtggattcatccctgctgatgtgctcatttctcaggtccttccatctatcaagggttcacccaagtatggaggcgtgatgctctggagcaagcagtatgacaatgggtatagtgcagctataaagggcagtgtctag

SEQ ID NO: 550 - protein, 294 aa, Populus balsamifera subsp. trichocarpa
  misc_feature (26)..(283): Pfam Name: Glyco_hydro_18 Pfam Description: Glycosyl hydrolases family 18
  misc_feature: Ceres Annot ID no. 1483301
  misc_feature: Bit score of 686.4 for HMM based on sequences of Figure 45
  misc_feature: Functional Homolog Of SEQ ID NO. 501
MACQAKAITLLLSILAVSLCKPSDGAGIAIYWGQNGNEGSLADTCNTGNYQFVNVAFLSSFGNGQSPVLNLAGHCDPSAGTCTGISNDIRSCQNQGIKVLLSIGGGAGSYSLSSADDAGQVANYIWNNFLGGQSSSRPLGDAILDGVDFDIEAGSGQFWDDLARALNGFSQQRKVYLAAAPQCIFPDANLDTAIKTGLFDYVWVQFYNNPPCQYVNDATGLLSAWNQWTTVQSNQIFLGLPAAPEAAPSGGFIPADVLISQVLPSIKGSPKYGGVMLWSKQYDNGYSAAIKGSV

SEQ ID NO: 551 - protein, 297 aa, Vitis vinifera
  misc_feature (26)..(284): Pfam Name: Glyco_hydro_18 Pfam Description: Glycosyl hydrolases family 18
  misc_feature: Public GI ID no. 147791187
  misc_feature: Bit score of 683.8 for HMM based on sequences of Figure 45
  misc_feature: Functional Homolog Of SEQ ID NO. 501
  misc_feature (3)..(3): Xaa is any aa, unknown, or other
  misc_feature (107)..(107): Xaa is any aa, unknown, or other
  misc_feature (211)..(211): Xaa is any aa, unknown, or other
  misc_feature (271)..(271): Xaa is any aa, unknown, or other
MAXTPQSTPLLISLSVLALLQTSYAGGIAIYWGQNGNEGTLTQTCNTGKYSYVNIAFLNKFGNGQTPEINLAGHCNPASNGCTSVSTGIRNCQNRGIKVMLSIGGGXGSYSLSSSNDAQNVANYLWNNFLGGQSSSRPLGDAVLDGIDFDIELGSTLHWDDLARALSGFSKRGRKVYLTAAPQCPFPDKFLGTALNTGLFDYVWVQFYNNXPCQYSSGNTNNLLNSWNRWTSSINSRIFMGLPASSAAAGSGFIPANVLTSQILPVIKRSXKYGGVMLWSKYYDDQSGYSSSIKSSV

SEQ ID NO: 552 - DNA, 885 bp, Populus balsamifera subsp. trichocarpa
  misc_feature: Ceres Annot ID no. 1483300
  misc_feature: Encodes the peptide sequence at SEQ ID NO. 553
atggcttgccaagcaaaagctatcacccttcttctatccatcttagctgtctccttatgcaaaccctcaaatggtgcaggcatcgccatctattggggtcaagatggcaatgaaggcagcttagctgacacttgcaacacaggaaactatcaatttgtgaacgtagctttcctatctagtttcggcaatggccaatctccagtgctgaacctagcaggccattgtgaccccagcgccggtacttgcaccggcataagcaatgacattagatcttgtcaaaatcaaggaatcaaagtgctgctttccattggaggtggtgcaggcggctactccctttcatcggccgacgatgcagggcaagttgcaaactatatctggaataacttccttggtggtcagtccagctcacgtccgctaggcgatgccatcctagatggggttgattttgacatcgagtcaggttcaggccagttctgggatgatcttgctagggcacttaatggctttagccaacaaaggaaggtatacttagctgcagctccacaatgcatcttccctgatgctaatctagacactgcaatccaaactggcctctttgattacgtgtgggttcaattctataacaatccttcatgtcaatacgtaaatgatgctaccggtctcttgagtgcatggaaccaatggaccacagttcaatccaatcaaatattcctgggactacctgctgctcccgaggcagcccctagtggtggattcatccctgctgatgtgctcatttctcaggtccttccatctatcaagggttcacccaagtatggaggcgtgatgctctggagcaagcagtatgacaatgggtatagtgcagctataaagggcagtgtctag

SEQ ID NO: 553 - protein, 294 aa, Populus balsamifera subsp. trichocarpa
  misc_feature (26)..(283): Pfam Name: Glyco_hydro_18 Pfam Description: Glycosyl hydrolases family 18
  misc_feature: Ceres Annot ID no. 1483300
  misc_feature: Bit score of 680.8 for HMM based on sequences of Figure 45
  misc_feature: Functional Homolog Of SEQ ID NO. 501
MACQAKAITLLLSILAVSLCKPSNGAGIAIYWGQDGNEGSLADTCNTGNYQFVNVAFLSSFGNGQSPVLNLAGHCDPSAGTCTGISNDIRSCQNQGIKVLLSIGGGAGGYSLSSADDAGQVANYIWNNFLGGQSSSRPLGDAILDGVDFDIESGSGQFWDDLARALNGFSQQRKVYLAAAPQCIFPDANLDTAIQTGLFDYVWVQFYNNPSCQYVNDATGLLSAWNQWTTVQSNQIFLGLPAAPEAAPSGGFIPADVLISQVLPSIKGSPKYGGVMLWSKQYDNGYSAAIKGSV

SEQ ID NO: 554 - protein, 294 aa, Sphenostylis stenocarpa
  misc_feature (22)..(280): Pfam Name: Glyco_hydro_18 Pfam Description: Glycosyl hydrolases family 18
  misc_feature: Public GI ID no. 4689374
  misc_feature: Bit score of 658.7 for HMM based on sequences of Figure 45
  misc_feature: Functional Homolog Of SEQ ID NO. 501
MITPSLVPSSDPLVTAASVLEFALAVYWGENGGEGTLADTCNTQNFQFVNIAFLSTFGNGQTPQLNLAGHCDPLNNGCTGLSSDITTCQNGGVKVLLSLGGSAGSYSLNSASEATQLATYLWNNFLGVQSDSRPLGDAILDGIDFDIESGGGEHWDELVKALNDLSSQRKVYLSAAPQCIIPDQHLNSAIQTGLFDYVWVQFYNNPSCQYSSGNTNDLINSWNQWITVPATQVFMGLPASEAAAPSGGFIPLDVLISQVLPQIKQSSKYGGIMLWDRFNDIQNSYSNAIVGSVN

SEQ ID NO: 555 - protein, 290 aa, Vitis vinifera
  misc_feature (26)..(277): Pfam Name: Glyco_hydro_18 Pfam Description: Glycosyl hydrolases family 18
  misc_feature: Public GI ID no. 157349837
  misc_feature: Bit score of 675.1 for HMM based on sequences of Figure 45
  misc_feature: Functional Homolog Of SEQ ID NO. 501
MASPSPFSITFLSFIILLLVIGSDAGGIAIYWGQNGNEGTLAETCGTGNYDFVNIAFLSTFGNGQTPMINLAGHCDPYSNGCTSLSSDINSCQAKGIKVMLSLGGAAGSYYLASSEDARQVAAYLWDNFLGGKSSSRPLGEAVLDGIDFDIEGGTNQHWDELAQYLSGYSKKGKKCPFPDAWVGGALMTSLFDYVWVQFYNNPPCQYSSGNIDNLKDAWKQWNSDIPATKIFLGLPAAPEAAGSGFIPVDDLKSTVLPAIKGSSKYGGVMLWSKYYDDQTGYSSSIKSHV

SEQ ID NO: 556 - DNA, 888 bp, Populus balsamifera subsp. trichocarpa
  misc_feature: Ceres Annot ID no. 1498645
  misc_feature: Encodes the peptide sequence at SEQ ID NO. 557
atggctttcaagctctcaatttctcttgctcttcttgcaattcttgtactggtggtgggttccgaagctggtggaatagcggtttactggggtcagaacggcaatgagggcaccttggcggagacttgtgccaccggaaactacgactacgtaatcctagcgttcctcccgacttttggaaatggtcagactccgatgattaatctcgctggtcattgcgatccatacagcaatggctgcacaaaattaagcccggacataaaatcatgtcaagtcaaaggcatcaaggtgatgctctctattggaggaggagctgggagctactacctcacctcaaaggaggatgcaaagcaagtggcgaactacctttggaataacttcctgggaggaaattcttcgtctcgcccactcggcccagctgttcttgatggaattgacttcgatattgaaggagggacagaccagcactgggatgatcttgccaggttcctttcagcttatagcaagcaaggtaaaaaggtgcacctaactgcagctcctcagtgcccatttcctgatgcttgggtaggaaatgcactgcagacaggtctctttgactacgtctgggttcaattctacaacaatcctccttgccaattctccggggatattgccaatcttgaagatgcatggaagcaatggatttcaagcatcccagctcaaaaaatcttcctgggattgcctgctgctcctgatgcagctggaagtggcttcgttcctgtagctgaccttacttccaaagtgcttccagcaatcaagggctctgcaaaatatggtggtgttatgctgtggtccaagtactatgatgatcaaactggctatagtaaatcaatcaagagccgcgtctga

SEQ ID NO: 557 - protein, 295 aa, Populus balsamifera subsp. trichocarpa
  misc_feature (24)..(282): Pfam Name: Glyco_hydro_18 Pfam Description: Glycosyl hydrolases family 18
  misc_feature: Ceres Annot ID no. 1498645
  misc_feature: Bit score of 692.3 for HMM based on sequences of Figure 45
  misc_feature: Functional Homolog Of SEQ ID NO. 501
MAFKLSISLALLAILVLVVGSEAGGIAVYWGQNGNEGTLAETCATGNYDYVILAFLPTFGNGQTPMINLAGHCDPYSNGCTKLSPDIKSCQVKGIKVMLSIGGGAGSYYLTSKEDAKQVANYLWNNFLGGNSSSRPLGPAVLDGIDFDIEGGTDQHWDDLARFLSAYSKQGKKVHLTAAPQCPFPDAWVGNALQTGLFDYVWVQFYNNPPCQFSGDIANLEDAWKQWISSIPAQKIFLGLPAAPDAAGSGFVPVADLTSKVLPAIKGSAKYGGVMLWSKYYDDQTGYSKSIKSRV

SEQ ID NO: 558 - DNA, 885 bp, Populus balsamifera subsp. trichocarpa
  misc_feature: Ceres Annot ID no. 1483298
  misc_feature: Encodes the peptide sequence at SEQ ID NO. 559
atggcttgccaagcaaaagctatcacccttcttctatccatcttagctgtctccttatgcaaaccctcaaatggtgcaggcatcgccatctattggggtcaagatggcaatgaaggcagcttagctgacacttgcaacacaggaaactatcaatttgtgaacgtagctttcctatctagtttcggcaatggccaatctccagtgctgaacctagcaggccattgtgaccccagcgccggtacttgcaccggcataagcaatgacattacatcttgtcaaaatcaaggaatcaaagtgctgctttccattggaggtggtgcaggcggctactccctttcatcggccgacgatgcagggcaagttgcaaactatatctggaataacttccttggtggtcagtccagctcacgtccgctaggcgatgccatcctagatggggttgattttgacatcgagtcaggttcaggccagttctgggatgatcttgctagggcacttaatggctttagccaacaaaggaaggtatacttagctgcagctccacaatgcatcttccctgatgctaatctagacactgcaatccaaactggcctctttgattacgtgtgggttcaattctataacaatccttcatgtcaatacgtaaatgatgctaccggtctcttgagtgcatggaaccaatggaccacagttcaatccaatcaaatattcctgggactacctgctgctcccgaggcagcccctagtggtggattcatccctgccgatgtgctcatttctcaggtccttccatctatcaagggttcaccaaagtatggaggcgtgatgctctggagcaagcagtatgacaatgggtatagtgcagcaataaagggcagtgtctag

SEQ ID NO: 559 - protein, 294 aa, Populus balsamifera subsp. trichocarpa
  misc_feature (26)..(283): Pfam Name: Glyco_hydro_18 Pfam Description: Glycosyl hydrolases family 18
  misc_feature: Ceres Annot ID no. 1483298
  misc_feature: Bit score of 678.5 for HMM based on sequences of Figure 45
  misc_feature: Functional Homolog Of SEQ ID NO. 501
MACQAKAITLLLSILAVSLCKPSNGAGIAIYWGQDGNEGSLADTCNTGNYQFVNVAFLSSFGNGQSPVLNLAGHCDPSAGTCTGISNDITSCQNQGIKVLLSIGGGAGGYSLSSADDAGQVANYIWNNFLGGQSSSRPLGDAILDGVDFDIESGSGQFWDDLARALNGFSQQRKVYLAAAPQCIFPDANLDTAIQTGLFDYVWVQFYNNPSCQYVNDATGLLSAWNQWTTVQSNQIFLGLPAAPEAAPSGGFIPADVLISQVLPSIKGSPKYGGVMLWSKQYDNGYSAAIKGSV

SEQ ID NO: 560 - protein, 293 aa, Vitis vinifera
  misc_feature (26)..(282): Pfam Name: Glyco_hydro_18 Pfam Description: Glycosyl hydrolases family 18
  misc_feature: Public GI ID no. 157349845
  misc_feature: Bit score of 667.7 for HMM based on sequences of Figure 45
  misc_feature: Functional Homolog Of SEQ ID NO. 501
MAHHSLLSLALLSFFFLASISNTNAGTITVYWGQNGNEGSLADTCSSGYYGIVNIAFLVVFGNNQTPQLNLAGHCDPTSSGCTWLSDDIKACQDQGIKVLLSIGGASGSYTLISAEDAREVANYLWNNFFGGQSSSRPLGDAVLDGIDFDIEGGTTQHWDELAKALSEFSGQRKVYLSAAPQCPFPDAWLGTAIATGLFDYVWVQFYNNPPCQYSGNADNLINSWNQWTTIEAGQVFLGLPAASAAAGSGYIEPDVLVSQVLPSIKTSPKYGGVMLWSRYYDNGYSAAILSSV

SEQ ID NO: 561 - DNA, 897 bp, Populus balsamifera subsp. trichocarpa
  misc_feature: Ceres Annot ID no. 1471220
  misc_feature: Encodes the peptide sequence at SEQ ID NO. 562
atggcagtactaacaacaacttcaatgccattcctcgtcttagtaatgttactgctagcaacgggttcaaatgcaggtggcatcactatttattggggccagaatggaaatgagggtaccttggcagagacttgtgccacaggattatatgagtttgttaacattgcttttctttccagttttggtagcggtcgtaaccccatgatgaaccttgccggtcactgcgatccatacagtaaaggttgcacaggcttaagctctgacatagaatcatgtcaatccaaaggaattaagctgatgctttctatcggaggaggttccggaagctactccctggcctcctctgatgacgcaagacaagtcgccacttatatctggaacaacttcttgggtggacaatcttcatttcgtccgctcggccctgctgttctagatggagttgactttgatattgaaggaggaacagacctgtactgggatgatcttgcaaggtacctttcagcatacagcaatcaaggaaaaaaggtgtacctaacggcagcaccccagtgcccatttcctgatgcgtctgtaggaaatgccctcaaaacaggtctttttgactatgtttgggtccaattctacaacaaccctccttgtcagtacacatccggtgacattaccaatctcgaagatgcatggaagctatgggtttcagacattccagccactgtgtttttcctaggattacctgcttctcctgaggcagcaggaagtggcttcattcctgtacctgatttaacttccaatgtgcttccagccatcaaggggtctgataagtatggcggtgtgatgctgtggtctaagtactatgatgatcaaagtggatacagctcttccatcaaggccgatgtctaa

SEQ ID NO: 562 - protein, 283 aa, Populus balsamifera subsp. trichocarpa
  misc_feature (11)..(270): Pfam Name: Glyco_hydro_18 Pfam Description: Glycosyl hydrolases family 18
  misc_feature: Ceres Annot ID no. 1471220
  misc_feature: Bit score of 657.3 for HMM based on sequences of Figure 45
  misc_feature: Functional Homolog Of SEQ ID NO. 501
MLLLATGSNAGGITIYWGQNGNEGTLAETCATGLYEFVNIAFLSSFGSGRNPMMNLAGHCDPYSKGCTGLSSDIESCQSKGIKLMLSIGGGSGSYSLASSDDARQVATYIWNNFLGGQSSFRPLGPAVLDGVDFDIEGGTDLYWDDLARYLSAYSNQGKKVYLTAAPQCPFPDASVGNALKTGLFDYVWVQFYNNPPCQYTSGDITNLEDAWKLWVSDIPATVFFLGLPASPEAAGSGFIPVPDLTSNVLPAIKGSDKYGGVMLWSKYYDDQSGYSSSIKADV

SEQ ID NO: 563 - protein, 311 aa, Hevea brasiliensis
  misc_feature (27)..(286): Pfam Name: Glyco_hydro_18 Pfam Description: Glycosyl hydrolases family 18
  misc_feature: Public GI ID no. 3451147
  misc_feature: Bit score of 665.9 for HMM based on sequences of Figure 45
  misc_feature: Functional Homolog Of SEQ ID NO. 501
MAKRTQAILLLLLAISLIMSSSHVDGGGIAIYWGQNGNEGTLTQTCSTRKYSYVNIAFLNKFGNGQTPQINLAGHCNPAAGGCTIVSNGIRSCQIQGIKVMLSLGGGIGSYTLASQADAKNVADYLWNNFLGGKSSSRPLGDAVLDGIDFDIEHGSTLYWDDLARYLSAYSKQGKKVYLTAAPQCPFPDRYLGTALNTGLFDYVWVQFYNNPPCQYSSGNINNIINSWNRWTTSINAGKIFLGLPAAPEAAGSGYVPPDVLISRILPEIKKSPKYGGVMLWSKFYDDKNGYSSSIRDSVLFLHSEKCMTVL

SEQ ID NO: 564 - DNA, 1171 bp, Glycine max
  misc_feature: Ceres Clone ID no. 536756
  misc_feature: Encodes the peptide sequence at SEQ ID NO. 565
gaaaccaagaagctaattaacaaaacaaattaagtaataaattacttatcatagaaacatggcagccctcaaacaagtttcatccctcttgctattccctttgtttctcattttttccctattcaaatcctctcatgctggtgggattgcagtctattggggtcaaaacggcaatgaaggctccttggaagaagcttgcaacactgacaactaccaatatgtgaacataggtttcttgaacgtttttggcaacaaccaaatcccacaactaaaccttgcaggccattgtaatccaagcaccaacgagtgcaccggattaagcaatgacatcaatgtatgccaaagcaaaggaatcaaagtgtttctctcccttggaggcgccgttggaagctactctctcaactcggcttctgaagccacagaccttgcagcgtacctatgggataacttccttggaggacaatcaaattcacgtccatttggtgatgctgtgttggatggcatagactttgacatcgaagatggttcaggccaatactatggtgaccttgcaagagaacttgatgcttatagccaacaaagaaaagtgtacttggctgctgcaccacaatgtccataccctgatgctcacttggattcggctattgcaactggcctttttgattatgtgtgggttcagttctacaacaatcctcaatgccattatacttcagggaacattgataacctagttagtgcatggaaccagtggacctcaagtgaagctaaacaagtgtttttggggctacctgcatctgaggcagctgctccaagtggtggttatattcctcctgatgtgctaatttctgatgttcttcctgctatcagcggctctcccaagtacggtggagtcatgatttgggacagattcaatgacggccaaagcggatacagtgatgctattaaggccagtgtttaattagtttgattatatgttaagtaatgcaattagttaatcttcggaataagtagcacgtttggtaggctttgttcctgcatgtygagtgctatgtgatcagataagatatttttagttagtttttaatttttttaaaataatttttaatgtttttttagtcactgcttgaaatagcattataatgttatcttagatttatgggtctctacactt

SEQ ID NO: 565 - protein, 299 aa, Glycine max
  misc_feature (28)..(286): Pfam Name: Glyco_hydro_18 Pfam Description: Glycosyl hydrolases family 18
  misc_feature: Ceres Clone ID no. 536756
  misc_feature: Bit score of 679.3 for HMM based on sequences of Figure 45
  misc_feature: Functional Homolog Of SEQ ID NO. 501
MAALKQVSSLLLFPLFLIFSLFKSSHAGGIAVYWGQNGNEGSLEEACNTDNYQYVNIGFLNVFGNNQIPQLNLAGHCNPSTNECTGLSNDINVCQSKGIKVFLSLGGAVGSYSLNSASEATDLAAYLWDNFLGGQSNSRPFGDAVLDGIDFDIEDGSGQYYGDLARELDAYSQQRKVYLAAAPQCPYPDAHLDSAIATGLFDYVWVQFYNNPQCHYTSGNIDNLVSAWNQWTSSEAKQVFLGLPASEAAAPSGGYIPPDVLISDVLPAISGSPKYGGVMIWDRFNDGQSGYSDAIKASV

SEQ ID NO: 566 - protein, 292 aa, Trichosanthes kirilowii
  misc_feature (26)..(281): Pfam Name: Glyco_hydro_18 Pfam Description: Glycosyl hydrolases family 18
  misc_feature: Public GI ID no. 15553476
  misc_feature: Bit score of 659.4 for HMM based on sequences of Figure 45
  misc_feature: Functional Homolog Of SEQ ID NO. 501
MAAHKITTALSVIFLLAPIFQSSHAAGIAIYWGQNGNEGSLSFTCSTGNYQFVNIAFLSSFGSGRTPVLNLAGHCNPSNNGCAFLSSQIKACQSRGIKVLLSIGGGAGSYSLSSADDARQVANFIWNNFLGGRSSSRPLGDAVLDGVDFDIESGSGQFWDTLARQLKGLGRVLLAAAPQCPIPDAHLDAAIKTGLFDFVWVQFYNNPPCMFANGKANNLLNSWNRWLSFPVGKLFMGLPAAAAAAPSGGFIPANVLISQVLPKIKTSPKYGGVMLWSKFFDNGYSNAIKGSL

SEQ ID NO: 567 - DNA, 1111 bp, Triticum aestivum
  misc_feature: Ceres Clone ID no. 630327
  misc_feature: Encodes the peptide sequence at SEQ ID NO. 568
atagtagctccattccaagtttccaacttccaacagaacaaagatggcgagcagacagtttccggcaatgctgctgctcaccgcggtgacaatggccggactggccgccggagcgcgcgcgggcggcatcgcgatctactggggccagaacggcaacgagggcacgctggcgcaggcgtgcgcgacgggaaactacaagttcgtcaacgtggccttcctcttcaccttcggcaagggccagaagccgctgctgaacctggccgggcactgcgacccggcgaccagcggctcgtgcaccttcgtgggcgccgacgtcaagtcctgccagagccgcggcatcaaggtcctgctctccatcggcggcggcgtcggcagctacggcctctcgtccgccgccgacgccaagcaggtcgcggagtacctctgggagaactacctcggcggcacgtcgacgacgaggcccctcggcgacgcggtcctcgacggcgtcgacttcgacatcgagagcggcgggagcgcgcactgggacgacctggcgcgggagctcaagaagtactcggggaagggaagcgcctacaagccggtgtacctggcggcggcgccgcagtgcccgttcccggacgcgatgctcggcgggctcggcggcgcgttcggcacggggctgttcgactacgtgtgggtgcagttctacaacaacccgccgtgccagtacaccaaggccggcggggcgggcaacctggcgagcgcgtggcagcagtgggcgtcgataccggcgcggcaggtgttcctggggctcccggcggcgcccgcggccgccggcagcgggttcgtggagccgagcgacctgctgtctgaggtgctgccggtggtgcagaagtcgccgaagtacggcgggatcatgctgtggtcgaggttcttcgatgggcaaacggggttcagcgataaggtcaagtccagcgtgtgagctgatattgttaactgcgtcagtcaggggcacgtccgatcaacatgccgacgtgcgaatactgcgtgtaaaattgtatcttatccagaaacacaataagatggcagaattgtatgacatgatttgagattgtattttgtgtatccc

SEQ ID NO: 568 - protein, 298 aa, Triticum aestivum
  misc_feature (19)..(285): Pfam Name: Glyco_hydro_18 Pfam Description: Glycosyl hydrolases family 18
  misc_feature: Ceres Clone ID no. 630327
  misc_feature: Bit score of 602.4 for HMM based on sequences of Figure 45
  misc_feature: Functional Homolog Of SEQ ID NO. 501
MLLLTAVTMAGLAAGARAGGIAIYWGQNGNEGTLAQACATGNYKFVNVAFLFTFGKGQKPLLNLAGHCDPATSGSCTFVGADVKSCQSRGIKVLLSIGGGVGSYGLSSAADAKQVAEYLWENYLGGTSTTRPLGDAVLDGVDFDIESGGSAHWDDLARELKKYSGKGSAYKPVYLAAAPQCPFPDAMLGGLGGAFGTGLFDYVWVQFYNNPPCQYTKAGGAGNLASAWQQWASIPARQVFLGLPAAPAAAGSGFVEPSDLLSEVLPVVQKSPKYGGIMLWSRFFDGQTGFSDKVKSSV

SEQ ID NO: 569 - DNA, 912 bp, Sorghum bicolor
  misc_feature: Ceres Annot ID no. 8669695
  misc_feature: Encodes the peptide sequence at SEQ ID NO. 570
atggctagaataagcaacatcccgtcgtctctgccactgctattggccacggcgtttgcattggccggggtcaccgccggagcgcgcaccggcggcatcgccatctactggggccagaacggcaacgaggggacgctggcgcagacctgcgccacgggcaactacaagttcgtcaacgtggcgttcctccccacgttcggcaagggccagacgccggtgctgaacctggccggccactgcgacccggcgagcaacgggtgcacgggcgtgggcgcggacatcattgcgtgccagcggatgggcatcaaggtcctgctctccatcggcggcggagtcggcagctacgggctctcgtcccgggacgacgcgaggaccgtcgcggcgtacctctggaacaactacctcggcggccggtccaagtccaggcccctcggcgacgccgtcctcgacggcatcgacttcgacatcgagagcggcgggagcatgtactgggacgacctggccaggttcctcaagtcctactcccggcacgggcggaaggtgtacctggccgcggcgccgcagtgcccgttcccggacgcgtcgctgggcacggcgctcggcacggggctgttcgactacgtgtgggtgcagttctacaacaacccgccgtgccagtacagcgcgagcgccggcgtgggcggcctggcgagcgcgtgggcgcagtggacgcccatcagggccggccgggtgttcctcggcctcccggccgcgccacaggccgcgggcagcgggttcgtgccggcgagcgacctcgtggcgcaggtgctgccggtggtcaagaactccaccaagtacgggggaatcatgctctggtccaggtactacgacgggctcacggggtacagcgacgcggtcaagtcccaagtgtga

SEQ ID NO: 570 - protein, 303 aa, Sorghum bicolor
  misc_feature (31)..(290): Pfam Name: Glyco_hydro_18 Pfam Description: Glycosyl hydrolases family 18
  misc_feature: Ceres Annot ID no. 8669695
  misc_feature: Bit score of 630.5 for HMM based on sequences of Figure 45
  misc_feature: Functional Homolog Of SEQ ID NO. 501
MARISNIPSSLPLLLATAFALAGVTAGARTGGIAIYWGQNGNEGTLAQTCATGNYKFVNVAFLPTFGKGQTPVLNLAGHCDPASNGCTGVGADIIACQRMGIKVLLSIGGGVGSYGLSSRDDARTVAAYLWNNYLGGRSKSRPLGDAVLDGIDFDIESGGSMYWDDLARFLKSYSRHGRKVYLAAAPQCPFPDASLGTALGTGLFDYVWVQFYNNPPCQYSASAGVGGLASAWAQWTPIRAGRVFLGLPAAPQAAGSGFVPASDLVAQVLPVVKNSTKYGGIMLWSRYYDGLTGYSDAVKSQV

SEQ ID NO: 571 - DNA, 897 bp, Populus balsamifera subsp. trichocarpa
  misc_feature: Ceres Annot ID no. 1471240
  misc_feature: Encodes the peptide sequence at SEQ ID NO. 572
atgagtcccagattttctgcaaaatgtgcaattctcttccatgcaacacttcttgctttggctttcaaagcaaaagctggaagcatagtggtttattggggccaagatgcgagggaaggcacgctcacagatacatgtgcctcagggaaatatggcatcgtgaacatagcctttctctcagtttttggcaatggcaaaaaaccgcaggtcaacttagccggtcactgtgacccatcctcaaatggctgccaaagagtaagcagaggcatccataactgccaaaaccaaggcattaaagttatgctttccattggtggtggatctggtggctacaccttaacttcacctgatgaagctaggggtgtagcagaatatttatggaacaacttccttagtggaaactcgaattcaaggccactaggcgatgccattttggacggcatagattttgacatagagggaggggaacgtcactatgtagttctcgcttctagattgtccgagctcagccgaggaggcaggaaagtgtacttgacagctgcaccgcagtgtccttttcccgacaattggcttgataaggcacttcagacgggacttttcgattatgtatgggtccaattttacaacaaccctcagtgtgagtataacactaacaatcctcagagctttaaggactcatggaacaaatggacatcttctattccggccaggaagttttttgtggggcttccggcttctagggcggctgctggcaatggttttgtgacaactgatgtgctcaaatcgcaagtgctaccttttgtccaaggttcccccaagtatggcggtgtcatgctctggaacaagtatagtgatgatcaaagtggatacagttccaggatcagggatagtgtttga

SEQ ID NO: 572 - protein, 298 aa, Populus balsamifera subsp. trichocarpa
  misc_feature (27)..(285): Pfam Name: Glyco_hydro_18 Pfam Description: Glycosyl hydrolases family 18
  misc_feature: Ceres Annot ID no. 1471240
  misc_feature: Bit score of 598.7 for HMM based on sequences of Figure 45
  misc_feature: Functional Homolog Of SEQ ID NO. 501
MSPRFSAKCAILFHATLLALAFKAKAGSIVVYWGQDAREGTLTDTCASGKYGIVNIAFLSVFGNGKKPQVNLAGHCDPSSNGCQRVSRGIHNCQNQGIKVMLSIGGGSGGYTLTSPDEARGVAEYLWNNFLSGNSNSRPLGDAILDGIDFDIEGGERHYVVLASRLSELSRGGRKVYLTAAPQCPFPDNWLDKALQTGLFDYVWVQFYNNPQCEYNTNNPQSFKDSWNKWTSSIPARKFFVGLPASRAAAGNGFVTTDVLKSQVLPFVQGSPKYGGVMLWNKYSDDQSGYSSRIRDSV

SEQ ID NO: 573 - protein, 311 aa, Hevea brasiliensis
  misc_feature (27)..(286): Pfam Name: Glyco_hydro_18 Pfam Description: Glycosyl hydrolases family 18
  misc_feature: Public GI ID no. 20981684
  misc_feature: Bit score of 662.3 for HMM based on sequences of Figure 45
  misc_feature: Functional Homolog Of SEQ ID NO. 501
MAKRTQAILLLLLAISLIMSSSHVDGGGIAIYWGQNGNEGTLTQTCSTRKYSYVNIAFLNKFGNGQTPQINLAGHCNPAAGGCTIVSNGIRSCQIQGIKVMLSLGGGIGSYTLASQADAKNVADYLWNNFLGGKSSSRPLGDAVLDGIDFDIEHGSTLYWDDLARYLSAYSKQGKKVYLTAAPQCPFPDRYLGTALNTGLFDYVWVQFYNNPPCQYSSGNINNIINSWNRWTTSINAGKIFLGLPAAPEAAGSGYVPPDVLISRILPEIKKSPKYGGVMLWSKFYDDKNGYSSSILDSVLFLHSEECMTVL

SEQ ID NO: 574 - DNA, 891 bp, Populus balsamifera subsp. trichocarpa
  misc_feature: Ceres Annot ID no. 1483302
  misc_feature: Encodes the peptide sequence at SEQ ID NO. 575
atggccaaatattctcaagccaccctgcttctccttcctctcctggtccttttgctaattaaatcctctcatgctgctggtgggatttcaatctactggggtcaaaatggcaatgaaggaactctagcacaaacatgtgccacgggaagatatgcttatgttaacatagcttttctcaacaagtttggcaatggtcaaaccccagaaatgaaccttgctggacattgcaacccagcaaacggtggctgtacaattgtcagcggtggcatcaaaagttgtcagcagcaagggattaaggtgctgctttctctcggtggtggcattggaaactattctctagcctctaaaggtgatgccaaaaacgtagcagattacttgtggaacaatttcttaggtggacaatcatcttctcgtcctctaggtgatgctgttcttgatggcattgattttgacatcgagcaaggatcaactctatattgggaggatcttgctcgtttcttatctaaatatggaagaaaagtgtatttagcagcagctcctcagtgtccattcccagacagtaatttagggactgcccttaatactggtctttttgactatgtctgggtccaattctacaacaaccgtccttgccagtatagttcaggtaacacaactaacctcttaaattcatggaatcgttggactacatcaatagacgcaggaaagatatttctaggcttgccggcagctccttcggcagccggaagcgggtacattccaccagatgtgttgacttctcaaattcttccggtgataaagaagtcacccaagtatggaggtgtcatgctttggtcaaagtactgggatgatcagaatgggtacagtccctccattatcagcagtgtatga

SEQ ID NO: 575 - protein, 296 aa, Populus balsamifera subsp. trichocarpa
  misc_feature (27)..(283): Pfam Name: Glyco_hydro_18 Pfam Description: Glycosyl hydrolases family 18
  misc_feature: Ceres Annot ID no. 1483302
  misc_feature: Bit score of 671.3 for HMM based on sequences of Figure 45
  misc_feature: Functional Homolog Of SEQ ID NO. 501
MAKYSQATLLLLPLLVLLLIKSSHAAGGISIYWGQNGNEGTLAQTCATGRYAYVNIAFLNKFGNGQTPEMNLAGHCNPANGGCTIVSGGIKSCQQQGIKVLLSLGGGIGNYSLASKGDAKNVADYLWNNFLGGQSSSRPLGDAVLDGIDFDIEQGSTLYWEDLARFLSKYGRKVYLAAAPQCPFPDSNLGTALNTGLFDYVWVQFYNNRPCQYSSGNTTNLLNSWNRWTTSIDAGKIFLGLPAAPSAAGSGYIPPDVLTSQILPVIKKSPKYGGVMLWSKYWDDQNGYSPSIISSV

SEQ ID NO: 576 - protein, 301 aa, Vitis vinifera
  misc_feature (26)..(288): Pfam Name: Glyco_hydro_18 Pfam Description: Glycosyl hydrolases family 18
  misc_feature: Public GI ID no. 1705812
  misc_feature: Bit score of 674.7 for HMM based on sequences of Figure 45
  misc_feature: Functional Homolog Of SEQ ID NO. 501
MARTPQSTPLLISLSVLALLQTSYAGGIAIYWGQNGNEGTLTQTCNTGKYSYVNIAFLNKFGNGQTPEINLAGHCNPASNGCTSVSTGIRNCQNRGIKVMLSIGGGAGSYSLSSSNDAQNVANYLWNNFLGGQSSSRPLGDAVLDGIDFDIELGSTLHWDDLARALSRIEFQQERGRKVYLTAAPQCPFPDKVPGTALNTGLFDYVWVQFYNNPPCQYSSGNTNNLLNSWNRWTSSINSTGSFMGLPASSAAAGRGFIPANVLTSQILPVIKRSPKYGGVMLWSKYYDDQSGYSSSIKSSV

SEQ ID NO: 577 - protein, 298 aa, Casuarina glauca
  misc_feature (26)..(285): Pfam Name: Glyco_hydro_18 Pfam Description: Glycosyl hydrolases family 18
  misc_feature: Public GI ID no. 119393870
  misc_feature: Bit score of 679.0 for HMM based on sequences of Figure 45
  misc_feature: Functional Homolog Of SEQ ID NO. 501
MAFCTTLPMSFLFLGMLMLATRANAGGIAIYWGQNGNEGTLAETCSTGNYNFVIIAFLPTFGDGQTPMVNLAGHCDPCSNGCISLSSDIKSCQAKGIKVMLSLGGGAGSYYLSSSKDAKQVATYLWNNFLGGQSSSRPFGPVILDGIDFDIEGGTNKHWDELARYLSRYSNQGKKVYLTAAPQCPFPDTWIENALKTGLFDYVWVQFYNNPPCQYSSGELANLEDAWKQWTSDIPTNKIFLGLPASPEAAGSGYIPVADLTSNVLPAIKGSSKYGSVMLWSKYYDDQSGYSTAIKGHV

SEQ ID NO: 578 - DNA, 1054 bp, Glycine max
  misc_feature: Ceres Clone ID no. 631157
  misc_feature: Encodes the peptide sequence at SEQ ID NO. 579
acaagacaccaaagggtgaagaaaaagcaaaaacactgaatacaccaaaaatggccaaaagcaaaaactgtcatgctttgcctcttctccttgccctgatcctcttcttcactcttcttggaacctctcacgcaggtggcatagccatctactgggggcaaaatggtaacgagggcaccctctcagaagcatgtgcaacaggcaaatacacccacataaacatagcctttctcaacaaattcggcaatggccaaaccccagaaatgaacctggctggtcactgcaaccccgcaaccaattcctgcacaaagttcagctccgaaatcaaggactgccaaagcaaagggatcaaggtgttactttcaataggtggtggcattggaagctacactttggcttcagtagaagatgcaagaaacgtttcaacttttctgtggaacactttcttgggaggcaagtcatcatcatcttcaaggccactaggtgatgctgtgttggatggcatagactttgacattgaacttggttcaacacaaaactatgagcaccttgcacgttttcttaaggcgtatagtggggttggcgggaagagggtgtacctaggtgctgctcctcagtgtccaattcctgatagatttttgggcactgcccttaacactggcctttttgactttgtttgggttcagttytacaataaccctccgtgtcagtatgctaatgggaacataactaaccttgtgagttyttggaaccggtggactagtacggtgcctgccgggaagatatttttagggttgccggccgatccggccgctgctggcagcggtttcattccggctgacacgttgacttytgagatcctgcctgtgattaaggagtcgccaaaatatggtggggtgatgctgtggtcaagattctttgatgtccagaacgggtatggtacttcaattattggcagcgtgtgaagaatggttgcaattagccaatgattttttattttcaagttgtgattttgaaagtaataactactaggaaaagaataatgtacttttgg

SEQ ID NO: 579 - protein, 304 aa, Glycine max
  misc_feature (29)..(291): Pfam Name: Glyco_hydro_18 Pfam Description: Glycosyl hydrolases family 18
  misc_feature: Ceres Clone ID no. 631157
  misc_feature: Bit score of 639.6 for HMM based on sequences of Figure 45
  misc_feature: Functional Homolog Of SEQ ID NO. 501
  misc_feature (213)..(213): Xaa is any aa, unknown, or other
  misc_feature (232)..(232): Xaa is any aa, unknown, or other
  misc_feature (268)..(268): Xaa is any aa, unknown, or other
MAKSKNCHALPLLLALILFFTLLGTSHAGGIAIYWGQNGNEGTLSEACATGKYTHINIAFLNKFGNGQTPEMNLAGHCNPATNSCTKFSSEIKDCQSKGIKVLLSIGGGIGSYTLASVEDARNVSTFLWNTFLGGKSSSSSRPLGDAVLDGIDFDIELGSTQNYEHLARFLKAYSGVGGKRVYLGAAPQCPIPDRFLGTALNTGLFDFVWVQXYNNPPCQYANGNITNLVSXWNRWTSTVPAGKIFLGLPADPAAAGSGFIPADTLTXEILPVIKESPKYGGVMLWSRFFDVQNGYGTSIIGSV

SEQ ID NO: 580 - protein, 297 aa, Medicago truncatula
  misc_feature (28)..(284): Pfam Name: Glyco_hydro_18 Pfam Description: Glycosyl hydrolases family 18
  misc_feature: Public GI ID no. 33562679
  misc_feature: Bit score of 675.2 for HMM based on sequences of Figure 45
  misc_feature: Functional Homolog Of SEQ ID NO. 501
MKMELKSTISFTFFSLLVLALANGSNAGKIAMYRGQNGNEGTLAEACATENYEYVIIAFLPTFGDGQTPMINLAGHCDPYSNGCTGLSSDIKSCQAKGIKVLLSIGGGAGSYSIASTKDANSVATYLWNNFLGGKSSSRPLGPAVLDGIDFDIEGGSSQHWGDLARYLKGFNKKVYITAAPQCPFPDAWIGNALTTGLFDYVWVQFYNNPPCQYNPDAFMNFEDAWKQWTSGIPANKIFLGLPASPTAAGSGFISADDLTSTVLPVIKGSSKYGGVMLWSRYDDVQSGYSSSIKSHV

SEQ ID NO: 581 - protein, 292 aa, Ficus awkeotsang
  misc_feature (20)..(279): Pfam Name: Glyco_hydro_18 Pfam Description: Glycosyl hydrolases family 18
  misc_feature: Public GI ID no. 33323055
  misc_feature: Bit score of 630.6 for HMM based on sequences of Figure 45
  misc_feature: Functional Homolog Of SEQ ID NO. 501
MILVFLLLQALASIKASHAGGIAIYWGQNGNEGTLSQTCATGKYSIVNIAFLNIFGNGQTPQINLAGHCNPALKTCTVISDGIRSCQSRGIKVMLSIGGGIGRYSLSSAMDAKNVADYLWNNFLGGKSLSRPLGDAVLDGIDFDIELGSTKYWDSLARYLKGYSNLERPVYLTAAPQCPFPDRFLGNALNTGLFDYVWVQFYNNPPCQYRSGAVDGLLNSWSKWTTSISAGRIFLGLPAAPQAAGSGYIPPNVLTSEILPAIQKSPKYGGVMLWSKYYDDKNGYSSIIFQSV

SEQ ID NO: 582 - protein, 296 aa, Oryza sativa subsp. indica
  misc_feature (21)..(283): Pfam Name: Glyco_hydro_18 Pfam Description: Glycosyl hydrolases family 18
  misc_feature: Public GI ID no. 125528455
  misc_feature: Bit score of 621.9 for HMM based on sequences of Figure 45
  misc_feature: Functional Homolog Of SEQ ID NO. 501
MQMLIMVVVALAGLAAGARAGDIAIYWGQNGNEGTLAQTCATGNYRFVIVAFLPVFGKGQTPVLNLAGHCDPASNGCTGVGADIKSCQSLGIKVMFSIGGGVGNYGLSSRDDAKQVAAYLWNNYLGGTSPSRPLGDAVMDGIDFDIESGGGMYWDDLARYLKAYSRQGSSKKPVYLTAAPQCPFPDASLGVALSTGLFDYVWVQFYNNPPCQYSSSNGVGNLASAWKQWTSIPAGRVFLGLPAAAAAAGSGFVETSDLVSKVLPVVKKSPKYGGIMLWSRYYDGLTGYSDKVKSSV

SEQ ID NO: 583 - protein, 297 aa, Vitis vinifera
  misc_feature (26)..(284): Pfam Name: Glyco_hydro_18 Pfam Description: Glycosyl hydrolases family 18
  misc_feature: Public GI ID no. 147805131
  misc_feature: Bit score of 655.4 for HMM based on sequences of Figure 45
  misc_feature: Functional Homolog Of SEQ ID NO. 501
MARTPQSTPLLISLSVLAFLQTTYAGGIAIYWGQNGNEGTLTQTCNTGKYSYVNIAFLNKFGNGQTPEINLAGHCDSASNGCTSVSTDISNCQSQGVKVMLSIGGAIGSYSLSSSDDAQNVANYLWNNFLGGRSSSRPLGDAVLDGIDFVILLGSTQYWDDLARALSGFSQRGRKVYLTAAPQCPFPDKFMGTALNTGRFDNVWVQFYNNPPCQYTSGNTTNLLNSWNRWTSSINSRIFLGLPAASAAAGSGFILPNVLTSQILPVIKTSPKYGGVMLWSKYYDDQSGYSSTIKSSV

SEQ ID NO: 584 - protein, 297 aa, Vitis vinifera
  misc_feature (26)..(284): Pfam Name: Glyco_hydro_18 Pfam Description: Glycosyl hydrolases family 18
  misc_feature: Public GI ID no. 147860736
  misc_feature: Bit score of 649.6 for HMM based on sequences of Figure 45
  misc_feature: Functional Homolog Of SEQ ID NO. 501
MARTPQSIPLLISLSVLAFLQTSYAGGIAIYWGQNGNEGTLTQTCNTGKYSYVNIAFLNKFGNGRTPAINLAGHCNSASNGCTSVSNGIRNCQNRGTKVMLSIGGGVGNYSLSSSYDAQKVANYLWNNFLGGKSSSRPLGDAVLDGVDFDIELGSTQYWDNLARALSGFSKRGRKVYLTAAPQCPFQDRFLGPALNTGLFDYVWVQFYNNPPCQYTTGNTNKLLNSWNRWTSSINSRIFLGLPASSAAAGSGFIPANVLTSRILPVIKRSAKYGGVMLWSKYYDDQSGYSSSIKSRV

SEQ ID NO: 585 - protein, 305 aa, Oryza sativa subsp. japonica
  misc_feature (30)..(292): Pfam Name: Glyco_hydro_18 Pfam Description: Glycosyl hydrolases family 18
  misc_feature: Public GI ID no. 115441185
  misc_feature: Bit score of 632.3 for HMM based on sequences of Figure 45
  misc_feature: Functional Homolog Of SEQ ID NO. 501
MMTSRMFSAMQMLIMVVVALAGLAAGARAGDIAIYWGQNGNEGTLAQTCATGNYRFVIVAFLPVFGKGQTPVLNLAGHCDPASNGCTGVGADIKSCQSLGIKVMFSIGGGVGNYGLSSRDDAKQVAAYLWNNYLGGTSPSRPLGDAVMDGIDFDIESGGGMYWDDLARYLKAYSRQGSSKKPVYLTAAPQCPFPDASLGVALSTGLFDYVWVQFYNNPPCQYSSSNGVGNLASAWKQWTSIPAGRVFLGLPAAAEAAGSGFVETSDLVSKVLPVVKKSPKYGGIMLWSRYYDGLTGYSDKVKSSV

SEQ ID NO: 586 - protein, 297 aa, Vitis vinifera
  misc_feature (26)..(284): Pfam Name: Glyco_hydro_18 Pfam Description: Glycosyl hydrolases family 18
  misc_feature: Public GI ID no. 10880383
  misc_feature: Bit score of 655.8 for HMM based on sequences of Figure 45
  misc_feature: Functional Homolog Of SEQ ID NO. 501
MARTPQSTPLLISLSVLAFLQTTYAGGIAIYWGQNGNEGTLTQTCNTGKYSYVNIAFLNKFGNGQTPEINLAGHCDSASNGCTSVSTDISNCQSQGVKVMLSIGGAIGSYSLSSSDDAQNVANYLWNNFLGGRSSSRPLGDAVLDGIDFVILLGSTQYWDDLARALSGFSQRGRKVYLTAAPQCPFPDKFMGTALNTGRFDNVWAQFYNNPPCQYTSGNTTNLLNSWNRWTSSINSRIFLGLPAASAAAGSGFIPPNVLTSQILPVIKTSPKYGGVMLWSKYYDDQSGYSSTIKSSV

SEQ ID NO: 587 - protein, 296 aa, Oryza sativa subsp. japonica
  misc_feature (21)..(283): Pfam Name: Glyco_hydro_18 Pfam Description: Glycosyl hydrolases family 18
  misc_feature: Public GI ID no. 125572708
  misc_feature: Bit score of 622.6 for HMM based on sequences of Figure 45
  misc_feature: Functional Homolog Of SEQ ID NO. 501
MQMLIMVVVALAGLAAGARAGDIAIYWGQNGNEGTLAQTCATGNYRFVIVAFLPVFGKGQTPVLNLAGHCDPASNGCTGVGADIKSCQSLGIKVMFSIGGGVGNYGLSSRDDAKQVAAYLWNNYLGGTSPSRPLGDAVMDGIDFDIESGGGMYWDDLARYLKAYSRQGSSKKPVYLTAAPQCPFPDASLGVALSTGLFDYVWVQFYNNPPCQYSSSNGVGNLASAWKQWTSIPAGRVFLGLPAAAEAAGSGFVETSDLVSKVLPVVKKSPKYGGIMLWSRYYDGLTGYSDKVKSSV

SEQ ID NO: 588 - DNA, 930 bp, Populus balsamifera subsp. trichocarpa
  misc_feature: Ceres Annot ID no. 1467380
  misc_feature: Encodes the peptide sequence at SEQ ID NO. 589
atgaagtcagcaaactcggcttggagacctcgctctagttttatgtatacagctagccactgttgctttccttggtcctttttactaaataaatcctctcatgctgctggtggaatttcaatctactggggtcaaaatggaaatgaagggactctagcacaaacatgtgccacaggaagatatgcttatgttaacatagccttcctcaacaaatttggcaatggtcaaccccccgaaatgaaccttgctggtcattgcaacccggcgaacggtggctgtaaaattgtcagcagtggcatcaaaagttgccagcagcaaggaattaaggtgctgctttctcttggtggtagcattggaaattatactctagcctctaaggatgatgccagaggtgtcgcagattatttatggaacaatttcttaggcggtcgatcatcttctcgtcctctaggtgatgcggtgttggatggcattgattttggcatagggcaaggttcaacactgtattgggaggatctggcacgtttcctatctaaatatggcgagcaaggaagaaaggtgtatttagcagcagctcctcagtgtcccttcccggatagaaatttggggactgcccttaacactggactttttgactatgtttgggtccaattctatagcaacggtccttgccagtatagttcaggcaacactactaacctcataaactcttggaatcagtgggctgcatcattagttgcaggaacaatatttctagggttgccagcagctcctgcagcagccagaagggggtacattccaccggatgtgttgacttctcaaatacttccggtgataaagatggcaccaaagtatggtggtgttatgctttggtcaaagttttgggatgataggaacgggtacagtcgctccattctgagcagtgtatga

SEQ ID NO: 589 - protein, 309 aa, Populus balsamifera subsp. trichocarpa
  misc_feature (37)..(296): Pfam Name: Glyco_hydro_18 Pfam Description: Glycosyl hydrolases family 18
  misc_feature: Ceres Annot ID no. 1467380
  misc_feature: Bit score of 607.8 for HMM based on sequences of Figure 45
  misc_feature: Functional Homolog Of SEQ ID NO. 501
MKSANSAWRPRSSFMYTASHCCFPWSFLLNKSSHAAGGISIYWGQNGNEGTLAQTCATGRYAYVNIAFLNKFGNGQPPEMNLAGHCNPANGGCKIVSSGIKSCQQQGIKVLLSLGGSIGNYTLASKDDARGVADYLWNNFLGGRSSSRPLGDAVLDGIDFGIGQGSTLYWEDLARFLSKYGEQGRKVYLAAAPQCPFPDRNLGTALNTGLFDYVWVQFYSNGPCQYSSGNTTNLINSWNQWAASLVAGTIFLGLPAAPAAARRGYIPPDVLTSQILPVIKMAPKYGGVMLWSKFWDDRNGYSRSILSSV

SEQ ID NO: 590 - protein, 305 aa, Oryza sativa subsp. japonica
  misc_feature (30)..(292): Pfam Name: Glyco_hydro_18 Pfam Description: Glycosyl hydrolases family 18
  misc_feature: Public GI ID no. 2425170
  misc_feature: Bit score of 630.1 for HMM based on sequences of Figure 45
  misc_feature: Functional Homolog Of SEQ ID NO. 501
MMTSRMFSAMQMLIMVVVALAGLAAGTRAGDIAIYWGQNGNEGTLAQTCATGNYRFVIVAFLPVFGKGQTPVLNLAGHCDPASNGCTGVGADIKSCQSLGIKVMFSIGGGVGNYGLSSRDDAKQVAAYLWNNYLGGTSPSRPLGDAVMDGIDFDIESGGGMYWDDLARYLKAYSRQGSSKKPVYLTAAPQCPFPDASLGVALSTGLFDYVWVQFYNNPPCQYSSSNGVGNLASAWKQWTSIPAGRVFLGLPVAAEAAGSGFVETSDLVSKVLPVVKKSPKYGGIMLWSRYYDGLTGYSDKVKSSV

SEQ ID NO: 591 - protein, 292 aa, Cucumis sativus
  misc_feature (26)..(280): Pfam Name: Glyco_hydro_18 Pfam Description: Glycosyl hydrolases family 18
  misc_feature: Public GI ID no. 116328
  misc_feature: Bit score of 629.7 for HMM based on sequences of Figure 45
  misc_feature: Functional Homolog Of SEQ ID NO. 501
MAAHKITTTLSIFFLLSSIFRSSDAAGIAIYWGQNGNEGSLASTCATGNYEFVNIAFLSSFGSGQAPVLNLAGHCNPDNNGCAFLSDEINSCKSQNVKVLLSIGGGAGSYSLSSADDAKQVANFIWNSYLGGQSDSRPLGAAVLDGVDFDIESGSGQFWDVLAQELKNFGQVILSAAPQCPIPDAHLDAAIKTGLFDSVWVQFYNNPPCMFADNADNLLSSWNQWTAFPTSKLYMGLPAAREAAPSGGFIPADVLISQVLPTIKASSNYGGVMLWSKAFDNGYSDSIKGSIG

SEQ ID NO: 592 - protein, 291 aa, Nicotiana tabacum
  misc_feature (23)..(280): Pfam Name: Glyco_hydro_18 Pfam Description: Glycosyl hydrolases family 18
  misc_feature: Public GI ID no. 116332
  misc_feature: Bit score of 644.6 for HMM based on sequences of Figure 45
  misc_feature: Functional Homolog Of SEQ ID NO. 501
MIKYSFLLTALVLFLRALKLEAGDIVIYWGQNGNEGSLADTCATNNYAIVNIAFLVVFGNGQNPVLNLAGHCDPNAGACTGLSNDIRACQNQGIKVMLSLGGGAGSYFLSSADDARNVANYLWNNYLGGQSNTRPLGDAVLDGIDFDIEGGTTQHWDELAKTLSQFSQQRKVYLTAAPQCPFPDTWLNGALSTGLFDYVWVQFYNNPPCQYSGGSADNLKNYWNQWNAIQAGKIFLGLPAAQGAAGSGFIPSDVLVSQVLPLINGSPKYGGVMLWSKFYDNGYSSAIKANV

SEQ ID NO: 593 - protein, 317 aa, Oryza sativa subsp. japonica
  misc_feature (33)..(304): Pfam Name: Glyco_hydro_18 Pfam Description: Glycosyl hydrolases family 18
  misc_feature: Public GI ID no. 125570070
  misc_feature: Bit score of 586.3 for HMM based on sequences of Figure 45
  misc_feature: Functional Homolog Of SEQ ID NO. 501
MATRANGSSCSLASLMAAIFFLLVVSSRGAHGGRIAIYWGQNGNEGTLADTCATGNYAFVNLAFLCSFGSGQAPQLNLAGHCDAYSGACANLTADIARCQSMGVKVLLSIGGGAGGYSLASKQDVSHLARYLWESFLGGRPSAPGGRRPLGDAVLDGVDFDIEGGGGDPRYYGDLAAYLKAYSGKGRAGKEVLLSAAPQCPFPDQWVGKALDTGLFDYVWVQFYNNPPCQYAAGSGGGAANLLDAWRQWTSGVEARYIFLGLPASPGAAGSGFIPVGSLESQVLPALKASSKYGGVMLWSRYYDDQDGYSSAIKNAV

SEQ ID NO: 594 - DNA, 912 bp, Sorghum bicolor
  misc_feature: Ceres Annot ID no. 8643742
  misc_feature: Encodes the peptide sequence at SEQ ID NO. 595
atggcaacttacgcttcaacatcctcccttgcctgcctcttcatcgtcttacttgtatccttggctctacccgggagccatggtggcagcattgccatctactggggccagaacggcaacgagggcactctcgccgacacctgcgccaccggcaactatgcctttgtcaacatcgccttcctctgtagcttcggctcggggcagaagccgcagctgaacctcgcgggtcactgcgacccctactccaacgcctgcacaaacctcaccgcagacatcaactcatgccagtccaagggtgtcaaggtcatgctctccatcggcggtggcgctggaggatactccctcaactccaggcaagacgccttcaagcttgcccagtacatctggaacaatttcctcggtgggcactccgacaagaggccgcttggcgacgccgtgctcgacggcgtcgacttcgacatcgagggaggaaaccctgactactatggagcccttgcggcatacctcaagtccttggctgccaacgccaagggcaaggaggtctacctgtcagcggcgccgcagtgtcctttcccggaccagtgggtcggcaaagcccttcagacaggcctcttcgactatgtctgggttcagttctacaacaacccaccttgccaatacacaccgggaagcatggccaacctcgtcaattcctggaaccagtggacaacagggatcacagctaagtacatctttcttggcctgccggctgcaccagatgctgcagggagtggattcataccagtagggagcctcaagacggaggtgcttcccgcgctcaacaactccaccaactacggaggagtgatgctgtggtccaagttctacgatgaccaggatggatacagctcggccatcaagaattccgtctga

SEQ ID NO: 595 - protein, 303 aa, Sorghum bicolor
  misc_feature (29)..(290): Pfam Name: Glyco_hydro_18 Pfam Description: Glycosyl hydrolases family 18
  misc_feature: Ceres Annot ID no. 8643742
  misc_feature: Bit score of 638.9 for HMM based on sequences of Figure 45
  misc_feature: Functional Homolog Of SEQ ID NO. 501
MATYASTSSLACLFIVLLVSLALPGSHGGSIAIYWGQNGNEGTLADTCATGNYAFVNIAFLCSFGSGQKPQLNLAGHCDPYSNACTNLTADINSCQSKGVKVMLSIGGGAGGYSLNSRQDAFKLAQYIWNNFLGGHSDKRPLGDAVLDGVDFDIEGGNPDYYGALAAYLKSLAANAKGKEVYLSAAPQCPFPDQWVGKALQTGLFDYVWVQFYNNPPCQYTPGSMANLVNSWNQWTTGITAKYIFLGLPAAPDAAGSGFIPVGSLKTEVLPALNNSTNYGGVMLWSKFYDDQDGYSSAIKNSV

SEQ ID NO: 596 - protein, 317 aa, Oryza sativa subsp. japonica
  misc_feature (33)..(304): Pfam Name: Glyco_hydro_18 Pfam Description: Glycosyl hydrolases family 18
  misc_feature: Public GI ID no. 11967922
  misc_feature: Bit score of 584.9 for HMM based on sequences of Figure 45
  misc_feature: Functional Homolog Of SEQ ID NO. 501
MATRANGSSCSLASLMAAIFFLLVVSSRGAHGGRIAIYWGQNGNEGTLADTCATGNYAFVNLAFLCSFGSGQAPQLNLAGHCDAYSGACANLTADIARCQSMGVKVLLSIGGGAGGYSLASKQDVSHLARYLWESFLGGRPSAPGGRRPLGDAVLDGVDFDIEGGGGDPRYYGDLAAYLKAYSGKGAAGKEVLLSAAPQCPFPDQWVGKALDTGLFDYVWVQFYNNPPCQYAAGSGGGAANLLDAWRQWTSGVEARYIFLGLPASPGAAGSGFIPVGSLESQVLPALKASSKYGGVMLWSRYYDDQDGYSSAIKNAV

SEQ ID NO: 597 - protein, 292 aa, Cucumis melo
  misc_feature (26)..(280): Pfam Name: Glyco_hydro_18 Pfam Description: Glycosyl hydrolases family 18
  misc_feature: Public GI ID no. 7595839
  misc_feature: Bit score of 636.3 for HMM based on sequences of Figure 45
  misc_feature: Functional Homolog Of SEQ ID NO. 501
MAAHKITTTLSIFFLLSSIFRSSEAAGIAIYWGQNGNEGSLASTCATGNYEFVNIAFLSSFGSGQTPVLNLAGHCNPDNNGCAFLSDEINSCQSQNVKVLLSIGGGAGSYSLSSADDARQVANFLWNSYLGGQSDSRPLGAAVLNGIDFDIESGSGQFWDVLAQELKSFGQVILSAAPQCPIPDAHLDAAVKTGLFDSVWVQFYNNPPCMFADNADNLLSSWNQWTAFPISKLYMGLPAAPEAAPSGGFIPADVLISQVLPTIKTSSNYGGVMLWSKAFDNGYSDAIKGSIG

SEQ ID NO: 598 - protein, 302 aa, Arabidopsis thaliana
  misc_feature (30)..(289): Pfam Name: Glyco_hydro_18 Pfam Description: Glycosyl hydrolases family 18
  misc_feature: Public GI ID no. 2342459
  misc_feature: Bit score of 619.2 for HMM based on sequences of Figure 45
  misc_feature: Functional Homolog Of SEQ ID NO. 501
MTNMTLRKHVIYFLFFISCSLSKPSDASRGGIAIYWGQNGNEGNLSATCATGRYAYVNVAFLVKFGNGQTPELNLAGHCNPAANTCTHFGSQVKDCQSRGIKVMLSLGGGIGNYSIGSREDAKVIADYLWNNFLGGKSSSRPLGDAVLDGIDFNIELGSPQHWDDLARSLSKFSHRGRKVYLTGAPQCPFPDRLMGSALNTKRFDYVWIQFYNNPPCSYTSGNTQNLFDSWNKWTTSIAAQKIFLGLPAAPEAAGSGYIPPDVLTSQILPTLKKSRKYGGVMLWSKFWDDKNGYSSSILASV

SEQ ID NO: 599 - protein, 302 aa, Arabidopsis thaliana
  misc_feature (30)..(289): Pfam Name: Glyco_hydro_18 Pfam Description: Glycosyl hydrolases family 18
  misc_feature: Public GI ID no. 166664
  misc_feature: Bit score of 615.9 for HMM based on sequences of Figure 45
  misc_feature: Functional Homolog Of SEQ ID NO. 501
MTNMTLRKHVIYFLFFISCSLSKPSDASRGGIAIYWGQNGNEGNLSATCATGRYAYVNVAFLVKFGNGQTPELNLAGHCNPAANTCTHFGSQVKDCQSRGIKVMLSLGGGIGNYSIGSREDAKVIADYLWNNFLGGKSSSRPLGDAVLDGIDFNIELGSPQHWDDLARTLSKFSHRGRKIYLTGAPQCPFPDRLMGSALNTKRFDYVWIQFYNNPPCSYSSGNTQNLFDSWNKWTTSIAAQKFFLGLPAAPEAADSGYIPPDVLTSQILPTLKKSRKYGGVMLWSKFWDDKNGYSSSILASV

SEQ ID NO: 600 - DNA, 1145 bp, Panicum virgatum
  misc_feature: Ceres Clone ID no. 1825429
  misc_feature: Encodes the peptide sequence at SEQ ID NO. 601
aaccgtcagagcactgcataccaagaactcgaggaagaagatggcgaaatcttttccggcaatgctgctggtcacggcgctcgcgctggcggggctagccgccggagcgcgcgccggcgacatcgcaatctactggggccagaacggcaacgggggcacgctggcggaggcgtgcgccaccggcaactacaagttcgtcaacgtggccttcctcaccacgttcggcaaggcccagacgccggtgctcaacctggccggccactgcaacccggccaccaacggctgcacgggcgtgggcgcggagatcaagtcgtgccagagccggggcgtcaaggtcctgctctccatcggcggcggcgtcggcagctacggcctgtcgtccccggccgacgccgggcaggtcgccgcctacctctggaacaactacctcggcggcgcgtccaagtccaggcccctcggcgacgcggtcctcgacgggatcgacttcgacatcgagatcggcgggagcctgtactgggacgatctggcccggtccctcaagtcctactcccgtcaggggcgccggccggtgtacctcgccgcggcgccgcagtgcccgttcccggacgcgtcgctggacaccgcgctgcgcacggggctgttcgactacgtgtgggtgcagttctacaacaacccgccgtgccagtacagcgcgagcgccggcgtgggcggcctggcgcgcgcgtgggcgcagtggacgtcgatcagggcggggcgggtattcctggggctcccggccgcgccccaggccgccggcagcgggttcgtgccgacgagcgacctggtatcgcaggtgctccccgtggtcaggaactccaccaagtacgggggcatcatgctgtggtcgaggttctacgacgggctcaccgggtacagcgacgcggtcaagtcccaagtgtgagctgttgctcgtggcatgtcggctctcgggcgtgtgtggtgcacatgcgtccatgtgcgtgggtcgtgcaggatcgagtactctgcagagaaacgtagagacacagtgatgggtatgaaagaccatgtgtcttggctctagagatctctctgaatctgatgtgctttggcatgtactatctccatcgattcaatgaactgcgagc

SEQ ID NO: 601 - protein, 299 aa, Panicum virgatum
  misc_feature (26)..(286): Pfam Name: Glyco_hydro_18 Pfam Description: Glycosyl hydrolases family 18
  misc_feature: Ceres Clone ID no. 1825429
  misc_feature: Bit score of 639.7 for HMM based on sequences of Figure 45
  misc_feature: Functional Homolog Of SEQ ID NO. 501
MAKSFPAMLLVTALALAGLAAGARAGDIAIYWGQNGNGGTLAEACATGNYKFVNVAFLTTFGKAQTPVLNLAGHCNPATNGCTGVGAEIKSCQSRGVKVLLSIGGGVGSYGLSSPADAGQVAAYLWNNYLGGASKSRPLGDAVLDGIDFDIEIGGSLYWDDLARSLKSYSRQGRRPVYLAAAPQCPFPDASLDTALRTGLFDYVWVQFYNNPPCQYSASAGVGGLARAWAQWTSIRAGRVFLGLPAAPQAAGSGFVPTSDLVSQVLPVVRNSTKYGGIMLWSRFYDGLTGYSDAVKSQV

SEQ ID NO: 602 - protein, 302 aa, Arabidopsis thaliana
  misc_feature (30)..(289): Pfam Name: Glyco_hydro_18 Pfam Description: Glycosyl hydrolases family 18
  misc_feature: Public GI ID no. 2342461
  misc_feature: Bit score of 616.9 for HMM based on sequences of Figure 45
  misc_feature: Functional Homolog Of SEQ ID NO. 501
MTNMTLRKHVIYFLFFISCSLSKPSDASRGGIAIYWGQNGNEGNLSATCATGRYAYVNVAFLVKFGNGQTPELNLAGHCNPAANTCTHFGSQVKDCQSRGIKVMLSLGGGIGNYSIGSREDAKVIADYLWNNFLGGKSSSRPLGDAVLDGIDFNIELGSPQHWDDLARSLSKFSHRGRKVYLTGAPQCPFPDRLMGSALNTKRFDYVWIQFYNNPPCSYTSGNTQNLFDSWNKWTTSIAAQKLFLGLPAAPEAAGSGYIPPDVLTSQILPTLKKSRKYGGVMLWSKFWDDKNGYSSSILASV

SEQ ID NO: 603 - DNA, 900 bp, Sorghum bicolor
  misc_feature: Ceres Annot ID no. 8669693
  misc_feature: Encodes the peptide sequence at SEQ ID NO. 604
atggcgaaccgagctcaagctccatccctgctcgtggccaccctcttggcggctctcctcgccacatgccatgccggtggcatcgccgtctactggggccagaacgacggcgaggcgtccctatccgacacgtgtgcgtcagggaactacaagttcgtcatcctcgccttcgtctacaagttcggcaagggccagacgccggagctggacctcgctagccactgcgacccctcatcgggcggctgcacggggctgagtgacgacatacgttcgtgccagagcagcggcgtcaaggtcctgctgtcgatcggcggcggtgacggcagctacggcctgtcgtcccagggagacgcgcgggacgtggccgcctacctctggaacaattacctgggcggctcgtcgtcgtcgcgccccctcggcgacgccgtccttgacggcattgacttcgacatcgagctcggcggctccaagtactgggacagcttggccagggacctcaagaacatgggcaagaacaaggtgggcggcaagggggtgctcctgagcgcggcgccgcagtgcccgttcccggacgagtgggacaacggcgcgatcgacacggggctgttcgactacgtgtgggtgcagttctacaacaacccaccgtgccaggtgagcgctggccgcggcgcgttcctggcggcgtggaagaggtggcagtcggtgccggcggggcagatcttcctaggcctgcccgcctccaaggacgccgccggcaccgggttcgtgcccgccgacgatctcaactccaacgtgctgccgctcatcaggggatcgtccaagtacggcggcgtcatgctctggtccaagtactacgacgaccgcgcaggctacagtgacgccatcaagagccacgtgtga

SEQ ID NO: 604 - protein, 299 aa, Sorghum bicolor
  misc_feature (26)..(286): Pfam Name: Glyco_hydro_18 Pfam Description: Glycosyl hydrolases family 18
  misc_feature: Ceres Annot ID no. 8669693
  misc_feature: Bit score of 596.7 for HMM based on sequences of Figure 45
  misc_feature: Functional Homolog Of SEQ ID NO. 501
MANRAQAPSLLVATLLAALLATCHAGGIAVYWGQNDGEASLSDTCASGNYKFVILAFVYKFGKGQTPELDLASHCDPSSGGCTGLSDDIRSCQSSGVKVLLSIGGGDGSYGLSSQGDARDVAAYLWNNYLGGSSSSRPLGDAVLDGIDFDIELGGSKYWDSLARDLKNMGKNKVGGKGVLLSAAPQCPFPDEWDNGAIDTGLFDYVWVQFYNNPPCQVSAGRGAFLAAWKRWQSVPAGQIFLGLPASKDAAGTGFVPADDLNSNVLPLIRGSSKYGGVMLWSKYYDDRAGYSDAIKSHV

SEQ ID NO: 605 - protein, 302 aa, Arabidopsis thaliana
  misc_feature (30)..(289): Pfam Name: Glyco_hydro_18 Pfam Description: Glycosyl hydrolases family 18
  misc_feature: Public GI ID no. 2342453
  misc_feature: Bit score of 617.9 for HMM based on sequences of Figure 45
  misc_feature: Functional Homolog Of SEQ ID NO. 501
MTNMTLRKHVIYFLFFISCSLSKPSDASRGGIAIYWGQNGNEGNLSATCATGRYAYVNVAFLVKFGNGQTPELNLAGHCNPAANTCTHFGSQVKDCQSRGIKVMLSLGGGIGNYSIGSREDAKVIADYLWNNFLGGKSSSRPLGDAVLDGIDFNIELGSPQHWDDLARTLSKFSHRGRKIYLTGAPQCPFPDRLMGSALNTKRFDYVWIQFYNNPPCSYSSGNTQNLFDSWNKWTTSIAAQKFFLGLPAAPEAAGSGYIPPDVLTSQILPTLKKSRKYGGVMLWSKFWDDKNGYSSSISASV

SEQ ID NO: 606 - DNA, 900 bp, Sorghum bicolor
  misc_feature: Ceres Annot ID no. 8669692
  misc_feature: Encodes the peptide sequence at SEQ ID NO. 607
atggcgaaccgagctcaagctccatccctgctcgtggccaccctcttggcggctctcctcgccacatgccatgccggtggcatcgccgtctactggggccagaacgacggcgaggcgtccctttccgacacgtgtgcgtcagggaactacaagttcgtcatcctcgccttcgtctacaagttcggcaagggccagacgccggagctggacctcgccagccactgcgacccctcatcgggcggctgcacggggttgagtgacgacatacgttcgtgccagagcagcggcgtcaaggtcctgctctcgatcggcggcggtgacggcagctacggcctgtcgtcccagggagacgcgcgggacgtggccgcctacctctggaacaattacctgggcggctcgtcgtcgtcgcgccccctcggcgacgccgtccttgacggcattgacttcgacatcgagctcggcggctccaagtactgggacagcttggccagggacctcaagaacatgggcaagaacaaggtgggcggcaagggggtgctcctgagcgcggcgccgcagtgcccgttcccggacgagtgggacaacggcgcgatcgacacggggctgttcgactacgtgtgggtgcagttctacaacaacccaccgtgccaggtgaacgcgggccgcggcgcgttcctggacgcgtggaaacagtgggagtcggttccggcggggaagatcttcctaggcctgcccgcctccaaggacgccgccggcaccgggttcgtgcccgccgacgatctcaactccaacgtgctgccgctcatcaggggatcgtccaagtacggcggcgtcatgctctggtccaagtactacgacgaccgcgcaggctacagtgacgccatcaagagccacgtgtga

SEQ ID NO: 607 - protein, 299 aa, Sorghum bicolor
  misc_feature (26)..(286): Pfam Name: Glyco_hydro_18 Pfam Description: Glycosyl hydrolases family 18
  misc_feature: Ceres Annot ID no. 8669692
  misc_feature: Bit score of 597.6 for HMM based on sequences of Figure 45
  misc_feature: Functional Homolog Of SEQ ID NO. 501
MANRAQAPSLLVATLLAALLATCHAGGIAVYWGQNDGEASLSDTCASGNYKFVILAFVYKFGKGQTPELDLASHCDPSSGGCTGLSDDIRSCQSSGVKVLLSIGGGDGSYGLSSQGDARDVAAYLWNNYLGGSSSSRPLGDAVLDGIDFDIELGGSKYWDSLARDLKNMGKNKVGGKGVLLSAAPQCPFPDEWDNGAIDTGLFDYVWVQFYNNPPCQVNAGRGAFLDAWKQWESVPAGKIFLGLPASKDAAGTGFVPADDLNSNVLPLIRGSSKYGGVMLWSKYYDDRAGYSDAIKSHV

SEQ ID NO: 608 - DNA, 909 bp, Arabidopsis thaliana
  misc_feature: Ceres Annot ID no. 570753
  misc_feature: Encodes the peptide sequence at SEQ ID NO. 609
atgaccaacatgactcttcgcaagcatgttatatactttcttttcttcataagctgctctcttagcaaaccctccgatgcatccagaggtggcatagccatctattggggccaaaacggaaacgaaggtaacctctctgccacgtgtgccaccggccggtatgcttacgtcaacgtcgcctttcttgtgaaattcggaaatggccaaacaccggagctcaaccttgccggccactgcaaccctgcggcgaacacttgcacccattttggctctcaggtcaaagattgtcagtctcgtggcatcaaggttatgttgtctctcggcggcgggattggaaactactcgattgggtcgagggaggacgcaaaagttatcgctgattatctgtggaacaacttcttgggaggaaaatcatcatcacgtcccttaggtgatgctgttctagatggtatcgatttcaatatcgagcttggctctcctcaacactgggatgatctcgccaggactctctcaaagtttagccacagaggaagaaaaatatatctaacaggagctcctcaatgtccatttccagacagattaatgggaagtgctctcaacactaaacgttttgactatgtttggattcaattctacaataatccaccgtgttcatacagttcaggtaatactcaaaacctcttcgattcatggaacaagtggaccacttcaatcgcagcccaaaaattcttcttgggtctaccggcagctcctgaagctgccggaagtggctatatcccaccagatgtactgacttcacagattcttccgactttaaagaagtctaggaagtatggaggtgtaatgctttggtctaaattctgggatgataaaaatggatacagttcatctatattggctagtgtgtga

SEQ ID NO: 609 - protein, 302 aa, Arabidopsis thaliana
  misc_feature (30)..(289): Pfam Name: Glyco_hydro_18 Pfam Description: Glycosyl hydrolases family 18
  misc_feature: Ceres Annot ID no. 570753
  misc_feature: Bit score of 617.2 for HMM based on sequences of Figure 45
  misc_feature: Functional Homolog Of SEQ ID NO. 501
MTNMTLRKHVIYFLFFISCSLSKPSDASRGGIAIYWGQNGNEGNLSATCATGRYAYVNVAFLVKFGNGQTPELNLAGHCNPAANTCTHFGSQVKDCQSRGIKVMLSLGGGIGNYSIGSREDAKVIADYLWNNFLGGKSSSRPLGDAVLDGIDFNIELGSPQHWDDLARTLSKFSHRGRKIYLTGAPQCPFPDRLMGSALNTKRFDYVWIQFYNNPPCSYSSGNTQNLFDSWNKWTTSIAAQKFFLGLPAAPEAAGSGYIPPDVLTSQILPTLKKSRKYGGVMLWSKFWDDKNGYSSSILASV

SEQ ID NO: 610 - protein, 302 aa, Arabidopsis thaliana
  misc_feature (30)..(289): Pfam Name: Glyco_hydro_18 Pfam Description: Glycosyl hydrolases family 18
  misc_feature: Public GI ID no. 2342443
  misc_feature: Bit score of 618.5 for HMM based on sequences of Figure 45
  misc_feature: Functional Homolog Of SEQ ID NO. 501
MTNMTLRKHVIYFLFFISCSLSKPSDASRGGIAIYWGQNGNEGNLSATCATGRYAYVNVAFLVKFGNGQTPELNLAGHCNPAANTCTHFGSQVKDCQSRGIKVMLSLGGGIGNYSIGSREDAKVIADYLWNNFLGGKSSSRPLGDAVLDGIDFNIELGSPQHWDDLARTLSKFSHRGRKIYLTGAPQCPFPDRLMGSALNTKRFDYVWIQFYNNPPCSYSSGNTQNLFDSWNKWTTSITAQKFFLGLPAAPEAAGSGYIPPDVLTSQILPTLKKSRKYGGVMLWSKFWDDKNGYSSSILASV

SEQ ID NO: 611 - protein, 302 aa, Arabidopsis thaliana
  misc_feature (30)..(289): Pfam Name: Glyco_hydro_18 Pfam Description: Glycosyl hydrolases family 18
  misc_feature: Public GI ID no. 2342433
  misc_feature: Bit score of 617.4 for HMM based on sequences of Figure 45
  misc_feature: Functional Homolog Of SEQ ID NO. 501
MTNMTLRKHVIYFLFFISCSLSKPSDASRGGIAIYWGQNGNEGNLSATCATGRYAYVNVAFLVKFGNGQTPELNLAGHCNPAANTCTHFGSQVKDCQSRGIKVMLSLGGGIGNYSIGSREDAKVIADYLWNNFLGGKSSSRPLGDAVLDGIDFNIELGSPQHWDDLARTLSKFSHRGRKIYLTGAPQCPFPDRLMGSALNTKRFDYVWIQFYNNPPCSYSSGNTQNLFDSWNKWTTSIAAQKFFLGLPAAPEAAGSGYIPPDVLTSQILPTLKKSRKYGGVMLWSKFWDDKNGYSSSIVASV

SEQ ID NO: 612 - protein, 302 aa, Arabidopsis korshinskyi
  misc_feature (30)..(289): Pfam Name: Glyco_hydro_18 Pfam Description: Glycosyl hydrolases family 18
  misc_feature: Public GI ID no. 22775364
  misc_feature: Bit score of 614.6 for HMM based on sequences of Figure 45
  misc_feature: Functional Homolog Of SEQ ID NO. 501
MTNINLLNHVIYFLFFISFFVIKPSDASRGGIAIYWGQNGNEGNLSATCATGRYAYVNVAFLVKFGNGQTPELNLAGHCNPAANTCTRFGSQVKDCQSRGIKVMLSLGGGIGNYSIGSREDAKVVADYLWNNFLGGKSSSRPLGDAVLDGIDFNIELGSPQHWDDLARSLSKLSYKGRKVYLTGAPQCPFPDRLMGSALNTRLFDYVWIQFYNNPPCSYTSSNTQNLFDSWNKWTTSITAQKIFLGLPAAPEAAGSGYIPPDVLTSQILPVLKKSRKYGGVMLWSKFWDDKNGYSSSILPGV

SEQ ID NO: 613 - protein, 297 aa, Oryza sativa subsp. japonica
  misc_feature (26)..(284): Pfam Name: Glyco_hydro_18 Pfam Description: Glycosyl hydrolases family 18
  misc_feature: Public GI ID no. 115441183
  misc_feature: Bit score of 605.8 for HMM based on sequences of Figure 45
  misc_feature: Functional Homolog Of SEQ ID NO. 501
MASRALTPMQLIGTVFVALLATCHAGGIAVYWGQNDGEASLAETCASGNYEFVIIAFLPKFGKGQTPRVDLASHCDPASGGCTGQSKDIRACQRRGVKVLLSIGGGDGSYGLSSPGDARQVAMYLWNNFLGGSSSSRPLGDAVLDGIDFDIELGGAKFWDDLARDLKSLGRSGGRRVVLSAAPQCPFPDEWDGGAISTGLFDAVWVQFYNNPECQFSAGRGAFMDAWRKWESVPAGRLFLGLPASKDAAGTGFVPAGELNSRVLPLIRGSPKYGGVMLWSKYYDDQTGYSSAIKSHV

SEQ ID NO: 614 - protein, 302 aa, Arabis gemmifera
  misc_feature (30)..(289): Pfam Name: Glyco_hydro_18 Pfam Description: Glycosyl hydrolases family 18
  misc_feature: Public GI ID no. 22775368
  misc_feature: Bit score of 613.1 for HMM based on sequences of Figure 45
  misc_feature: Functional Homolog Of SEQ ID NO. 501
MTNINLIKHVIYLLFFISCFLTKPSDASRGGIAIYWGQNGNEGNLSATCATGRYAYVNVAFLVKFGNGQTPELNLAGHCNPAANTCTHFGSQVKYCQSRGIKVMLSLGGGIGNYSIGSKEDAKVVADYLWNNFLGGKSSSRPLGDAVLDGIDFNIELGSPQHWDDLARSLSKLSHRGRKVYLTGAPQCPFPDRLMGNALNTRRFDYVWIQFYNNPPCSYTSGNTQNLFDSWNKWTTSITAQKIFLGLPAAPEASGSGYIPPDVLTSQILPTLKKSRKYGGVMLWSKFWDDKNGYSSSILATV

SEQ ID NO: 615 - protein, 302 aa, Arabis gemmifera
  misc_feature (30)..(289): Pfam Name: Glyco_hydro_18 Pfam Description: Glycosyl hydrolases family 18
  misc_feature: Public GI ID no. 22775376
  misc_feature: Bit score of 611.5 for HMM based on sequences of Figure 45
  misc_feature: Functional Homolog Of SEQ ID NO. 501
MTNINLIKHVIYFFFFISCFLTKPSDASRGGIAIYWGQNGNEGNLSATCATGRYAYVNVAFLVKFGNGQTPELNLAGHCNPAANTCTHFGSQVKYCQSRGIKVMLSLGGGIGNYSIGSKEDAKVVADYLWNNFLGGKSSSRPLGDAVLDGIDFNIELGSPQHWDDLARSLSKLSHRGRKVYLTGAPQCPFPDRLMGNALNTRRFDYVWIQFYNNPPCSYTSGNTQNLFDSWNKWTTSITAQKIFLGLPAAPEASGSGYIPPDVLTSQILPTLKKSRKYGGVMLWSKFWDDKNGYSSSILATV

SEQ ID NO: 616 - protein, 302 aa, Arabis gemmifera
  misc_feature (30)..(289): Pfam Name: Glyco_hydro_18 Pfam Description: Glycosyl hydrolases family 18
  misc_feature: Public GI ID no. 22775370
  misc_feature: Bit score of 611.3 for HMM based on sequences of Figure 45
  misc_feature: Functional Homolog Of SEQ ID NO. 501
MTNINLIKHVIYLLFFISCFLTKPSDASRGGIAIYWGQNGNEGNLSATCATGRYAYVNVAFLVKFGNGQTPELNLAGHCNPAANTCTHFGSQVKYCQSRGIKVMLSLGGGIGNYSIGSKEDAKVVADYLWNNFLGGKSSSRPLGDAVLDGIDFNIELGSPQHWDDLARSLSKLSHRGRKVYLTGAPQCPFPDRLMGNALNTRRFEYVWIQFYNNPPCSYTSGNTQNLFDSWNKWTTSITAQKIFLGLPAAPEASGSGYIPPDVLTSQILPTLKKSRKYGGVMLWSKFWDDKNGYSSSILATV

SEQ ID NO: 617 - protein, 302 aa, Arabis gemmifera
  misc_feature (30)..(289): Pfam Name: Glyco_hydro_18 Pfam Description: Glycosyl hydrolases family 18
  misc_feature: Public GI ID no. 22775382
  misc_feature: Bit score of 612.9 for HMM based on sequences of Figure 45
  misc_feature: Functional Homolog Of SEQ ID NO. 501
MTNINLIKHVIYLLFFISCFLTKPSDASRGGIAIYWGQNGNEGNLSATCATGRYAYVNVAFLVKFGNGQTPELNLAGHCNPAANTCTHFGSQVKYCQSRGIKVMLSLGGGIGNYSIGSKEDAKVVADYLWNNFLGGKSSSRPLGDAVLDGIDFNIELGSPQHWDDLARSLSKLSHRGRKVYLTGAPQCPFPDRLMGNALNTRRFDYVWIQFYNNPPCSYTSGNTQNLFDSWNKWTTSITAQRIFLGLPAAPEASGSGYIPPDVLTSQILPTLKKSRKYGGVMLWSKFWDDKNGYSSSILATV

SEQ ID NO: 618 - protein, 302 aa, Arabidopsis lyrata subsp. petraea
  misc_feature (30)..(289): Pfam Name: Glyco_hydro_18 Pfam Description: Glycosyl hydrolases family 18
  misc_feature: Public GI ID no. 22775358
  misc_feature: Bit score of 610.4 for HMM based on sequences of Figure 45
  misc_feature: Functional Homolog Of SEQ ID NO. 501
MTNINLLKHVIYLLFFISCFLTKPSDAFRGGIAIYWGQNGNEGNLSATCATGRYAYVNVAFLVKFGNGQTPELNLAGHCNPAANTCTHFGSQVKDCQSRGIKVMLSLGGGIGNYSIGSREDAKVVTDYLWNNFLGGKSSSRPLGDAVLDGIDFNIELGSPQHWDDLARSLSKLSHRGRKVYLTGAPQCPFPDRLMGSALNTRRFDYVWIQFYNNPACSYSSGNTQNLFDSWNKWTTSITAQKIFLGLPAAPEASGSGYIPPDVLTSQILPTLKKSRKYGGVMLWSKFWDDKNGYSSSILASV

SEQ ID NO: 619 - protein, 297 aa, Oryza sativa subsp. indica
  misc_feature (26)..(284): Pfam Name: Glyco_hydro_18 Pfam Description: Glycosyl hydrolases family 18
  misc_feature: Public GI ID no. 125528454
  misc_feature: Bit score of 604.4 for HMM based on sequences of Figure 45
  misc_feature: Functional Homolog Of SEQ ID NO. 501
MASRALTPMQLIGTVFVALLATCHAGGIAVYWGQNDGEASLAETCASGNYEFVIIAFLPKFGKGQTPRVDLASHCDPASGGCTGQSKDIRACQRRGVKVLLSIGGGDGSYGLASPGDARQVAMYLWNNFLGGSSSSRPLGDAVLDGIDFDIELGGAKFWDDLARDLKSLGRSGGRRVVLSAAPQCPFPDEWDGGAISTGLFDAVWVQFYNNPECQFSAGRGAFMDAWRKWESVPAGRLFLGLPASKDAAGTGFVPAGELNSRVLPLIRGSPKYGGVMLWSKYYDDQTGYSSAIKSHV

SEQ ID NO: 620 - protein, 302 aa, Arabidopsis thaliana
  misc_feature (30)..(289): Pfam Name: Glyco_hydro_18 Pfam Description: Glycosyl hydrolases family 18
  misc_feature: Public GI ID no. 2342439
  misc_feature: Bit score of 611.9 for HMM based on sequences of Figure 45
  misc_feature: Functional Homolog Of SEQ ID NO. 501
MTNMTLRKHVIYFLFFISCSLSKPSDASRGGIAIYWGQNGNAGNLSATCATGRYAYVNVAFLVKFGNGQTPELNLAGHCNPAANTCTHFGSQVKDCQSRGIKVMLSLGGGIGNYSIGSREDAKVIADYLWNNFLGGKSSSRPLGDAVLDGIDFNIELGSPQHWDDLARTLSKFSHRGRKIYLTGAPQCPFPDRLMGSALNTKRFDYVWIQFYNNPPCSYSSGNTQNLFDSWNKWTTSIAAQKFFLGLPAAPEAAGSGYIPPDVLTSQILPTLKKSRKYGGVMLWSKFWDDKNGYSSSILASV

SEQ ID NO: 621 - protein, 302 aa, Arabidopsis thaliana
  misc_feature (30)..(289): Pfam Name: Glyco_hydro_18 Pfam Description: Glycosyl hydrolases family 18
  misc_feature: Public GI ID no. 2342457
  misc_feature: Bit score of 615.0 for HMM based on sequences of Figure 45
  misc_feature: Functional Homolog Of SEQ ID NO. 501
MTNMTLRKHVIYFLFFISCSLTKPSDASRGGIAIYWGQNGNEGNLSATCATGRYAYVNVAFLVKFGNGRTPELNLAGHCNPAANTCTHFGSQVKDCQSRGIKVMLSLGGGIGNYSIGSRKDAKVVADYLWNNFLGGKSSSRPLGDAVLDGIDFNIELGSPQHWDDLARSLSKYSHRGRKIYLTGAPQCPFPDRLMGSALNTKRFDYVWIQFYNNPPCSYSSGNTQNLFDSWNKWTTSIAAQKFFLGLPAAPEAAGSGYIPPDVLTSQILPTLKNSRKYGGVMLWSKFWDDKNGYSSSILASV

SEQ ID NO: 622 - protein, 302 aa, Arabis gemmifera
  misc_feature (30)..(289): Pfam Name: Glyco_hydro_18 Pfam Description: Glycosyl hydrolases family 18
  misc_feature: Public GI ID no. 22775380
  misc_feature: Bit score of 612.0 for HMM based on sequences of Figure 45
  misc_feature: Functional Homolog Of SEQ ID NO. 501
MTNINLIKHVIYLLFFISCFLTKPSDASRGGIAIYWGQNGNEGNLSATCATGRYAYVNVAFLVKFGNGQTPELNLAGHCNPAANTCTHFGSQVKYCQSRGIKVMLSLGGGIGNYSIGSKEDAKVVADYLWNNFLGGKSSSRPLGDAVLDGIDFNIELGSPQHWDDLARSLSKLSHRGRKVYLTGAPQCPFPDRLMGNALNTRRFDYVWIQFYNNPPCSYTSGNTQNLFDSWNKWTTSITAQKIFLGLPAAPEASGSGYIPPDVLTSQILPTLKKSRKYGGVMLWSKFWDDKDGYSSSILATV

SEQ ID NO: 623 - protein, 302 aa, Arabis glabra
  misc_feature (30)..(289): Pfam Name: Glyco_hydro_18 Pfam Description: Glycosyl hydrolases family 18
  misc_feature: Public GI ID no. 2342465
  misc_feature: Bit score of 611.0 for HMM based on sequences of Figure 45
  misc_feature: Functional Homolog Of SEQ ID NO. 501
MTNINLLKHVIYFLILISCFVTKPSDASRGGIAIYWGQNGNEGNLSATCATGRYAYVNVAFLVKFGNAQTPELNLAGHCNPAANTCTHFGSQVKDCQSRGIKVMLSLGGGIGNYSIGSREDAQVVADYLWNNFLGGKSSSRPLGDAVLDGIDFNIELGSPQHWDDLARSLSKFSHRGRKVYLTGAPQCPFPDRLMGSTLNTRLFDYVWIQFYNNPPCSYTSGNTQNLFDSWNKWTTSITAQKIFLGLPAAPEGAGSGYIPPDVLTSQILPILKKSRKYGGVMLWSKFWDDKNGYSSSILASV

SEQ ID NO: 624 - protein, 293 aa, Lupinus albus
  misc_feature (28)..(280): Pfam Name: Glyco_hydro_18 Pfam Description: Glycosyl hydrolases family 18
  misc_feature: Public GI ID no. 2853142
  misc_feature: Bit score of 671.6 for HMM based on sequences of Figure 45
  misc_feature: Functional Homolog Of SEQ ID NO. 501
MASLKQVSLILFPLLLLISSSFKLSNAAGIVIYWGQNGNEGSLADACNTNNYQYVNIAFLSTFGNGQTPELNLAGHSRDGLNADIKGCQGKGIKVLLSLGGGAGSYSLNSADDATNLANYLWNNFLGGTSDSRPFGDAVLDGIDFDIEAGGAQHYDELARALNGFSSQKKVYLGAAPQCPIPDAHLDAAINTGLFDYVWVQFYNNPQCQYACGNTNNLINSWNQWTSSQAKQVFLGLPASEAAAPSGGFIPTDVLISQVLPTIKTSPKYGGVMLWNGFNDIQTGYSDAIKASV

SEQ ID NO: 625 - protein, 294 aa, Nicotiana tabacum
  misc_feature (25)..(281): Pfam Name: Glyco_hydro_18 Pfam Description: Glycosyl hydrolases family 18
  misc_feature: Public GI ID no. 116337
  misc_feature: Bit score of 576.6 for HMM based on sequences of Figure 45
  misc_feature: Functional Homolog Of SEQ ID NO. 501
MNIKVSLLFILPIFLLLLTSKVKAGDIVVYWGQDVGEGKLIDTCNSGLYNIVNIAFLSSFGNFQTPKLNLAGHCEPSSGGCQQLTKSIRHCQSIGIKIMLSIGGGTPTYTLSSVDDARQVADYLWNNFLGGQSSFRPLGDAVLDGIDFDIELGQPHYIALARRLSEHGQQGKKLYLTAAPQCPFPDKLLNGALQTGLFDYVWVQFYNNPECEFMSNSENFKRRWNQWTSIPAKKLYIGLPAAKTAAGNGYIPKQVLMSQVLPFLKGSSKYGGVMLWNRKFDVQCGYSSAIRGAV

SEQ ID NO: 626 - protein, 298 aa, Cucumis sativus
  misc_feature (26)..(280): Pfam Name: Glyco_hydro_18 Pfam Description: Glycosyl hydrolases family 18
  misc_feature: Public GI ID no. 167540
  misc_feature: Bit score of 614.4 for HMM based on sequences of Figure 45
  misc_feature: Functional Homolog Of SEQ ID NO. 501
MAAHKITTTLSIFFLLSSIFHSSDAAGIGIYWGQNGNEGSLASTCATGNYEFVNIAFLSSFGGGQTPVLNLAGHCNPDNNGCTILSNEINSCQSQNVKVLLSIGGGTGSYSLYSADDAKEVANFIWNSYLGGQSDSRPLGDAVLDGVDFDIEFGSDQFWDVLAQELKSFGQVILSAAPQCPIPDAHLDAAIRTGLFDSVWVQFYNNPSCMYADNTDDILSSWNQWAAYPILKLYMGLPAAPEAAPSGGFIPVDELISEVLPTIKAYSNYGGVMLWSKAFDNGYSDAIKDSIYQLKGSS

SEQ ID NO: 627 - protein, 294 aa, Rehmannia glutinosa
  misc_feature (25)..(283): Pfam Name: Glyco_hydro_18 Pfam Description: Glycosyl hydrolases family 18
  misc_feature: Public GI ID no. 28848952
  misc_feature: Bit score of 623.4 for HMM based on sequences of Figure 45
  misc_feature: Functional Homolog Of SEQ ID NO. 501
MAAVRAALLFILPVFSALSSRNASGKISIYWGQNGNEGTLAETCATGNYHYVNIAFLPTFGNGQTPMINLAGHCDPTITNGCTHLSSQIKSCQAKGIKVMLSIGGGAGSYYLSSSQDAKQVATYLFNNFLSGKSSPRPLGDAILDGIDLDIEGGTDLYWDDLARYLSNYGKRGRKVYLTAAPQCPFPDYYIGNALQTGLFDYVWVQFYNNPPCQYSSGMDSFEKAWKDWNSIPAGEIFLGLPASAQAAGTGFVPAGDLTSQVLPAIKGSAKYGGVMLWDKYHDTGYSSSIKKDV

SEQ ID NO: 628 - DNA, 1139 bp, Panicum virgatum
  misc_feature: Ceres Clone ID no. 1804242
  misc_feature: Encodes the peptide sequence at SEQ ID NO. 629
acaaagcggaaagcatcacacttgcacagttcctcctcagtctacactctcccactcccaccactcccctgcttcacccgaagcgtgccggcaggccggcagcgagcagtcaggagccatggctccgccgctgctgctcgtccttctcctcctcccgtccctcgccgccggccatcagcacccgtcctccttcggttcctccgccctctccgagtggcgctccgccaaggcctcctactacgccgccgaccccgaggacgccatcggtggggcgtgcggtttcggggatctgggcaagcacgggtacgggatggcgacggtggggctgagcacggcgctgttcgagcgcggcgcggcgtgcggcggctgctacgaggtcaagtgcgtcgaggatctcaagtattgtctccccggcacctccatcgtcgtcacggccaccaacttctgcgcccccaactacggcctccccgccgacgccggcggccactgcaacccgcccaaccaccacttcctcctccccatccaggcgttcgagaagattgccctctggaaggccggcgtcatgcccatccagtaccgccgtgttaagtgcctccgtgaaggtggtgtcaggttctctgtcaacggtcgacgcttcttcttcacagtgctaatcagcaacgttggtggtgcgggtgatgtgagatcggtgaagatcaaaggaacagagtcaggatggctctcgatgggccgcaactggggtcaggtgtggcacatcaactgtgacatgaggggtcagcccctgtccttcgagctcagctcaagcgatggcaagccgctgaccagtttcaatgtcgtgcccaaggattgggaatatggaaaaacatacaccgggaaacagtttctgctgtagaaggagtgccacaagatcagcttacagtttctaattttttgttctgattctacgagttgaactgcggtgtatattcctctgtggaacaagtaatatcattaggagaaaaatactagtgcagggcctcaaatagtagttcttgctcataaatgcattttcgtgtcccctgatagaaggccctattttgggtgtctccgttgtattacaacattttacctggcaagcaatgataatagtatctctgcag

SEQ ID NO: 629 - protein, 257 aa, Panicum virgatum
  misc_feature (164)..(241): Pfam Name: Pollen_allerg_1 Pfam Description: Pollen allergen
  misc_feature (67)..(153): Pfam Name: DPBB_1 Pfam Description: Rare lipoprotein A (RlpA)-like double
  misc_feature: Ceres Clone ID no. 1804242
  misc_feature: Bit score of 667.2 for HMM based on sequences of Figure 36
  misc_feature: Functional Homolog Of SEQ ID NO. 629
  misc_feature: in Figure 36
MAPPLLLVLLLLPSLAAGHQHPSSFGSSALSEWRSAKASYYAADPEDAIGGACGFGDLGKHGYGMATVGLSTALFERGAACGGCYEVKCVEDLKYCLPGTSIVVTATNFCAPNYGLPADAGGHCNPPNHHFLLPIQAFEKIALWKAGVMPIQYRRVKCLREGGVRFSVNGRRFFFTVLISNVGGAGDVRSVKIKGTESGWLSMGRNWGQVWHINCDMRGQPLSFELSSSDGKPLTSFNVVPKDWEYGKTYTGKQFLL

SEQ ID NO: 630 - DNA, 774 bp, Sorghum bicolor
  misc_feature: Ceres Annot ID no. 8702536
  misc_feature: Encodes the peptide sequence at SEQ ID NO. 631
atggctccgccgctcctgctcttcctcttcctcctcccggccctcgccgccggacaccagcacccgtcctcctatggttcgtccgcgctctccgagtggcgccccgccaaggcatcctactacgccgccgaccccgaagacgccatcggtggggcgtgcgggttcggggatctggggaagcacgggtacgggatggcgacggtggggctgagcacggcgctgttcgagcgcggcgcggcgtgcggcggctgctacgaggtcaagtgcgtcgaggatctcaagtactgcctccccggcacctcaatcgtcgtcacggccaccaacttctgcgccccaaactacggcctccccgccgacgccggcggccactgcaacccgcccaaccaccatttcctcctccccatccagtcgtttgagaagattgcgctctggaaggccggcatcatgcccatccagtaccgccgtgttaagtgcctccgagaaggtggtgtcaggttctctgtcaatggtcggcacttcttctttacagtcctaatcagcaatgttggtggcgcgggtgatgttagatctgtgaagatcaaaggaacagagttaggatggctctcgatgggccgcaattggggccaggtgtggcacatcaactgtgacatgaggggacaacccctgtcgtttgagctcagctcaagcgatggcaagacactcaccagtttcaacgttgtgcccaaggattgggagtatggcaagacatacacggggaagcagtttcttctgtag

SEQ ID NO: 631 - protein, 257 aa, Sorghum bicolor
  misc_feature (164)..(241): Pfam Name: Pollen_allerg_1 Pfam Description: Pollen allergen
  misc_feature (67)..(153): Pfam Name: DPBB_1 Pfam Description: Rare lipoprotein A (RlpA)-like double
  misc_feature: Ceres Annot ID no. 8702536
  misc_feature: Bit score of 669.1 for HMM based on sequences of Figure 36
  misc_feature: Functional Homolog Of SEQ ID NO. 629
  misc_feature: in Figure 36
MAPPLLLFLFLLPALAAGHQHPSSYGSSALSEWRPAKASYYAADPEDAIGGACGFGDLGKHGYGMATVGLSTALFERGAACGGCYEVKCVEDLKYCLPGTSIVVTATNFCAPNYGLPADAGGHCNPPNHHFLLPIQSFEKIALWKAGIMPIQYRRVKCLREGGVRFSVNGRHFFFTVLISNVGGAGDVRSVKIKGTELGWLSMGRNWGQVWHINCDMRGQPLSFELSSSDGKTLTSFNVVPKDWEYGKTYTGKQFLL

SEQ ID NO: 632 - DNA, 1247 bp, Zea mays
  misc_feature: Ceres Clone ID no. 222556
  misc_feature: Encodes the peptide sequence at SEQ ID NO. 633
aaaaggtacccaagctgaaagcatcacactcgcagttgcagagttccgcttcatcagtcccacactctccccttcctccccccagtcctgagcttcgccgaggcatacggacaataccggcaccggcagcgagcagtcgggagccatggctccgcggctcctgctcttcctcctcctcctcctcccgctcctcgccgccggacaccagcacccgtcctcctacggctcctccgcgctttccgagtggcgccccgccaaggcatcctactacgccgccgaccccgaagacgccatcggtggggcgtgcgggttcggggatctgggaaagcacgggtacgggatggcgacggtggggctgagcacggcgctgttcgagcgcggcgcggcgtgcggcggctgctacgaggtcaagtgcgtcgaggatctcaagtactgcctccccggcacctccatagtcgtcacggccaccaacttctgcgccccgaactacggccttcccgccgacgccggcggccactgcaacccgcccaaccatcatttcctcctccccatccagtcgtttgagaagattgcgctctggaaggccggcatcatgccaatccagtaccgccgtgttaagtgcctccgtgaaggtggtgtcaggttctctgtcaacggtcggcacttcttctttacagtcctaatcagcaacgttggtggcgcgggtgatgttagatctgtgaagatcaaaggaacagagttgggatggctcccgatgggccgcaactggggccaggtgtggcacatcaactgtgacatgaggggacaacctctatcgtttgagctcagctcgagcgatggcaaggcgctgaccagtttcaacgtcgtccctaaggattgggagtatggcaagacatacacggggaagcaatttcttctgtagagaatgagcgccacaagatcagcttacagtttctcattttttgttctgatcctacgagttgggctgtggtgtacattctctgcacttctgcagaacaagtaatatcattattaggagaaaattacttagtgcaaggcctcagatagttgctcttggtcataaatggttttccatgtccccttcatagttgtactaaagaggcttgatgtatcattcaaaatagaagcctccgttgtattacaatattttacctagcaagcaatgataatgtatttctgcatttctgtattagtaacaagggcagcaactagaactttgatttcct

SEQ ID NO: 633 - protein, 258 aa, Zea mays
  misc_feature (165)..(242): Pfam Name: Pollen_allerg_1 Pfam Description: Pollen allergen
  misc_feature (68)..(154): Pfam Name: DPBB_1 Pfam Description: Rare lipoprotein A (RlpA)-like double
  misc_feature: Ceres Clone ID no. 222556
  misc_feature: Bit score of 670.2 for HMM based on sequences of Figure 36
  misc_feature: Functional Homolog Of SEQ ID NO. 629
  misc_feature: in Figure 36
MAPRLLLFLLLLLPLLAAGHQHPSSYGSSALSEWRPAKASYYAADPEDAIGGACGFGDLGKHGYGMATVGLSTALFERGAACGGCYEVKCVEDLKYCLPGTSIVVTATNFCAPNYGLPADAGGHCNPPNHHFLLPIQSFEKIALWKAGIMPIQYRRVKCLREGGVRFSVNGRHFFFTVLISNVGGAGDVRSVKIKGTELGWLPMGRNWGQVWHINCDMRGQPLSFELSSSDGKALTSFNVVPKDWEYGKTYTGKQFLL

SEQ ID NO: 634 - protein, 258 aa, Triticum aestivum
  misc_feature (68)..(154): Pfam Name: DPBB_1 Pfam Description: Rare lipoprotein A (RlpA)-like double
  misc_feature (165)..(242): Pfam Name: Pollen_allerg_1 Pfam Description: Pollen allergen
  misc_feature: Public GI ID no. 44894790
  misc_feature: Bit score of 657.8 for HMM based on sequences of Figure 36
  misc_feature: Functional Homolog Of SEQ ID NO. 629
  misc_feature: in Figure 36
MAPPLILLVVFLLPALAAGHQHPSSYGSSALSEWRNAKSSYFAADPGDAIGGACGFGDLGKHGYGMATVGLSTALFERGAACGGCYEVKCVEDLKYCLPGTSIVVTATNFCPPNYGFPADAGGVCNPPNHHFLLPIQAFEKIALWKAGVMPIQYRRVKCLREGGVRFSVSGKSFFFTVLISNVGGAGDVRSVKIKGTESGWLDMGRNWGQIWHINLDLTGQPVSFELTSSDGTTMTNFNVVPKDWEFGKTYTGKQFLL

SEQ ID NO: 635 - protein, 257 aa, Oryza sativa subsp. japonica
  misc_feature (164)..(241): Pfam Name: Pollen_allerg_1 Pfam Description: Pollen allergen
  misc_feature (67)..(153): Pfam Name: DPBB_1 Pfam Description: Rare lipoprotein A (RlpA)-like double
  misc_feature: Public GI ID no. 115460126
  misc_feature: Bit score of 657.9 for HMM based on sequences of Figure 36
  misc_feature: Functional Homolog Of SEQ ID NO. 629
  misc_feature: in Figure 36
MAPCLLLVLFLLPALATGHQHPSTLGSSALSEWRSAKASYYAADPEDAIGGACGFGDLGKHGYGMATVGLSTALFERGAACGGCYEVKCVDDLKYCLPGTSIVVTATNFCAPNFGLPADAGGVCNPPNHHFLLPIQSFEKIALWKAGVMPIQYRRVNCLRDGGVRFAVAGRSFFLTVLISNVGGAGDVRSVKIKGTESGWLSMGRNWGQIWHINSDFRGQPLSFELTSSDGKTLTNYNVVPKEWDFGKTYTGKQFLL

SEQ ID NO: 636 - protein, 267 aa, Vitis vinifera
  misc_feature (174)..(251): Pfam Name: Pollen_allerg_1 Pfam Description: Pollen allergen
  misc_feature (77)..(163): Pfam Name: DPBB_1 Pfam Description: Rare lipoprotein A (RlpA)-like double
  misc_feature: Public GI ID no. 157347738
  misc_feature: Bit score of 689.7 for HMM based on sequences of Figure 36
  misc_feature: Functional Homolog Of SEQ ID NO. 629
  misc_feature: in Figure 36
MIRAPTFLLLLLQLLFTTVAAHFSSSSSSSSSSSSSATLSEWRSGRATYYAAADPRDAVGGACGYGDLVKSGYGMATVGLSEALFERGQICGGCFELRCVDDLRWCIPGTSIIVTATNFCAPNYGFPADGGGHCNPPNNHFVLPIEAFEKIAIWKAANMPVHYRRIKCRKEGGVRFSLDGSGIFLSVLISNVGGAGDIVGVKVKGSRTGWLPMGRNWGQNWHLNADLKNQPLSFEITASDGITLTSYNVAPKGWNFGQTFEGKQFES

SEQ ID NO: 637 - protein, 266 aa, Arabidopsis thaliana
  misc_feature (172)..(249): Pfam Name: Pollen_allerg_1 Pfam Description: Pollen allergen
  misc_feature (75)..(161): Pfam Name: DPBB_1 Pfam Description: Rare lipoprotein A (RlpA)-like double
  misc_feature: Public GI ID no. 18396479
  misc_feature: Bit score of 685.4 for HMM based on sequences of Figure 36
  misc_feature: Functional Homolog Of SEQ ID NO. 629
  misc_feature: in Figure 36
MQRFLLPLLFLALSPPAICHYSSSTSSPSSSSVSSDASEWRPARATYYAATNPRDAVGGACGYGDLVKSGYGMATVGLSETLFERGQICGACFELRCVDDLRWCIPGTSIILTATNFCAPNYGFDPDGGGHCNPPNKHFVLPIEAFEKIAIWKAGNMPVQYRRINCRKEGSMRFTVDGGGIFISVLITNVAGSGDIAAVKIKGSRTGWLPMGRNWGQNWHINADLRNQALSFEVTSSDRSTVTSYNVSPKNWNYGQTFEGKQFETP

SEQ ID NO: 638 - protein, 267 aa, Solanum lycopersicum
  misc_feature (174)..(251): Pfam Name: Pollen_allerg_1 Pfam Description: Pollen allergen
  misc_feature (77)..(163): Pfam Name: DPBB_1 Pfam Description: Rare lipoprotein A (RlpA)-like double
  misc_feature: Public GI ID no. 4138912
  misc_feature: Bit score of 660.7 for HMM based on sequences of Figure 36
  misc_feature: Functional Homolog Of SEQ ID NO. 629
  misc_feature: in Figure 36
MLLQLLLTLTLCSTFSLAHSHYNWSPSSSSTVAAAAAHPSEWRPGRATYYAPADPRDVVGGACGYGDLERSGYGKSTAGLSTVLFEKGQICGACFEVRCVEELRWCIPGTSIIVTATNFCAPNYGFEPDGGGHCNPPNAHFVLPIEAFEKIAIWKASNMPVQYRRIKCRKEGGVRFTINGAGIFLSVLISNVAGAGDIVAAKVKGSRTGWLPMGRIWGQNWHISADLKNQPLSFEITSSDGVTLTSYNVAPKIWNFGQTFQGKQFES

SEQ ID NO: 639 - DNA, 1110 bp, Panicum virgatum
  misc_feature: Ceres Clone ID no. 1722246
  misc_feature: Encodes the peptide sequence at SEQ ID NO. 640
cgtccactcccctgcttcaccgaagcgtgccggcaccggcagcaagcagtcgggagctatggctccgccgctactgctcgtcctcctcctcctcccggccctagccgccggccaccagcacccgtcctccttcggctcctccgccctctccgagtggcgctccgccaaggcctcctactacgccgccgaccccgaggacgccatcggtggagcgtgcgggttcggggatctgggcaagcacgggtacgggatggcgacggtggggctgagcacggcgctgttcgagcgcggcgcggcgtgcggcggctgctacgaggtcaagtgcgtcgaggatctcaaatattgtctccccggcacctccatcgtcgtcacggccaccaacttctgcgcccccaactacggcctccccgccgacgccggcggccactgcaacccgcccaaccaccacttcctcctccccatccaggcgttcgagaagattgccctctggaaggccggcgtcatgcccatccaataccgccgtgttaagtgcctccgtgaaggtggtgtcaggttctctgtcaatggtcgacacttcttcttcacagtgctaatcagcaacgttggtggtgcgggtgatgtgagatcggtgaagatcaaaggaacagagtcaggatggctctcgatgggccgcaactggggtcaggtgtggcacatcaactgtgacatgaggggccagcccctgtccttcgagctcagctcaagcgatggcaagacgctgaccagtttcaatgtcgtgcccaaggattgggaatatggaaaaacatacaccgggaaacagtttctgctgtagatggagtaccacacgatcagcttacagtttctaatttttgttctgatcctacgagttggactgtggtgtatattcctctgtggaacaagtaatatcattaggagaaagttactagtgcagggcctcaaatagtagttcttgctcataaatgcattttcgtgtcccctgatagaaggcttgatgtatcgatcaaaatagaaggccgtattttgggcgtctccattgtattacaacattttacctggcaagcaatgataatagtatctctgcatttctgc

SEQ ID NO: 640 - protein, 257 aa, Panicum virgatum
  misc_feature (164)..(241): Pfam Name: Pollen_allerg_1 Pfam Description: Pollen allergen
  misc_feature (67)..(153): Pfam Name: DPBB_1 Pfam Description: Rare lipoprotein A (RlpA)-like double
  misc_feature: Ceres Clone ID no. 1722246
  misc_feature: Bit score of 670.7 for HMM based on sequences of Figure 36
  misc_feature: Functional Homolog Of SEQ ID NO. 629
MAPPLLLVLLLLPALAAGHQHPSSFGSSALSEWRSAKASYYAADPEDAIGGACGFGDLGKHGYGMATVGLSTALFERGAACGGCYEVKCVEDLKYCLPGTSIVVTATNFCAPNYGLPADAGGHCNPPNHHFLLPIQAFEKIALWKAGVMPIQYRRVKCLREGGVRFSVNGRHFFFTVLISNVGGAGDVRSVKIKGTESGWLSMGRNWGQVWHINCDMRGQPLSFELSSSDGKTLTSFNVVPKDWEYGKTYTGKQFLL

SEQ ID NO: 641 - DNA, 1148 bp, Zea mays
  misc_feature: Ceres Clone ID no. 100892266
  misc_feature: Encodes the peptide sequence at SEQ ID NO. 642
cctctcggaacctcactccttcctctcccagtccccagcttcaccgaggcatacggcataccataccggcaccggcagcgagcagtcgggagccatggctccgccgctcctgctcttcttcctcctcctccccctcctcacggccctcgctgacggacaccagcacctgtcctcctacggctcctccgcgctctccgattggcgccccgccaaggcatcctactacgccgccgaccccgaagacgccatcggtggggcgtgcgggttcggggatctggggaaacacggctacgggatggcgacggtggggctgagcacggcgctgtttgagcgcggtgcggcgtgcggcggctgctacgaggtcaagtgcgtcgaggacctcaagtactgcctccccggcacctccatcgtcgtcacggcaaccaacttctgcgccccaaactacggccttcccgccgacgccggcggccactgcaacccgcccaaccaccatttcctcctacccatccagtcgtttgagaagatcgcgctctggaaggccggcatcatgcccatccagtaccgccgtgttaagtgcctccgcgaaggtggtgtcaggttctccgtcaacggtcggcacttcttcttcacagtcctaatcagcaacgttggtggcgcgggtgatgttaggtctgtgaagatcaaaggaacggagctaggatggctccctatgggccgcaactggggccaggtgtggcacatcaactgtgacatgaggggacagcctctatcgtttgagctcagctcaagcgatagcaagacgctgaccagtttcaacgtcgtgcccaaggattgggagttcggcaagacatacacggggaagcagtttcttctgtagagaatggagtgccgcaagatcagcttacagttcctcatttttcttctgatcctacgagttgggctgtggtgtatgtatattcctctgcagaagaagcaatatcgttattaggagaaaatcacttagtgcagggctcagatagttactatggctcataacgccttttcatgtacccttcatagttgtctaaagaggcttgatgtatcattcaaaataggaggccggattcgggtatgtccggtgtattacaatatattttttttcctggcaa

SEQ ID NO: 642 - protein, 260 aa, Zea mays
  misc_feature (167)..(244): Pfam Name: Pollen_allerg_1 Pfam Description: Pollen allergen
  misc_feature (70)..(156): Pfam Name: DPBB_1 Pfam Description: Rare lipoprotein A (RlpA)-like double
  misc_feature: Ceres Clone ID no. 100892266
  misc_feature: Bit score of 653.0 for HMM based on sequences of Figure 36
  misc_feature: Functional Homolog Of SEQ ID NO. 629
MAPPLLLFFLLLPLLTALADGHQHLSSYGSSALSDWRPAKASYYAADPEDAIGGACGFGDLGKHGYGMATVGLSTALFERGAACGGCYEVKCVEDLKYCLPGTSIVVTATNFCAPNYGLPADAGGHCNPPNHHFLLPIQSFEKIALWKAGIMPIQYRRVKCLREGGVRFSVNGRHFFFTVLISNVGGAGDVRSVKIKGTELGWLPMGRNWGQVWHINCDMRGQPLSFELSSSDSKTLTSFNVVPKDWEFGKTYTGKQFLL

SEQ ID NO: 643 - DNA, 1216 bp, Triticum aestivum
  misc_feature: Ceres Clone ID no. 683350
  misc_feature: Encodes the peptide sequence at SEQ ID NO. 644
aaattaaaaagacagaacaccgaagcaccgaagcgcagctccaccaccatttcacactctcccctgcttcacttcactgagaagcacacggacgaaaagctgcttgctgggagccatggctcccccgctcctcctcctcgtcctcttcctcctcccggccctcgccgccggccaccagcacccctcctcctacggctcctccgccctctccgaatggcgcaacgccaagtcctcctacttcgccgccgaccccggagacgccatcggtggcgcgtgcgggttcggggatctggggaagcacgggtacgggatggcgacggtggggctgagcacggcgctgttcgagcgcggcgccgcctgcggcggctgctacgaggtcaagtgcgtggaggacctcaagtactgcctccccggcacctccatcgtcgtcacggccaccaacttctgcccgcccaactacggcttccccgccgacgccggcggcgtctgcaacccgcccaaccaccatttcctcctccccatccaggcgttcgagaagattgcgctctggaaggccggcgtcatgcccatccagtaccgccgcgtcaagtgccttcgtgaaggcggcgtgcggttctcggtctccgggaagagcttcttcttcacagtcctaatcagcaatgtcggcggcgctggcgatgtcagatcagtgaagatcaaaggaacagagtctggctggctcgacatgggccgcaactggggccagatatggcacatcaacttagatctcacagggcagccggtgtcctttgagctcacctcgagtgacggcacgacaatgaccaatttcaacgttgtgcccaaggattgggagtttggcaaaacatacaccggcaagcaattcctgctctagagaattattgatagcgacttacaattttctcaaagaagaaaaatcatcctatgagttggttgtagtactgtatatccttctgaggaacaagattattattaggaaaggaatataatctctaccctactgtacattcctctgaggaaagagctgattattaggaaaaatatcagtttagtgcaaagcctcagatagttgttctacatactacatgcagttgtaattgtcggatgtactatttcaaatctgatagttgctccagaggcttgatgtatcattcagaaatgttctgatagttgccccagtgcttgatgtattattcag

SEQ ID NO: 644 - protein, 258 aa, Triticum aestivum
  misc_feature (68)..(154): Pfam Name: DPBB_1 Pfam Description: Rare lipoprotein A (RlpA)-like double
  misc_feature (165)..(242): Pfam Name: Pollen_allerg_1 Pfam Description: Pollen allergen
  misc_feature: Ceres Clone ID no. 683350
  misc_feature: Bit score of 659.5 for HMM based on sequences of Figure 36
  misc_feature: Functional Homolog Of SEQ ID NO. 629
MAPPLLLLVLFLLPALAAGHQHPSSYGSSALSEWRNAKSSYFAADPGDAIGGACGFGDLGKHGYGMATVGLSTALFERGAACGGCYEVKCVEDLKYCLPGTSIVVTATNFCPPNYGFPADAGGVCNPPNHHFLLPIQAFEKIALWKAGVMPIQYRRVKCLREGGVRFSVSGKSFFFTVLISNVGGAGDVRSVKIKGTESGWLDMGRNWGQIWHINLDLTGQPVSFELTSSDGTTMTNFNVVPKDWEFGKTYTGKQFLL

SEQ ID NO: 645 - DNA, 1220 bp, Glycine max
  misc_feature: Ceres Clone ID no. 659599
  misc_feature: Encodes the peptide sequence at SEQ ID NO. 646
aggttgcaaataaagaaacccataatcgattcctttcttttctctctattttccattttcctggtttgcttgggttctccgaatccaaaatgttggcactcacactatccattctcatcatcgctacactctcttcttcgccactagtcacctctcactactcctcttccactctcgagtcccctccttcttctctagaagcctccccgaccttctccgaatggcgatccgcgcgcgccacctactacgtcgcggcggatccccgcgacgcggtgggcggcgcgtgcggctacggcgacctggttaagggcggctacggcatggccacggtggggctcagcgaggccctgttcgagcgcggccagatctgtggcgcgtgcttcgagctccgctgcgtcgaggacatgcgctggtgcatccccggcacctccatcatcgtcaccgccaccaacttctgcgcccccaactacggcttcacctccgacggcggcggacactgtaaccctcccaacaagcatttcgttctccccatcgaagcttttgagaagatcgccatttggaaagccggcaacatgcccgtgcagtatcgcaggataaagtgtaggaaggaaggagggatgcgatttactgttactggttctggaatcttcatttcagtgctgatcagtaatgttgctggccacggagacataggggaggtgaaggttaaaggctccagaaccggttggctttcaatgggtcggaattgggggcaaaactggcatgtaaatgcgttgctgcaaaaccagcctctttcgttcgaggttaaagctagtgatggcaaaacggttacttcttacaatgttgctcccaaggattggacctttggacaaacctttgaaggcaagcaatttgagacttgaaagctcaatgaatcgaagagagatcttgttttaaagggaccattctccttccccaaatttttttaccccgatggtgattaaaaggtctacttgccggtggttttctttctacattttgattctttttggttttgtagaagactgtgtagatagcaaatgatttggggtggtttgtatgaaaaggttgtcaatgtgatgatgtacctttccatttatcttcttaggaagttttgtatgaaaaaatatatactatatgtataccttgttggtcaaccagcgccaaagaagacttccaatgtaaaatgttgtgagcctctc

SEQ ID NO: 646 - protein, 270 aa, Glycine max
  misc_feature (177)..(254): Pfam Name: Pollen_allerg_1 Pfam Description: Pollen allergen
  misc_feature (80)..(166): Pfam Name: DPBB_1 Pfam Description: Rare lipoprotein A (RlpA)-like double
  misc_feature: Ceres Clone ID no. 659599
  misc_feature: Bit score of 617.4 for HMM based on sequences of Figure 36
  misc_feature: Functional Homolog Of SEQ ID NO. 629
MLALTLSILIIATLSSSPLVTSHYSSSTLESPPSSLEASPTFSEWRSARATYYVAADPRDAVGGACGYGDLVKGGYGMATVGLSEALFERGQICGACFELRCVEDMRWCIPGTSIIVTATNFCAPNYGFTSDGGGHCNPPNKHFVLPIEAFEKIAIWKAGNMPVQYRRIKCRKEGGMRFTVTGSGIFISVLISNVAGHGDIGEVKVKGSRTGWLSMGRNWGQNWHVNALLQNQPLSFEVKASDGKTVTSYNVAPKDWTFGQTFEGKQFET

SEQ ID NO: 647 - DNA, 1151 bp, Gossypium hirsutum
  misc_feature: Ceres Clone ID no. 1793544
  misc_feature: Encodes the peptide sequence at SEQ ID NO. 648
aatggcaagttcacattttgatgaaaaagatggaatcgattccgctacatgttatttttcagacaccaatctaattaagctctttaactttcctctgttctttagtttactgtctctttcctttgttttgtctctaaacaaaatgtcgaacctatcttctataactgcaactgcagctcttcttctctcgctcatctctactgtcacttcccattactcttcctcctccttctcttcttccccaccggcgccacagtccaccgtctggcactccgcacgcgccacttactatgccgcatcggatcctcgcgacgccgtcggcggtgcttgtgggtatggagacctagtcaaggctgggtacggtatggcgactgtgggtttaagtgaagctttgtttcagcgtggacagatctgcggtgcttgtttcgagttaaggtgtgtggacgacctgcggtggtgcatacctgggacatcttacattgtcaccgccactaatttctgtgctccaaattatgggttcacggcggaaggcggtgggcgttgtaatcctcctaacaaacactttgtacttcccattgaagcttttgaaaagattgctatttggaaagctggtaacatgcctgtccagtatcgaaggataaagtgcagaagagaaggaggtgtacgattcaccattgatggctcagggatcttcgtgtcagttctcatcagcaatgttggaggcgctggtgacatagttgcagttaagattaaaggctcaagaacagggtggttaccgatgggtcggaattggggacaaaattggcatataaattctgatctaaggaatcaaccactttcatttgaggtcactaatagtgatggtcttacacttacatcttacaatgttgctcctaaaaattggaactttggccaaacttttgaaggaaagcaattcgaggtctaagatgaaagaaaagcatcatcatcaacacaatgtaatgttgggtattatttattttatatatatagaccagactgtcctattcttttctttctttttgtttatctgttgttttgtactgattggggatggaaatggaagggtagaattggcgacttttttattgtgtgtaaggacttaaaatagcaggatatatcaattttgcccg

SEQ ID NO: 648 - protein, 267 aa, Gossypium hirsutum
  misc_feature (174)..(251): Pfam Name: Pollen_allerg_1 Pfam Description: Pollen allergen
  misc_feature (77)..(163): Pfam Name: DPBB_1 Pfam Description: Rare lipoprotein A (RlpA)-like double
  misc_feature: Ceres Clone ID no. 1793544
  misc_feature: Bit score of 620.6 for HMM based on sequences of Figure 36
  misc_feature: Functional Homolog Of SEQ ID NO. 629
MSNLSSITATAALLLSLISTVTSHYSSSSFSSSPPAPQSTVWHSARATYYAASDPRDAVGGACGYGDLVKAGYGMATVGLSEALFQRGQICGACFELRCVDDLRWCIPGTSYIVTATNFCAPNYGFTAEGGGRCNPPNKHFVLPIEAFEKIAIWKAGNMPVQYRRIKCRREGGVRFTIDGSGIFVSVLISNVGGAGDIVAVKIKGSRTGWLPMGRNWGQNWHINSDLRNQPLSFEVTNSDGLTLTSYNVAPKNWNFGQTFEGKQFEV

SEQ ID NO: 649 - DNA, 822 bp, Populus balsamifera subsp. trichocarpa
  misc_feature: Ceres Annot ID no. 1449519
  misc_feature: Encodes the peptide sequence at SEQ ID NO. 650
atgccaccaccattaccccaaaaccccattcacactctcctaaaacccctcctcctcctcctcttcatcttccccaccgccaccacctccctcacttcttccaccactacaccaccacctctctccaccaccctatcccaatggcaatccgcacgcgctacttactacgcagcatccgatccccgggacacagtaggaggtgcgtgtggatatggggacttagttaaagcaggatatggaatggcaaccgtgggattgagtgaatcaatgtttgaacgtggacagatctgtggcgcgtgttttgaacttaagtgtgttgatgatctgaggtggtgtattcctgggacttctattattgtttctgtcactaatttttgtgctccaaattatgggttcacttctgatggtggtggaaaatgtaatcctcctaataagcattttgtgctgcctattgaagcttttgaaaagattgccatttggaaggctgctaatatgcctgttcagtatagaaggattaaatgcagaaaggaaggagggattcggtttaatatctctgggtccggtattttcctttcggtgctgatcagcaatgttgcaggtgctggagatgtcactgcagtgaagattaaaggttcaagaacaggctggcttgatatgggcaggaattggggccaaaactggcatgttaatgctaatttacagaatcaagctctctcatttgaggtcactagtagtgataggatgactgttatatcttacaatgttgctcccaaagattggagatttggacaggcctttgaaggcaagcaatttgagacttaa

SEQ ID NO: 650 - protein, 273 aa, Populus balsamifera subsp. trichocarpa
  misc_feature (180)..(257): Pfam Name: Pollen_allerg_1 Pfam Description: Pollen allergen
  misc_feature (83)..(169): Pfam Name: DPBB_1 Pfam Description: Rare lipoprotein A (RlpA)-like double
  misc_feature: Ceres Annot ID no. 1449519
  misc_feature: Bit score of 598.2 for HMM based on sequences of Figure 36
  misc_feature: Functional Homolog Of SEQ ID NO. 629
MPPPLPQNPIHTLLKPLLLLLFIFPTATTSLTSSTTTPPPLSTTLSQWQSARATYYAASDPRDTVGGACGYGDLVKAGYGMATVGLSESMFERGQICGACFELKCVDDLRWCIPGTSIIVSVTNFCAPNYGFTSDGGGKCNPPNKHFVLPIEAFEKIAIWKAANMPVQYRRIKCRKEGGIRFNISGSGIFLSVLISNVAGAGDVTAVKIKGSRTGWLDMGRNWGQNWHVNANLQNQALSFEVTSSDRMTVISYNVAPKDWRFGQAFEGKQFET

SEQ ID NO: 651 - protein, 295 aa, Arabidopsis thaliana
  misc_feature (201)..(278): Pfam Name: Pollen_allerg_1 Pfam Description: Pollen allergen
  misc_feature (75)..(161): Pfam Name: DPBB_1 Pfam Description: Rare lipoprotein A (RlpA)-like double
  misc_feature: Public GI ID no. 6714416
  misc_feature: Bit score of 640.8 for HMM based on sequences of Figure 36
  misc_feature: Functional Homolog Of SEQ ID NO. 629
MQRFLLPLLFLALSPPAICHYSSSTSSPSSSSVSSDASEWRPARATYYAATNPRDAVGGACGYGDLVKSGYGMATVGLSETLFERGQICGACFELRCVDDLRWCIPGTSIILTATNFCAPNYGFDPDGGGHCNPPNKHFVLPIEAFEKIAIWKAGNMPVQYRRCVSLRFFPICFAHERTEIDCFCEVLGTMRINCRKEGSMRFTVDGGGIFISVLITNVAGSGDIAAVKIKGSRTGWLPMGRNWGQNWHINADLRNQALSFEVTSSDRSTVTSYNVSPKNWNYGQTFEGKQFETP

SEQ ID NO: 652 - DNA, 924 bp, Populus balsamifera subsp. trichocarpa
  misc_feature: Ceres Annot ID no. 1487289
  misc_feature: Encodes the peptide sequence at SEQ ID NO. 653
atgccaccgccattacttcaaggccctattcacactctcctgaaacctctcctcctcctcctcctcctcctcactctcccccccaccaccacctcccacacctcttccaccaccacccctccacctctgtccacttacctatcccaatggcaacccgcacgcgctacttactacgcagcatccgatccccgggacacagtaggaggcgcgtgtggatatggggacttggttaaggcgggatatggaatggcaactgtagcattgagtgaatcaatgtttgaacgtggacagatctgtggcgcgtgttttgaaatcaaatgtgttgatgatttgaggtggtgtattcctgggacttctattattgtttctgttactaatttttgtgctccaaattatgggttcccttctgatgctggtggaaaatgtaatactccaaataagcactttgtgctgcccattgaatcttttgaaaagattgccatttggaaggctgctaatatgcctgttcagtacagaagtgctaatgtgcacccggtctcctgcaaacttagtcatggcatcacttgtggggatttaatcaagagcacctgttttggctttgaaaattcaaaggggattaagtgcagaaaggaaggagggattcggtttacaatctctgggtccggtatcttcctttctgtgctgatcagcaatgttgcaggtgctggagacgtaacttcagtgaggattaaaggttcaagaacgggttggcttgatatgggtaggaactggggccaaaactggcatgttaatgctaatttacagaatcaagctctctcatttgaggtcaccagtagtcataagatgactgttctttcttacaccgttgctcccaaagattggagatttggacaaacctttgaaggcaagcaatttgagacttga

SEQ ID NO: 653 - protein, 307 aa, Populus balsamifera subsp. trichocarpa
  misc_feature (214)..(291): Pfam Name: Pollen_allerg_1 Pfam Description: Pollen allergen
  misc_feature (85)..(171): Pfam Name: DPBB_1 Pfam Description: Rare lipoprotein A (RlpA)-like double
  misc_feature: Ceres Annot ID no. 1487289
  misc_feature: Bit score of 542.8 for HMM based on sequences of Figure 36
  misc_feature: Functional Homolog Of SEQ ID NO. 629
MPPPLLQGPIHTLLKPLLLLLLLLTLPPTTTSHTSSTTTPPPLSTYLSQWQPARATYYAASDPRDTVGGACGYGDLVKAGYGMATVALSESMFERGQICGACFEIKCVDDLRWCIPGTSIIVSVTNFCAPNYGFPSDAGGKCNTPNKHFVLPIESFEKIAIWKAANMPVQYRSANVHPVSCKLSHGITCGDLIKSTCFGFENSKGIKCRKEGGIRFTISGSGIFLSVLISNVAGAGDVTSVRIKGSRTGWLDMGRNWGQNWHVNANLQNQALSFEVTSSHKMTVLSYTVAPKDWRFGQTFEGKQFET

SEQ ID NO: 654 - protein, 252 aa, Pyrus communis
  misc_feature (160)..(237): Pfam Name: Pollen_allerg_1 Pfam Description: Pollen allergen
  misc_feature (64)..(149): Pfam Name: DPBB_1 Pfam Description: Rare lipoprotein A (RlpA)-like double
  misc_feature: Public GI ID no. 29467505
  misc_feature: Bit score of 361.4 for HMM based on sequences of Figure 36
  misc_feature: Functional Homolog Of SEQ ID NO. 629
MKMAFPSGFFLVGILAMLVASAHAYGGGWVNARATFYGGGDASGTMGGACGYGNLYSQGYGTNTAALSTALFNNGLGCGSCYEIRCVNDPKWCLPGSIVVTATNFCPPNNALPNNAGGWCNPPQHHFDLSQPIFQHIAQYKAGVVPVSYRRVPCRRRGGIRFTINGHSYFNLVLITNVGGAGDVHSVSIKGSRSGWQAMSRNWGQNWQSNSYLNGQALSFKVTTSDGRTVVSYNAAPAGWSFGQTYSGAQFR

SEQ ID NO: 655 - protein, 236 aa, Pyrus pyrifolia
  misc_feature (144)..(221): Pfam Name: Pollen_allerg_1 Pfam Description: Pollen allergen
  misc_feature (48)..(133): Pfam Name: DPBB_1 Pfam Description: Rare lipoprotein A (RlpA)-like double
  misc_feature: Public GI ID no. 147712812
  misc_feature: Bit score of 343.8 for HMM based on sequences of Figure 36
  misc_feature: Functional Homolog Of SEQ ID NO. 629
MLVASAHAYGGGWVNARATFYGGGDASGTMGGACGYGNLYSQGYGTNTAALSTALFNNGLGCGSCYEIRCVNDPKWCLPGSIVVTATNFCPPNNALPNNAGGWCNPPQHHFDLSQPIFQHIAQYKAGVVPVSYRRVPCRRRGGIRFTINGHSYFNLVLITNVGGAGDVHSVSIKGSRTGWQAMSRNWGQNWQSNSYLNGQALSFKVTTSDGRTVVSYNAAPAGWSFGQTYSGAQFR

SEQ ID NO: 656 - protein, 253 aa, Pyrus communis
  misc_feature (161)..(238): Pfam Name: Pollen_allerg_1 Pfam Description: Pollen allergen
  misc_feature (65)..(150): Pfam Name: DPBB_1 Pfam Description: Rare lipoprotein A (RlpA)-like double
  misc_feature: Public GI ID no. 29467507
  misc_feature: Bit score of 354.8 for HMM based on sequences of Figure 36
  misc_feature: Functional Homolog Of SEQ ID NO. 629
MKMASSSGFFMAGLLAMLVASAHAYGGGGWVNARATFYGGGDASGTMGGACGYGNLYSQGYGTNTAALSTALFNNGLGCGSCYEIRCVNDPKWCLPGSIVVTATNFCPPNNALPNNAGGWCNPPQHHFDLSQPVFQHIAQYKAGVVPVSYRRVPCMRRGGIRFTINGHSYFNLVLITNVGGAGDVHSVSVKGSRTGWQAMSRNWGQNWQSNSYLNGQALSFKVTTSDGRTVVSYNAAPAGWSFGQTYSGAQLR

SEQ ID NO: 657 - protein, 252 aa, Prunus persica
  misc_feature (160)..(237): Pfam Name: Pollen_allerg_1 Pfam Description: Pollen allergen
  misc_feature (64)..(149): Pfam Name: DPBB_1 Pfam Description: Rare lipoprotein A (RlpA)-like double
  misc_feature: Public GI ID no. 29466641
  misc_feature: Bit score of 361.0 for HMM based on sequences of Figure 36
  misc_feature: Functional Homolog Of SEQ ID NO. 629
MKMALAYGFCLVGLLAMVSCAHAYGGGGWVNARATFYGGGDASGTMGGACGYGNLYSQGYGTNTAALSTALFNNGLGCGSCYEIRCVSDPKWCLPGAIVVTATNFCPPNNALPNNAGGWCNPPQHHFDLSQPVFQHIAQYKAGVVPVAYRRVPCRRRGGIRFTINGHSYFNLVLITNVGGAGDVHSVSVKGSRTGWQAMSRNWGQNWQSNSYLNGQSLSFKVTTSDGRTVVSYNAAPAGWSFGQTYSGAQFR

SEQ ID NO: 658 - protein, 252 aa, Prunus cerasus
  misc_feature (160)..(237): Pfam Name: Pollen_allerg_1 Pfam Description: Pollen allergen
  misc_feature (64)..(149): Pfam Name: DPBB_1 Pfam Description: Rare lipoprotein A (RlpA)-like double
  misc_feature: Public GI ID no. 17484121
  misc_feature: Bit score of 359.7 for HMM based on sequences of Figure 36
  misc_feature: Functional Homolog Of SEQ ID NO. 629
MKMALAYGFCLVGLLAMVSCAHAYGGGGWVNARATFYGGGDASGTMGGACGYGNLYSQGYGTNTAALSTALFNNGLGCGSCYEIRCVNDPKWCLPGAIVVTATNFCPPNNALPNNAGGWCNPPQHHFDLSQPVFQHIAQYKAGVVPVAYRRVPCRRRGGIRFTINGHSYFNLVLITNVGGAGDVHSVSVKGSRTGWQAMSRNWGQNWQSNSYLNGQSLSFKVTTSDGRTVVAYNAAPAGWSFGQTYSGAQFR

SEQ ID NO: 659 - protein, 252 aa, Prunus avium
  misc_feature (160)..(237): Pfam Name: Pollen_allerg_1 Pfam Description: Pollen allergen
  misc_feature (64)..(149): Pfam Name: DPBB_1 Pfam Description: Rare lipoprotein A (RlpA)-like double
  misc_feature: Public GI ID no. 10180019
  misc_feature: Bit score of 359.0 for HMM based on sequences of Figure 36
  misc_feature: Functional Homolog Of SEQ ID NO. 629
MKMALAYGFCLVGLLAMVSCAHAYGGGGWVDARATFYGGSDASGTMGGACGYGNLYSQGYGTNTAALSTALFNNGLGCGSCYEIRCVNDPKWCLPGAIVVTATNFCPPNNALPNNAGGWCNPPQHHFDLSQPVFQHIAQYKAGVVPVAYRRVPCRRRGGIRFTINGHSYFNLVLITNVGGAGDVHSVSVKGSRTGWQAMSRNWGQNWQSNSYLNGQSLSFKVTTSDGRTVVSYNAAPAGWSFGQTYSGAQLR

SEQ ID NO: 660 - protein, 249 aa, Populus tremula x Populus tremuloides
  misc_feature (157)..(234): Pfam Name: Pollen_allerg_1 Pfam Description: Pollen allergen
  misc_feature (61)..(146): Pfam Name: DPBB_1 Pfam Description: Rare lipoprotein A (RlpA)-like double
  misc_feature: Public GI ID no. 38046730
  misc_feature: Bit score of 356.5 for HMM based on sequences of Figure 36
  misc_feature: Functional Homolog Of SEQ ID NO. 629
MALAGIFLVGFLAMVSSVYGYGGGGWINAHATFYGGGDASGTMGGACGYGNLYSQGYGTNTAALSTALFNSGLSCGSCFEIRCVNDPKWCLPGSIVITATNFCPPNNALPNNAGGWCNPPQHHFDLSQPVFQHIAQYRAGIVPVSYRRVPCRRRGGIRFTVNGHSYFNLVLITNVGGAGDVHSVSIKGSRTGWQPMSRNWGQNWQSNNYLNGQSLSFKVTTSDGRTVVSYNVAPSSWSFGQTFSGAQFR

SEQ ID NO: 661 - DNA, 750 bp, Populus balsamifera subsp. trichocarpa
  misc_feature: Ceres Annot ID no. 1464450
  misc_feature: Encodes the peptide sequence at SEQ ID NO. 662
atggctctagctggtattttcttggtgggtttccttgcaatggtttcatctgtttatggttatggcggtggaggctggattaatgctcatgcaacattctacggaggtggtgatgcttctggcacaatgggtggggcttgcggttatgggaacttgtacagccaggggtatggtactaatactgcagctttgagcacagctctgttcaacagcgggttaagctgtggatcttgctatgagatcaggtgcgtgaatgaccccaaatggtgcctgcctggctccattgtgatcaccgccaccaatttctgccctccgaacaatgccctgcctaacaatgcagggggctggtgtaatcctcctcaacaccattttgatctctcccagcctgtcttccaacacattgcccaatttagagcaggaattgtgcctgtgtcttacagaagggtaccctgcaggaggagaggaggcataaggttcacaatcaatggccactcttacttcaatctagtcctgatcactaacgttggtggtgctggtgatgtacattctgtgtccatcaaggggtccaggactggttggcaaccaatgtcaaggaactgggggcaaaattggcagagcaacaactatctcaatggacaaagtctttcctttaaggtcaccaccagtgatggtcgaactgtggtctcctacaatgcggctccttctagctggtcctttgggcagaccttctccggcgcccagtttcgttag

SEQ ID NO: 662 - protein, 249 aa, Populus balsamifera subsp. trichocarpa
  misc_feature (157)..(234): Pfam Name: Pollen_allerg_1 Pfam Description: Pollen allergen
  misc_feature (61)..(146): Pfam Name: DPBB_1 Pfam Description: Rare lipoprotein A (RlpA)-like double
  misc_feature: Ceres Annot ID no. 1464450
  misc_feature: Bit score of 352.2 for HMM based on sequences of Figure 36
  misc_feature: Functional Homolog Of SEQ ID NO. 629
MALAGIFLVGFLAMVSSVYGYGGGGWINAHATFYGGGDASGTMGGACGYGNLYSQGYGTNTAALSTALFNSGLSCGSCYEIRCVNDPKWCLPGSIVITATNFCPPNNALPNNAGGWCNPPQHHFDLSQPVFQHIAQFRAGIVPVSYRRVPCRRRGGIRFTINGHSYFNLVLITNVGGAGDVHSVSIKGSRTGWQPMSRNWGQNWQSNNYLNGQSLSFKVTTSDGRTVVSYNAAPSSWSFGQTFSGAQFR

SEQ ID NO: 663 - protein, 246 aa, Vitis vinifera
  misc_feature (154)..(231): Pfam Name: Pollen_allerg_1 Pfam Description: Pollen allergen
  misc_feature (58)..(143): Pfam Name: DPBB_1 Pfam Description: Rare lipoprotein A (RlpA)-like double
  misc_feature: Public GI ID no. 225464253
  misc_feature: Bit score of 346.6 for HMM based on sequences of Figure 36
  misc_feature: Functional Homolog Of SEQ ID NO. 629
MTLVGLFLVGFLSMVSSVHGQGWINAHATFYGGGDASGTMGGACGYGNLYSEGYGTNTAALSTALFNNGLSCGSCYEIKCVNDGKWCLPGSIVITATNFCPPNNALPNNAGGWCNPPLHHFDLSQPVFQHIAQYRAGIVPVSYRRVPCRRRGGIRFTINGHSYFNLVLITNVGGAGDVHAVAIKGSRTGWQSMSRNWGQNWQSNTYLNGQSLSFKVTTSNGHTIVSYNCVPAHWSFGQTFSGAQFR

SEQ ID NO: 664 - protein, 250 aa, Rumex palustris
  misc_feature (158)..(235): Pfam Name: Pollen_allerg_1 Pfam Description: Pollen allergen
  misc_feature (62)..(147): Pfam Name: DPBB_1 Pfam Description: Rare lipoprotein A (RlpA)-like double
  misc_feature: Public GI ID no. 20502788
  misc_feature: Bit score of 344.2 for HMM based on sequences of Figure 36
  misc_feature: Functional Homolog Of SEQ ID NO. 629
MAVVGLLLVGLLAMAASAEGYRGGGGWVNAHATFYGGGDASGTMGGACGYGNLYSQGYGTNTAALSTAMFNNGLACGSCYEITCVADRKWCIPGSIVVTATNFCPPNNALPNNAGGWCNPPLHHFDLAQPVFQHIAQYRAGIVPVAYRRVPCHRRGGIRFTINGHSYFNLVLITNVGGAGDVHSVAIKGSRTRWQAMSRNWGQNWQSNSYMNGQSLSFKVTTSDGHSVVSNNVAPSGWTFGQTYTGAQFR

SEQ ID NO: 665 - protein, 247 aa, Triphysaria versicolor
  misc_feature (155)..(232): Pfam Name: Pollen_allerg_1 Pfam Description: Pollen allergen
  misc_feature (59)..(144): Pfam Name: DPBB_1 Pfam Description: Rare lipoprotein A (RlpA)-like double
  misc_feature: Public GI ID no. 6942322
  misc_feature: Bit score of 360.5 for HMM based on sequences of Figure 36
  misc_feature: Functional Homolog Of SEQ ID NO. 629
MAFLGLFLLGFLTTLSQVHGYGGWINAHATFYGGSDASGTMGGACGYGNLYSQGYGTNTAALSTAMFNTGLSCGSCYEIRCVNDGKWCLPGSILVTATNFCPPNSALPNNAGGWCNPPLHHFDLAQPVFQHIAQYKAGIVPVAYRRVACRRRGGIRFTINGHSYFNLVLVTNVGGAGDVHAVSIKGSRTGWQPMSRNWGQNWQSNSNLNGQSLSFKVTTSDGRTVLSYNVAPARWSFGQTFAGGQFR

SEQ ID NO: 666 - protein, 250 aa, Cucumis sativus
  misc_feature (159)..(236): Pfam Name: Pollen_allerg_1 Pfam Description: Pollen allergen
  misc_feature (63)..(148): Pfam Name: DPBB_1 Pfam Description: Rare lipoprotein A (RlpA)-like double
  misc_feature: Public GI ID no. 1040875
  misc_feature: Bit score of 343.2 for HMM based on sequences of Figure 36
  misc_feature: Functional Homolog Of SEQ ID NO. 629
MAFSYSPFSSLFLLPFFFVFTFADYGGWQSGHATFYGGGDASGTMGGACGYGNLYSQGYGTNTVALSTALFNNGLSCGACFEMTCTNDPKWCLPGTIRVTATNFCPPNFALPNNNGGWCNPPLQHFDMAEPAFLQIAQYRAGIVPVSFRRVPCMKKGGVRFTINGHSYFNLVLITNVGGAGDVHSVSIKGSRTGWQSMSRNWGQNWQSNNYLNGQGLSFQVTLSDGRTLTAYNLVPSNWQFGQTYEGPQF

SEQ ID NO: 667 - protein, 253 aa, Dimocarpus longan
  misc_feature (162)..(239): Pfam Name: Pollen_allerg_1 Pfam Description: Pollen allergen
  misc_feature (66)..(151): Pfam Name: DPBB_1 Pfam Description: Rare lipoprotein A (RlpA)-like double
  misc_feature: Public GI ID no. 167860796
  misc_feature: Bit score of 352.2 for HMM based on sequences of Figure 36
  misc_feature: Functional Homolog Of SEQ ID NO. 629
MAVAAFSAVSLLFFMLISLCLQAVYGDDGGWQSGHATFYGGGDASGTMGGACGYGNLYGQGYGTNTAALSTALFNNGLSCGSCYEMKCDKDPKWCLPGSVIVTATNFCPPNNALANDNGGWCNPPLQHFDMAEPAFLQIAQYRAGIVPISFRRVPCVKKGGIRFTVNGHSYFNLVLITNVAGAGDVHSVSIKGSKTGWQPMSRNWGQNWQSNSYLNGQSLSFQVTTSDGKTVTSYNVVPANWQFGQTFSGAQF

SEQ ID NO: 668 - DNA, 777 bp, Arabidopsis thaliana
  misc_feature: Ceres Clone ID no. 14432
  misc_feature: Encodes the peptide sequence at SEQ ID NO. 669
ccttttccccttctaatctctctcgcatctctacattttgagatcattttaaattgtcctctcttttattttccggttaagcaccatgatgtctactatttccccggttttctcaaccgaaccgggtctattaacctctgtcctcccagcttttgaaaccagtttcactccatgggacatttcacacctcttctcggtcttcgattcatcaatcgatccaaaaccggtttcgacccatgactatggttcagtaaaccagatcggttcagacatgtctccgaccgacaataccgacgagcggaaaaagaaacggaaattatcgaaccgggaatcggctaagcggtcaagagagaagaaacaaaagcacttggaggagatgagtatccagctaaaccaactcaaaattcagaaccaagaattgaagaaccagcttcggtacgttttataccattgtcaacgaacgaagatggaaaatgatcgtctacttatggagcaccgtatactgcatgataagttgttgaacatcagacaagttttgatgtttcgtcaaacctaacgaagctcatcaaactgtgccacttggccttgtaataacagtactgttgttacggtccagcaagatccgtcgatcatgttatcataagttgaggtttctgaaattgtttcgacggtaaaatgggaacaatttgtaaaaacaattattgaaaaatgcatggatatacgttatcaaattagatttcgttttttatatattaataaataaataaataattaatt

SEQ ID NO: 669 - protein, 156 aa, Arabidopsis thaliana
  misc_feature (68)..(122): Pfam Name: bZIP_2 Pfam Description: Basic region leucine zipper
  misc_feature: Ceres Clone ID no. 14432
  misc_feature: Bit score of 324.6 for HMM based on sequences of Figure 4
  misc_feature: Functional Homolog Of SEQ ID NO. 669
  misc_feature: in Figure 4
MMSTISPVFSTEPGLLTSVLPAFETSFTPWDISHLFSVFDSLIDPKPVSTHDYGSVNQIGSDMSPTDNTDERKKKRKLSNRESAKRSREKKQKHLEEMSIQLNQLKIQNQELKNQLRYVLYHCQRTKMENDRLLMEHRILHDKLLNIRQVLMFRQT

SEQ ID NO: 670 - DNA, 669 bp, Populus balsamifera subsp. trichocarpa
  misc_feature: Ceres Annot ID no. 1510674
  misc_feature: Encodes the peptide sequence at SEQ ID NO. 671
atggtgggttccaccaattttgccataaatatgagccccctacgctgcaattcttccgtttcctcctccttccttcctccctcccctctctatcgagcaatttctatagccatgctgtccacagtttcggccacttacccattggttgaaccgatgctcgacaacccatttcagttctttgagaatggttttacgccttgggactgtttcgacccctttccaagtgctcctcaatcaccaaaaccttttggttcgagttccggttcggatgagtccaacctgttggaccagaaccctgacaattcaaactcaaactccggctccgatgaaccaaaccctccggtttcggtcatagacgaaaggaaacgtaggcggatggtatcaaaccgggagtcggcaaggcggtctcggatgcgaaaacagaagcacatggacaacctaaggaaccaggtgaaccggcttagggttgagaaccgtgaactgacgaaccggttgcggattgttttgtaccattgccacagtgtacgaacagaaaacgactggctccggtctgaatatagtatgctccgaaaaaagctgtcggaaacaagccaaatcttgatgatgaggcaactccaacaattcacgtccgcatggccatgcaataatattatttctgccaccgaataa

SEQ ID NO: 671 - protein, 222 aa, Populus balsamifera subsp. trichocarpa
  misc_feature (119)..(180): Pfam Name: bZIP_1 Pfam Description: bZIP transcription factor
  misc_feature: Ceres Annot ID no. 1510674
  misc_feature: Bit score of 531.9 for HMM based on sequences of Figure 4
  misc_feature: Functional Homolog Of SEQ ID NO. 669
  misc_feature: in Figure 4
MVGSTNFAINMSPLRCNSSVSSSFLPPSPLYRAISIAMLSTVSATYPLVEPMLDNPFQFFENGFTPWDCFDPFPSAPQSPKPFGSSSGSDESNLLDQNPDNSNSNSGSDEPNPPVSVIDERKRRRMVSNRESARRSRMRKQKHMDNLRNQVNRLRVENRELTNRLRIVLYHCHSVRTENDWLRSEYSMLRKKLSETSQILMMRQLQQFTSAWPCNNIISATE

SEQ ID NO: 672 - protein, 297 aa, Vitis vinifera
  misc_feature (144)..(207): Pfam Name: bZIP_1 Pfam Description: bZIP transcription factor
  misc_feature: Public GI ID no. 147825147
  misc_feature: Bit score of 755.2 for HMM based on sequences of Figure 4
  misc_feature: Functional Homolog Of SEQ ID NO. 669
  misc_feature: in Figure 4
MEGKGSPQSRLGEMVSHEEPSGSRGSTDPLDYVTPCLFKKQGRPTIVPGDSKAVSSTYRSSFPVMMSSETMLVSPFPSFEGGFTPWDSQELFSIFQSQEPVLSNSGSDESNRKPVNSNSGSDGPNRKPLHSNSGSDGPNREDSAAEERKRRRMISNRESARRSRMRKQKHIENLRNQLNQLRIQNRELTNRLRSFTYHSHLVDSDNVQLRSEAIILRRKLSEFRQILVFRQLQRQISSAWPCNSVTTSVNEQTPSLITTTHDASESAMGVPRMWRCELVIARWIMDLGIRTREEEWI

SEQ ID NO: 673 - DNA, 644 bp, Glycine max
  misc_feature: Ceres Clone ID no. 648620
  misc_feature: Encodes the peptide sequence at SEQ ID NO. 674
ccctttctccttccttcctttctcccctctctagtttataagcatgctttctgctcttccttttcagggaaacccattcccggcgttggactacgctttcatgccgtgggatgggcttgactctttgggcttcaagcccaccagccccaatcccgtcacttcgagttccggctcaggctacccaaaccgaacccatgccgaagaaaaaccggcctcggacaagtcgaaccacgtcacgtccgtcatggaggagcggaaacgcaggagaatgatatcgaaccgggaatcggcccgaaggtcacgcattcgtaaacagagacatcttgagaacttacggaaccagatgaatctatttagggttgaaaatcgaaaactgaacaacgggttgcagtttctccttcaccactgtaaccgcctgagaaccgaaaacgagtggctcctgtccgaacgacccatgctccgtcaaaaactagccaacataaatcaaattttgcttttccgacatttgcaaccattttcctctgcatggccctgcaatattgtcttggcggaataaacctttgatcaccattaaccatgtaaaccaatcacaattcgccctcccttattaaataactaaatgcagtaatatttgttgtccgtgt

SEQ ID NO: 674 - protein, 170 aa, Glycine max
  misc_feature (68)..(130): Pfam Name: bZIP_1 Pfam Description: bZIP transcription factor
  misc_feature: Ceres Clone ID no. 648620
  misc_feature: Bit score of 371.8 for HMM based on sequences of Figure 4
  misc_feature: Functional Homolog Of SEQ ID NO. 669
  misc_feature: in Figure 4
MLSALPFQGNPFPALDYAFMPWDGLDSLGFKPTSPNPVTSSSGSGYPNRTHAEEKPASDKSNHVTSVMEERKRRRMISNRESARRSRIRKQRHLENLRNQMNLFRVENRKLNNGLQFLLHHCNRLRTENEWLLSERPMLRQKLANINQILLFRHLQPFSSAWPCNIVLAE

SEQ ID NO: 675 - DNA, 1098 bp, Gossypium hirsutum
  misc_feature: Ceres Clone ID no. 1896520
  misc_feature: Encodes the peptide sequence at SEQ ID NO. 676
acaattctcttcatattatcttctcatttgattcaatccaagttctgggtttagtttctttaacttcaaaatccattacccatattggatttattagggtcttttgttttgtttttataaaacaaatcaaatatcttgatgctcaacctttttgtgttaatgtttgagattcatgtttccaattctcagtgaaatcttcttttctgggtttatgataaattccacattcatacgcaggacccatcttgttcaatctttctctgttgttttcctctactggttatattacgtttcataaagaaataatcatctttttttaacttatttatctttactactaaggtttttttttttttaattttatttgggtcctgctattatatattataaacaaaactcctataatggctacatcctcgggttcatcagcaacacaaatcaactcaggctcagaagaagcattaatggacgaaaggaaaaggaaacgaatgatatcgaacagggaatcagcaaggagatcaaggatgaggaaacaaaagcatttagatgatctaatgactcagttgactcagttgcagaaacaaaaccatgagatcatcacaaacataaacttcaccacacaacacctcttgaatgttgagtcagagaactcggtgcttagagctcaactcaatgaactcactcataggttacagtccttgaatgaaatcatcagcttcttgaatgatgatcatggcgatgacgacgacgatgatgataaaacaagcattgacttcactcagcctgctgtagctgatactgccttccttaatcctttccatttggctttcttgaatcaacctatcatggcctctgctgataacacgtttcagtattaattttctataatgccataattttaatgggatttttaatctcagtttatatatatatatatatatatagttgtacaagcagtagtatgaaataaaatatgtgaaaatcataaagctatggtatggttaatggtagatttttttcagctttgtggtgtttccaaaggttgttgataacagttgtttttgaccgatgaataatatgaaagaacatataatgctc

SEQ ID NO: 676 - protein, 157 aa, Gossypium hirsutum
  misc_feature (20)..(74): Pfam Name: bZIP_2 Pfam Description: Basic region leucine zipper
  misc_feature: Ceres Clone ID no. 1896520
  misc_feature: Bit score of 340.3 for HMM based on sequences of Figure 4
  misc_feature: Functional Homolog Of SEQ ID NO. 669
  misc_feature: in Figure 4
MATSSGSSATQINSGSEEALMDERKRKRMISNRESARRSRMRKQKHLDDLMTQLTQLQKQNHEIITNINFTTQHLLNVESENSVLRAQLNELTHRLQSLNEIISFLNDDHGDDDDDDDKTSIDFTQPAVADTAFLNPFHLAFLNQPIMASADNTFQY

SEQ ID NO: 677 - protein, 180 aa, Oryza sativa subsp. japonica
  misc_feature (34)..(97): Pfam Name: bZIP_1 Pfam Description: bZIP transcription factor
  misc_feature: Public GI ID no. 125603139
  misc_feature: Bit score of 384.9 for HMM based on sequences of Figure 4
  misc_feature: Functional Homolog Of SEQ ID NO. 669
  misc_feature: in Figure 4
MTLSGGTLSSGITSGSSHGTRSSGSEGDIQLQVQMDLKRKRRKESNRESAKRSRLRKQQHLDDLTSQVNQLKMENQQLTTTLNMVTQSCAFAESQNSVLRTQMMELDSRLSALREIIFYMNNGNQSPSNPTIAATTYPSTTTMTAATTGHYDYYDVFTANAWGSGMQMMQQPIDQFLYQC

SEQ ID NO: 678 - DNA, 552 bp, Populus balsamifera subsp. trichocarpa
  misc_feature: Ceres Annot ID no. 1470809
  misc_feature: Encodes the peptide sequence at SEQ ID NO. 679
atggccagcaacccatttcagtccttcgagaacggctttacgccttgggactgtttcgaccccttttcaagctctcctcagtcaccaaaacctgttggttcgagttccggttcggataaatccaaccaggcaggccaaaaccctgacaactcgaactcaaactctggttccgacgacccaaaccctcaagcttcactcatagatgagaggaaacgcaggcggatggtatcaaaccgggagtcggcaaggcggtcacggatgcgaaagcagaagcacgtagaaaacctaaggaaccaggtgaaccggcttaggattgagaaccgggaactgacgaaccggttgcgctttgttttgtaccattcccatggtgtacggacagactacgaccgactccggtctgagtatagtacgctccgaaaaaagctgtcggacatacgccaaattttgatgatgaggcaactccaagaattgacgtccgcgtggccatgcaataatatgattaccaccaccaccaccaccgaacaaatagctccatcattaatcacttcataa

SEQ ID NO: 679 - protein, 183 aa, Populus balsamifera subsp. trichocarpa
  misc_feature (66)..(120): Pfam Name: bZIP_2 Pfam Description: Basic region leucine zipper
  misc_feature: Ceres Annot ID no. 1470809
  misc_feature: Bit score of 349.9 for HMM based on sequences of Figure 4
  misc_feature: Functional Homolog Of SEQ ID NO. 669
MASNPFQSFENGFTPWDCFDPFSSSPQSPKPVGSSSGSDKSNQAGQNPDNSNSNSGSDDPNPQASLIDERKRRRMVSNRESARRSRMRKQKHVENLRNQVNRLRIENRELTNRLRFVLYHSHGVRTDYDRLRSEYSTLRKKLSDIRQILMMRQLQELTSAWPCNNMITTTTTTEQIAPSLITS

SEQ ID NO: 680 - protein, 207 aa, Vitis vinifera
  misc_feature (80)..(143): Pfam Name: bZIP_1 Pfam Description: bZIP transcription factor
  misc_feature: Public GI ID no. 157332804
  misc_feature: Bit score of 406.6 for HMM based on sequences of Figure 4
  misc_feature: Functional Homolog Of SEQ ID NO. 669
MMSSETMLVSPFPSFEGGFTPWDSQELFSIFQSQEPVRSNSGSDESNRKPVNSNSGSDGPNRKPLHSNSGSDGPNREDSAAEERKRRRMISNRESARRSRMRKQKHIENLRNQLNQLRIQNRELTNRLRSFTYHSHLVDSDNVQLRSEAIILRRKLSEFRQILVFRQLQRQISSAWPCNSKPPPINQIVMRANMLMSLKPSKVKQCS

SEQ ID NO: 681 - DNA, 756 bp, Populus balsamifera subsp. trichocarpa
  misc_feature: Ceres Annot ID no. 1457468
  misc_feature: Encodes the peptide sequence at SEQ ID NO. 682
atggtgggttccaccaattttgccataaatatgagccccctacgctgcaattcttccgtttcctcctccttccttcctccctcccctctctatcgagcaatttctatagccatgctgtccacagtttcggccacttacccattggttgaaccgatgctcgacaacccatttcagttctttgagaatggttttacgccttgggactgtttcgacccctttccaagtgctcctcaatcaccaaaaccttttggttcgagttccggttcggatgagtccaacctgttggaccagaaccctgacaattcaaactcaaactccggctccgatgaaccaaaccctccggtttcggtcatagacgaaaggaaacgtaggcggatggtatcaaaccgggagtcggcaaggcggtctcggatgcgaaaacagaagcacatggacaacctaaggaaccaggtgaaccggcttagggttgagaaccgtgaactgacgaaccggttgcggattgttttgtaccattgccacagtgtacgaacagaaaacgactggctccggtctgaatataaagcaaacaccggacacctcaatcacaagaggcactccaatgcggatcttgccgtgaacctttatccaagtgtttcagctctagcccttgtcataattagaaggggggaaggaagtcttcgtgagaagagattgatggaggaagtgatcaaaacgatggatcagaacctctgggatgcgcggactcattcccaatag

SEQ ID NO: 682 - protein, 214 aa, Populus balsamifera subsp. trichocarpa
  misc_feature (82)..(143): Pfam Name: bZIP_1 Pfam Description: bZIP transcription factor
  misc_feature: Ceres Annot ID no. 1457468
  misc_feature: Bit score of 328.7 for HMM based on sequences of Figure 4
  misc_feature: Functional Homolog Of SEQ ID NO. 669
MLSTVSATYPLVEPMLDNPFQFFENGFTPWDCFDPFPSAPQSPKPFGSSSGSDESNLLDQNPDNSNSNSGSDEPNPPVSVIDERKRRRMVSNRESARRSRMRKQKHMDNLRNQVNRLRVENRELTNRLRIVLYHCHSVRTENDWLRSEYKANTGHLNHKRHSNADLAVNLYPSVSALALVIIRRGEGSLREKRLMEEVIKTMDQNLWDARTHSQ

SEQ ID NO: 683 - DNA, 684 bp, Arabidopsis thaliana
  misc_feature: Ceres Annot ID no. 552718
  misc_feature: Encodes the peptide sequence at SEQ ID NO. 684
atgatgtctactgtaccggcctttacctttactgaaccgggtttggttaaccaattatcggatttccagaccggattcactccttgggaattgaactgctccgatctcttctctacaatccatctcgaaccggtcgtaccgagtccttgttctggtgaatccgatgccggttctgtcaaaattaacaccgattttaacggttttgacgaatcgtgtatcggttccatcaaaactaactccggttctgatgattccaaccttttccacggcgtaccgagtcctcaatccgacgaattggactcaaaaaacacgaaaatccgaagtaacgccacgaatcataaccggaacaaattgaaccggtcggttttgcaggtgactgacgaccgtaaacgcaaacggatggaatcaaaccgagaatcagcgaagcggtcgaggatgcgtaaacaaagacacattgataatttaaaagacgaagcaaatcgtctcggtttagaaaaccgggaactcgcaaaccggcttcgaattgttttgtacaacatcgcattaatgtgtacggacaacaatcagcttttgtcggaacaagagattctcagacggagattcttggagatgaggcagattttgattttcagacagcttcagctgaatccatcattgatcatcaatcatcatcatatgatttga

SEQ ID NO: 684 - protein, 227 aa, Arabidopsis thaliana
  misc_feature (125)..(188): Pfam Name: bZIP_1 Pfam Description: bZIP transcription factor
  misc_feature: Ceres Annot ID no. 552718
  misc_feature: Bit score of 114.3 for HMM based on sequences of Figure 4
  misc_feature: Functional Homolog Of SEQ ID NO. 669
MMSTVPAFTFTEPGLVNQLSDFQTGFTPWELNCSDLFSTIHLEPVVPSPCSGESDAGSVKINTDFNGFDESCIGSIKTNSGSDDSNLFHGVPSPQSDELDSKNTKIRSNATNHNRNKLNRSVLQVTDDRKRKRMESNRESAKRSRMRKQRHIDNLKDEANRLGLENRELANRLRIVLYNIALMCTDNNQLLSEQEILRRRFLEMRQILIFRQLQLNPSLIINHHHMI

SEQ ID NO: 685 - protein, 180 aa, Oryza sativa subsp. indica
  misc_feature (34)..(97): Pfam Name: bZIP_1 Pfam Description: bZIP transcription factor
  misc_feature: Public GI ID no. 125561247
  misc_feature: Bit score of 372.0 for HMM based on sequences of Figure 4
  misc_feature: Functional Homolog Of SEQ ID NO. 669
MTLSGGTLSSGITSGSSHRTRSSGSERDIQLQVQMDLKRKRRKESNRESAKRSRLRKQQHLDDLTSQVNQLKMENQQLTTTLNMVTQSCAFAESQNSVLRTQMMELDSRLSALREIIFYMNNGNQSPSNPTIAATTYPSTTTMTAATTGHYDYYDAFTANAWGSGMQMIQQPIDQFLYQC

SEQ ID NO: 686 - DNA, 1412 bp, Gossypium hirsutum
  misc_feature: Ceres Clone ID no. 1837887
  misc_feature: Encodes the peptide sequence at SEQ ID NO. 687
cttccacttccgctctcttctctttcttttctctttgagctgaggttctgctgcttcttttagttcttgttttccccagttttcctcagcttcctctgttctaatcacatcccttttgagggtgtttgcttttatatcggggatttttggttgttgaactccagtctagattctagagtctataccaaaaatccattaagtcaaaactctatcttccagcaagaagagaaagaaatatcttggttttttttttgctgataaagaaatatcttggttttttttttgctgatattattcttccaagaagttttttcttttttttttgctgtaaatcttgatgctgcgtaaattgttgtggttgatgcttgagactcatgtctccagttgtcagtgaaatcctccgatccggttttatgataaattcctccctcagacgcaggacacatctcgttcaatctttctcagttgtcttcctctactggttctatgttttttcataaataaccattttgtaattgcttattttttttactatatatataattatctgtagcctagtataggtgtccagtcgcctttgaggttagattatcctgaaatattagtaatctatatttgaagttttagcagtgagtttggtgtaaaaatattaacatggcttcgtccagtggaaactccaattcctcaagctcctcgcagcttcagaactctgggtctgaagaggacctgcaccagcagaatatgatggaccaaagaaaaagaaagagaaaggaatctaacagggaatcggcaagaagatccaggatgaggaaacagcagcacttggatgaattagtggcccaagtggctcagctcagcaaagaaaacaaccaaatcctgaacagcatcaacttcaccacccaccactatctcaacattcaggctgagaactcggttctgagggctcagatgatggaactgagtcaaagactcgactatctgaatcaaatcctcagttatctcaacaccatgagcgccagtgagttggtgtacgaaactgatcagtgctttgaaacaagtacttgtgaccacggtttcaccaagcctttccatctaccttaccttaaccaacccatcatggcctctccagacatgttccagtactactgatccataataatcctcaccaccatcatccctcattttacttataaaacgagggtattaatataatattattgttatggttaattaatttaatgaaatattagtgttattggcagctataggtctaggaagatgatgtaagggatgatgattgtgagagaattggcaagtagcaagtgaaagctgcttggcatgggatgcaattttttattatcaattttcttcttgtaaatggggatttgagatataaaatagggtttgatgtt

SEQ ID NO: 687 - protein, 164 aa, Gossypium hirsutum
  misc_feature (30)..(93): Pfam Name: bZIP_1 Pfam Description: bZIP transcription factor
  misc_feature: Ceres Clone ID no. 1837887
  misc_feature: Bit score of 142.1 for HMM based on sequences of Figure 4
  misc_feature: Functional Homolog Of SEQ ID NO. 669
MASSSGNSNSSSSSQLQNSGSEEDLHQQNMMDQRKRKRKESNRESARRSRMRKQQHLDELVAQVAQLSKENNQILNSINFTTHHYLNIQAENSVLRAQMMELSQRLDYLNQILSYLNTMSASELVYETDQCFETSTCDHGFTKPFHLPYLNQPIMASPDMFQYY

SEQ ID NO: 688 - DNA, 1461 bp, Gossypium hirsutum
  misc_feature: Ceres Clone ID no. 1924353
  misc_feature: Encodes the peptide sequence at SEQ ID NO. 689
ctcttccacttccgctctcttctctcttttctctttgagctgaggttctgctgcttcttttagttcttgttttccccagttttcctcagcttcctctgttctaatcacatcccttttgagggtgtttgcttttatatcggggatttttggttgttgaactccagtctaggttctagaatctataccaaaaatccattaagtcaaaactcttatcttccagcaagaagagaaagacatatcttggtttttttttttgctgtaaatcttgatgctgcgtaaattgttgtggttgatgcttgagactcatgtctccagttgtcagtgaaatcctccgatccggttttatgataaattcctccctcagacgcaggacccatctcgttcaatctttctcagttgtcttcctctactggttctatgttttttcataaatgacatgcttattttttttactatatatatatatataattatctgttgctagtataggtgtccagtcgcctttgaggttagattatcctgaaatattagtaatttatatttgaagttttagcagtgagtttggtgtaaaaatattaacatggcctcgtccagtggaaactccaattcctcaagctcctcgcagcttcagaactctgggtctgaagaggacctgcaccagcagaacatgatggaccaaagaaaaagaaagagaaaggaatcaaacagggaatcggcaagaagatccaggatgaggaaacagcagcacttggatgaattagtggcccaagtggctcagctcagcaaagataacaaccaaatcctgaacagcatcaacttcaccacccaccactatctcaacattcaggctgagaactcagttctgagggctcagatgatggaactgagtcaaagactcgactatctgaatcaaatcctcagttatctcaacaccatgagcgccagtgagttggtgtacgaaactgatcagtgctttgaaacaagtacttgtgaccacggtttcaccaaccctttcaatctaccttaccttaaccaacccatcatggcctctccagacatgttccagtactactgatccataataatcctcaccatcatcatccctcatttactgataaaacgagggtattaatattattgttatggttaattaatttaatgaaatattagtgttattggcagctataggtctaggaagatgatgtaagggatgatgattgtgagagaattggcaagtagcaagtgaaagctgcttggcaggggatgcaattttttattttcaattttcttcttgtaaatggggatttgagatataaaatagggtttgatgtttgacgggttttctggatgtatgtagtatggtctcctacgtttttatataagaatttccttcacctgttaggactcttttccttccttccaaatgttataattctatgcaagtgataatatttctctttc

SEQ ID NO: 689 - protein, 164 aa, Gossypium hirsutum
  misc_feature (30)..(93): Pfam Name: bZIP_1 Pfam Description: bZIP transcription factor
  misc_feature: Ceres Clone ID no. 1924353
  misc_feature: Bit score of 138.0 for HMM based on sequences of Figure 4
  misc_feature: Functional Homolog Of SEQ ID NO. 669
MASSSGNSNSSSSSQLQNSGSEEDLHQQNMMDQRKRKRKESNRESARRSRMRKQQHLDELVAQVAQLSKDNNQILNSINFTTHHYLNIQAENSVLRAQMMELSQRLDYLNQILSYLNTMSASELVYETDQCFETSTCDHGFTNPFNLPYLNQPIMASPDMFQYY

SEQ ID NO: 690 - protein, 173 aa, Arabidopsis thaliana
  misc_feature (37)..(91): Pfam Name: bZIP_2 Pfam Description: Basic region leucine zipper
  misc_feature: Public GI ID no. 42563231
  misc_feature: Bit score of 119.6 for HMM based on sequences of Figure 4
  misc_feature: Functional Homolog Of SEQ ID NO. 669
MNNKTEMGSSTSGNCSSVSTTGLANSGSESDLRQRDLIDERKRKRKQSNRESARRSRMRKQKHLDDLTAQVTHLRKENAQIVAGIAVTTQHYVTIEAENDILRAQVLELNHRLQSLNEIVDFVESSSSGFGMETGQGLFDGGLFDGVMNPMNLGFYNQPIMASASTAGDVFNC

SEQ ID NO: 691 - protein, 167 aa, Arabidopsis thaliana
  misc_feature (31)..(85): Pfam Name: bZIP_2 Pfam Description: Basic region leucine zipper
  misc_feature: Public GI ID no. 10120439
  misc_feature: Bit score of 119.6 for HMM based on sequences of Figure 4
  misc_feature: Functional Homolog Of SEQ ID NO. 669
MGSSTSGNCSSVSTTGLANSGSESDLRQRDLIDERKRKRKQSNRESARRSRMRKQKHLDDLTAQVTHLRKENAQIVAGIAVTTQHYVTIEAENDILRAQVLELNHRLQSLNEIVDFVESSSSGFGMETGQGLFDGGLFDGVMNPMNLGFYNQPIMASASTAGDVFNC

SEQ ID NO: 692 - DNA, 1681 bp, Glycine max
  misc_feature: Ceres Clone ID no. 691319
  misc_feature: Encodes the peptide sequence at SEQ ID NO. 693
aaaagggtgtccaaagaaggaatcacacaagagaaattttgggtggatcttggtaatttaaatttggtccaaaaatagtaagaaaaaaaaaccatagttcatttaattttcatgtccttgctaacggtggcgcaccaaagggggtcaggtgagtttatccggttcacggaaagtcatggcggtggtggcgatgacgtcagtggtgacggtgaacatggttgtggacatgatgatggaagtggtgctggaggttcactagggttgaattttaaccaagtgatgcaacaaggtgaggtgacaatgcaaggtggttcattggtttcagggtataacaggggtgatccagagttgagagaaatagtttcagctttgacacacgtggtgtcttcagggtctggccagaggagcaccgaattgacccagcaaagtggttttcctatgatgtctgcttcttctctttcacgtttgtctgctttctcttcttcttctccttctccttcttctggagcctcttgggttggccacaaaagaggcagagaagaagaagagaatagtacttcacataacttgatgcaacaacaacaacaaagtgctccaagactcttcagaaacattggtgacttcatggtgccttctcaaggagactcatcatcagtgacagaagaagcccccacctccacaactacaactgtaaccgccgtcactgaaaacccaccaggaggtggggaaaggaggagaaagtacagaggagtgaggcagaggccatggggaaaatgggcagcagaaatccgtgatccacacaaagcagcaagagtttggctaggcacatttgacacagaagaagcagcagcaagagcctatgatgaagctgcattgaggttcagaggcaacagagcaaagcttaacttccctgaaaatgtaagagcagttccacccattcaaccttttcaagccaccactaggctaaccgtttctgattccaccacctctcaattccggccactctccgcggtggcgccacccttcattcagcagccacagattcagggctcctctgacttgatcagagactacttgcaatactctcagcttctacagagtgattttcaacagcaacaaatacaacaacaacagcagcagcagcggcagcagcagcagcggcagcggcagcagcggcagcagcagcagcaacaacaacaacaaccatctagtttgcttcagcagttgtactataatgcacaatttgcttcacttcaatcaccttcaatgctatcatcatctccttcattttcttcttctgtgtctccagcaccattcccattattcacaacctctgcttctttccccttgttttcaagtcaacaaatgggctatttccagccaccggaaagccgcaatcccgctggcggcgtgccggagtttccaacgtccacatggtcggataccagtagccagccaccaccttctggttgatacagtgttttagtttccttcatattttcctttttcttttttctttctttcattcttagcataaaaaaaaaagacttgttatacttatttcttttttcaagggtgaaactatgatatagttttttttaagtatttttggtactattctcgtatcagaattagagtttcagtaatttatgttgatattcaatacaaatctttattatgt

SEQ ID NO: 693 - protein, 453 aa, Glycine max
  misc_feature (209)..(260): Pfam Name: AP2 Pfam Description: AP2 domain
  misc_feature: Ceres Clone ID no. 691319
  misc_feature: Bit score of 1081.5 for HMM based on sequences of Figure 7
  misc_feature: Functional Homolog Of SEQ ID NO. 693
  misc_feature: in Figure 7
MSLLTVAHQRGSGEFIRFTESHGGGGDDVSGDGEHGCGHDDGSGAGGSLGLNFNQVMQQGEVTMQGGSLVSGYNRGDPELREIVSALTHVVSSGSGQRSTELTQQSGFPMMSASSLSRLSAFSSSSPSPSSGASWVGHKRGREEEENSTSHNLMQQQQQSAPRLFRNIGDFMVPSQGDSSSVTEEAPTSTTTTVTAVTENPPGGGERRRKYRGVRQRPWGKWAAEIRDPHKAARVWLGTFDTEEAAARAYDEAALRFRGNRAKLNFPENVRAVPPIQPFQATTRLTVSDSTTSQFRPLSAVAPPFIQQPQIQGSSDLIRDYLQYSQLLQSDFQQQQIQQQQQQQRQQQQRQRQQRQQQQQQQQQPSSLLQQLYYNAQFASLQSPSMLSSSPSFSSSVSPAPFPLFTTSASFPLFSSQQMGYFQPPESRNPAGGVPEFPTSTWSDTSSQPPPSG

SEQ ID NO: 694 - protein, 422 aa, Lotus japonicus
  misc_feature (193)..(244): Pfam Name: AP2 Pfam Description: AP2 domain
  misc_feature: Public GI ID no. 193237575
  misc_feature: Bit score of 934.7 for HMM based on sequences of Figure 7
  misc_feature: Functional Homolog Of SEQ ID NO. 693
  misc_feature: in Figure 7
MSLLTVALAHQKGSSELLSFTAQHGGGGDGEGRTSGGSVESQSLGLNQAVVRRQGEATMQGSMVSGYNRTREQTEMISALTQVASGSGNELFQGSGFPMMSGFGQVSSSGLSSGSVSGSWVGNKRGREEEEESSVSHQYMQQQTIPRLFRTTVGNFMVPSPVESSSVTEESPSTTTAVSAAAPSYEDTGERRRKYRGVRQRPWGKWAAEIRDPHKAARVWLGTFDTAEAAARAYDEAALRFRGNRAKLNFPENVRAVPPRPPPPQQQFQAFPATRLAIPDPLPPPQLQNPPPFQGQPELMRDYLEYSQLLQNYGEFQLQQQQQQQESSSLLQQLYYDTQLVTLQSPSFSSSVSSSSTTTTTQFSPSTQLSPASFPLFSSQQLGISRPPGNLPGGGRGGSSSGGRQFTPSTWSDTSGHRPPYG

SEQ ID NO: 695 - DNA, 1374 bp, Populus balsamifera subsp. trichocarpa
  misc_feature: Ceres Annot ID no. 1443093
  misc_feature: Encodes the peptide sequence at SEQ ID NO. 696
atgtacatattgaaggtggcgaaccaaagaggagacccgggggagtacaccaggtaccctgcaacagataactatgataaccaagaagagagatcatacacagcaccacagatactttctcaattgaatcaaccagtagagcatcatgtggaggtaacacaatcaccgcatatgttcatggggtacagcagttcaacagagatgtcaatggtatcagaacttacacatgttgtatcaggccaaagagggagtactagtgattggggatcatatggggctgtgggtctaggaggtgcaacaataacatcaaattttggtcaggcagcacctggttctaatacgagtactcctgcttctcctcctttatctgcctattcttctacttctggttctggtttgtggattggccagaagagagggagagaagaagaggctggtgcagcagcgcaattgatggagtctttgccaagggtttatagagggtttaatgattttagaagttcacaaggagattcatcatcatccggtgcaactgccaccgaagaagtgtctgcttcaactatagtaatccccaccacaactacaccctccactacagcaacaccatcaagtgaaatagcatccctggaagaaactggagagcaaagaagaagatacagaggagttaggcagagaccatggggcaaatgggcagcagagatacgtgatccacacaaagcggcaagagtctggctaggcacatttgatactgcagaggctgcagctagagcctatgacgatgctgctttaagattcagaggaaatagagctaaacttaacttccctgaaaatgttaggctgctgccagctcaaacgcaaaatgttactgcttctcaagttcccatatctcattcacagctatcttctcatcttcagttacagccaatctcatctccaaggcaacaagcacagcggccgcaggcgccagcacctgcattgtttcagtctcaagctgatattataagggactactgggagtactcccagttgttgcagagttcaggggagtttcatcatcatcaacaacaacaacaacaacaacaacaaccttcaagtttgttacagcctatgttttataatccccaggtggcttctctacaatcatcagctttgacttcattgtcttcatctacttcagtttcttcacttgcagcaatatcttccggttcatcaccatcaacattttctccctctgcttcttccttccctctgcttttcgctggtcaacagttgggttattttcggccaccacaaaatcagaatccagctagtggttctgattttccggtgcccccatggacagattctagtcacaatccttcctctagtggttag

SEQ ID NO: 696 - protein, 457 aa, Populus balsamifera subsp. trichocarpa
  misc_feature (217)..(268): Pfam Name: AP2 Pfam Description: AP2 domain
  misc_feature: Ceres Annot ID no. 1443093
  misc_feature: Bit score of 1039.8 for HMM based on sequences of Figure 7
  misc_feature: Functional Homolog Of SEQ ID NO. 693
  misc_feature: in Figure 7
MYILKVANQRGDPGEYTRYPATDNYDNQEERSYTAPQILSQLNQPVEHHVEVTQSPHMFMGYSSSTEMSMVSELTHVVSGQRGSTSDWGSYGAVGLGGATITSNFGQAAPGSNTSTPASPPLSAYSSTSGSGLWIGQKRGREEEAGAAAQLMESLPRVYRGFNDFRSSQGDSSSSGATATEEVSASTIVIPTTTTPSTTATPSSEIASLEETGEQRRRYRGVRQRPWGKWAAEIRDPHKAARVWLGTFDTAEAAARAYDDAALRFRGNRAKLNFPENVRLLPAQTQNVTASQVPISHSQLSSHLQLQPISSPRQQAQRPQAPAPALFQSQADIIRDYWEYSQLLQSSGEFHHHQQQQQQQQQPSSLLQPMFYNPQVASLQSSALTSLSSSTSVSSLAAISSGSSPSTFSPSASSFPLLFAGQQLGYFRPPQNQNPASGSDFPVPPWTDSSHNPSSSG

SEQ ID NO: 697 - protein, 421 aa, Vitis vinifera
  misc_feature (200)..(251): Pfam Name: AP2 Pfam Description: AP2 domain
  misc_feature: Public GI ID no. 147834261
  misc_feature: Bit score of 949.7 for HMM based on sequences of Figure 7
  misc_feature: Functional Homolog Of SEQ ID NO. 693
  misc_feature: in Figure 7
MCKLKVANPRDSGEYVRFRAAGGGNEEVVPPPPQQSEEPVPVVSETMYSGYSRASEMSAMVSALTHVVSGQRAGDYGYASGFVGAAGGVTSSFGSGGSGIYTSSSPLSAYSSSSGSGSASGSASWVGQKRGRELEAATQYSETVPRVYRGFGDFRVSHSESSSGATGTEETTNMLPPTTAIPATPSTEPASNQESGERRRRYRGVRQRPWGKWAAEIRDPHKAARVWLGTFDTAEAAARAYDEAALRFRGNRAKLNFPENVRLMPPLQVSPATQLSISGPPATQLPVSSSPPPFFQGQALQNPDIVRDYWEYSQLLQSSGDFHGQQPTSLLEQMFYSQSLASLQSSASLSSPSISFSSSSSSSSTSSLSSRFSSSSTPYPLLFPEQQMGYPQPPGNQGQGSSSDFPAPSWTGSGHYPSSSS

SEQ ID NO: 698 - protein, 364 aa, Oryza sativa subsp. japonica
  misc_feature (162)..(213): Pfam Name: AP2 Pfam Description: AP2 domain
  misc_feature: Public GI ID no. 115464101
  misc_feature: Bit score of 703.4 for HMM based on sequences of Figure 7
  misc_feature: Functional Homolog Of SEQ ID NO. 693
  misc_feature: in Figure 7
MADQRRRFRGGGDWQASVDDVVDDGGELEAAAAAAARGSVLSGEYQAQEMSTMVSALTWVVAAGHDDHGGGQWSGLVDVPATTLAGGGGGDYGHGAQGSYYYYGAAPTSTPEFVAGGQQEQLSSDVPQGGASLGLAMDEHSPTYTVEASSSADQHGGGGGGRRYRGVRQRPWGKWAAEIRDPHKAARVWLGTFETAEAAARAYDEAALRFRGSRAKLNFPEDARLSSPPAGAGAGGATAAAQTVPVAYPASAVSDYLQYQMLLHGGGGGGGGRYPLYYGGGAAAAMSSSLGPYSSIPTSSVTVASVPSSSSAASSSSGYGAPAEHGEAVQWTSWPDGGGWTYPATTSSWSGSSQYPPPPRPPQQ

SEQ ID NO: 699 - DNA, 1525 bp, Arabidopsis thaliana
  misc_feature: Ceres Annot ID no. 887551
  misc_feature: Encodes the peptide sequence at SEQ ID NO. 700
gtctctgtttcttgtttctctctctctctctctacagagttttctttccctcgaagaaaaagaatatttttaaatttaattttctctgcgtttataagctttaagtttcagaggaggaggatttagaaggagggttttgtatgtgtgtcttaaaagtggcaaatcaggaagataacgttggcaaaaaagccgagtctattagagacgatgatcatcggacgttatctgaaatcgatcaatggctttacttattcgcagccgaagacgaccaccaccgtcatagcttccctacgcagcagccgcctccatcgtcgtcgtcctcatctcttatctcaggtttcagtagagagatggagatgtctgctattgtctctgctttgactcacgttgttgctggaaatgttcctcagcatcaacaaggaggcggtgaaggtagcggagaagggacttcgaattcgtcttcttcctcggggcagaaaaggaggagagaggtggaggaaggtggcgccaaagcggttaaggcagctaatactttgacggttgatcaatatttctccggtggtagctctacttctaaagtgagagaagcttcgagtaacatgtcaggtccgggcccaacatacgagtatacaactacggcaactgctagtagcgaaacgtcgtcgtttagtggggaccaacctcggcgaagatacagaggagttagacaaagaccatggggaaagtgggcggctgagattcgagatccatttaaagcagctagagtttggctcggtacgttcgacaatgctgaatcagcagcaagagcttacgacgaagctgcacttcggtttagaggcaacaaagccaaactcaacttccctgaaaacgtcaaactcgttagacctgcttcaaccgaagcacaacctgtgcaccaaaccgctgctcaaagaccgacccagtcaaggaactcgggttcaacgactacccttttgcccataagacctgcttcgaatcaaagcgttcattcgcagccgttgatgcaatcatacaacttgagttactctgaaatggctcgtcaacaacaacagtttcagcaacatcatcaacaatctttggatttatacgatcaaatgtcgtttccgttgcgtttcggtcacactggaggttcaatgatgcaatctacgtcgtcatcatcatctcattctcgtcctctgttttccccggctgctgttcagccgccaccagaatcagctagcgaaaccggttatctccaggatatacaatggccatcagacaagactagtaataactacaataatagtccatcctcctgatgacttgcttcattttatttgtttcactatagagtaatagaaaacaggaaaatgattatatgttatagagttatttttccaaatattatagggtttaggttgtttgtattgttctgctttcatcctctcatgctttttttcttaatttattatatttttgcattataatttcgtttcattgtaacaaacattaaaaagaccacatggag

SEQ ID NO: 700 - protein, 391 aa, Arabidopsis thaliana
  misc_feature (183)..(234): Pfam Name: AP2 Pfam Description: AP2 domain
  misc_feature: Ceres Annot ID no. 887551
  misc_feature: Bit score of 844.8 for HMM based on sequences of Figure 7
  misc_feature: Functional Homolog Of SEQ ID NO. 693
  misc_feature: in Figure 7
MCVLKVANQEDNVGKKAESIRDDDHRTLSEIDQWLYLFAAEDDHHRHSFPTQQPPPSSSSSSLISGFSREMEMSAIVSALTHVVAGNVPQHQQGGGEGSGEGTSNSSSSSGQKRRREVEEGGAKAVKAANTLTVDQYFSGGSSTSKVREASSNMSGPGPTYEYTTTATASSETSSFSGDQPRRRYRGVRQRPWGKWAAEIRDPFKAARVWLGTFDNAESAARAYDEAALRFRGNKAKLNFPENVKLVRPASTEAQPVHQTAAQRPTQSRNSGSTTTLLPIRPASNQSVHSQPLMQSYNLSYSEMARQQQQFQQHHQQSLDLYDQMSFPLRFGHTGGSMMQSTSSSSSHSRPLFSPAAVQPPPESASETGYLQDIQWPSDKTSNNYNNSPSS

SEQ ID NO: 701 - DNA, 1359 bp, Populus balsamifera subsp. trichocarpa
  misc_feature: Ceres Annot ID no. 1452324
  misc_feature: Encodes the peptide sequence at SEQ ID NO. 702
atgtgcgtattgaaggtggcgaacccaagaggcaactcaggggagtacagcaggtacccttacacagatagcgatgataaccaagaagagagatcgtacacagcacaacaaatattttctgaattgaatcaaccaatacagcggcatgtggaggtaactcaatcaccacatatgttcatggggtatagcagttcagcagagatgtctgcaatggtatcagcacttacacatgtggtctcaggccacagaggaagtactagcgattggggatcatatggggcctcaggtctaggaggtgcaacaataacgtcgactattgttcaggcagcacctggttctaacacttctcccgcttctccatctttgtctgcatattcttctacttctggttctggttcttggattggccagaagagagggagagaaaaggaagccggtgcagcagctcaattgaaggagtctttgccaagggttcatagagggtttgatgattttagaagttcactgggcgattcgccgtcatctggtgcaactgcaactgaagaagtgtctgcttcaactctagtattctccaccacagccacaccctccaccacagcaacaccatcaagtgaaacagcatctttgggagaaacaggagagcgaaaaagaagatacagaggagttaggcaaaggccatggggcaaatgggcagcagagatacgtgatccacacaaagcagcaagagtctggctaggcacatttgaaactgcggaagctgcagctagagcctatgatgaggctgctttaagattcagaggaagtagagctaaacttaacttccctgaaaatgctaggctactgccagctcaaatgcaaaatgttactgcttctcaagttcccatttctcgttcacaattaccttctcatcaccagttacagtcaatctcatctccaaggcaacaagcacagcggccgcaggtgccagcacctgcattgtttcagtctcaacctgatattataagagactactgggagtactcccagttgttgcagagttctggggactttcatggacaacaacaaccaccaccttcaaatttgttagagcagatgttttataatccccagctggcctctctacaatcatcaactttgtcttcattaccttcatctacttcaggttcttcatttgcagcaataccctctggttcgatatcatcaacactatctccatctgcttcttcatttcctctgctttttgctggtcaacagttaggttattttcggccaccagaaaatcagaatccagctgctggttccgattttccggtgcccccatggacagattgtagtcgccgtccttcctccactggttaa

SEQ ID NO: 702 - protein, 452 aa, Populus balsamifera subsp. trichocarpa
  misc_feature (217)..(268): Pfam Name: AP2 Pfam Description: AP2 domain
  misc_feature: Ceres Annot ID no. 1452324
  misc_feature: Bit score of 837.8 for HMM based on sequences of Figure 7
  misc_feature: Functional Homolog Of SEQ ID NO. 693
MCVLKVANPRGNSGEYSRYPYTDSDDNQEERSYTAQQIFSELNQPIQRHVEVTQSPHMFMGYSSSAEMSAMVSALTHVVSGHRGSTSDWGSYGASGLGGATITSTIVQAAPGSNTSPASPSLSAYSSTSGSGSWIGQKRGREKEAGAAAQLKESLPRVHRGFDDFRSSLGDSPSSGATATEEVSASTLVFSTTATPSTTATPSSETASLGETGERKRRYRGVRQRPWGKWAAEIRDPHKAARVWLGTFETAEAAARAYDEAALRFRGSRAKLNFPENARLLPAQMQNVTASQVPISRSQLPSHHQLQSISSPRQQAQRPQVPAPALFQSQPDIIRDYWEYSQLLQSSGDFHGQQQPPPSNLLEQMFYNPQLASLQSSTLSSLPSSTSGSSFAAIPSGSISSTLSPSASSFPLLFAGQQLGYFRPPENQNPAAGSDFPVPPWTDCSRRPSSTG

SEQ ID NO: 703 - DNA, 1350 bp, Glycine max
  misc_feature: Ceres Clone ID no. 1365932
  misc_feature: Encodes the peptide sequence at SEQ ID NO. 704
aatatctcaaaaaggaaaccgacaacacaaaggatttgcagaaagtgcagctacttagttccattttcatcctctctccattaactttcagtcaaaacaaaacaaaacctctttaggtgtgaaattccacgtgccaaaatcatctccgaggcaccaacatcggcagccacttatttctttatttattgaaggaatcagtatataaaacacctgctttctaacggtggcgcaccagaggggtttaggttcaggttcggggaagttcttcgcggcggagcaaggcggcgatgaggaagcggaagagagtactgaggtaggttctgttccgagccatgtggtgtcagcctctgcagcttcggcccaaaccaatcagtgggtgccgcggggaagtggttttcccatgatgtcacgttttatgcatgcgccttctcccgttctgtcttcttcgcatcctcatttgggagttggccacaagagagagcgtgaagatgacactggcgctggtgcgagtggaggtgttgctattgcagcagcttcttcacaaacgcaaacacaagagattgaaagtgctggcggcgacaggaggaggagatacaggggagtgaggcagaggccgtgggggaaatgggcggcagagattcgcgatcctcacaaagcggcgagagtgtggcttgggacattcgacactgccgaggctgcggccagagcctacgatgaagccgcattgaggttcagaggtaacagagcaaaacttaatttccccgaaaacgttgtaccggttccacctcctcctccggttcccgatttaccggcaagtgcggtagccggttccgattccatttccggttccggttcagtggtggcaggtttttcgccgacgctgatgcagggagcgccgtttcagggctcctctgcttttctgagagattattgggggtattctcagctgctgaggagtacaggggacttccatggactcgaccagtggttctttgattctcaaatggcagcgtttcaatcttcttcatcgtcgttgttgccatcgccgccgccgccgtcgttttcgccttcctctgcttcgtatcctctgttttcttccagccagcaaatggggattttccggccgccgggagagcagggtcatggcggagaagacggtggtagtgggtcagagttttcggagcttccaccttcgacgtggtcagataccagtggctatcctcctccaccacctggttgacatggaatacacatttttttctttattctattttttctctttctttggttaaagaaagaacaaggctttcttctgtttatttattttaatttatctgtttttgctttttt

SEQ ID NO: 704 - protein, 279 aa, Glycine max
  misc_feature (63)..(114): Pfam Name: AP2 Pfam Description: AP2 domain
  misc_feature: Ceres Clone ID no. 1365932
  misc_feature: Bit score of 216.2 for HMM based on sequences of Figure 7
  misc_feature: Functional Homolog Of SEQ ID NO. 693
MMSRFMHAPSPVLSSSHPHLGVGHKREREDDTGAGASGGVAIAAASSQTQTQEIESAGGDRRRRYRGVRQRPWGKWAAEIRDPHKAARVWLGTFDTAEAAARAYDEAALRFRGNRAKLNFPENVVPVPPPPPVPDLPASAVAGSDSISGSGSVVAGFSPTLMQGAPFQGSSAFLRDYWGYSQLLRSTGDFHGLDQWFFDSQMAAFQSSSSSLLPSPPPPSFSPSSASYPLFSSSQQMGIFRPPGEQGHGGEDGGSGSEFSELPPSTWSDTSGYPPPPPG

SEQ ID NO: 705 - protein, 266 aa, Vitis vinifera
  misc_feature (142)..(193): Pfam Name: AP2 Pfam Description: AP2 domain
  misc_feature: Public GI ID no. 157352501
  misc_feature: Bit score of 251.3 for HMM based on sequences of Figure 7
  misc_feature: Functional Homolog Of SEQ ID NO. 693
MCKLKVANPRDSGEYVRFRAAGGGNEEVVPPPPQQSEEPVPVVSETMYSGYSRASEMSAMVSALTHVVSGQRAGDYGYASGFVGAAGGVTYVQFLDMCVILHIASLRAGTEETTNMLPPTTAIPATPSTEPASNQESGERRRRYRGVRQRPWGKWAAEIRDPHKAARVWLGTFDTAEAAARAYDEAALRFRGNRAKLNFPENLSNQSRQGNRKQDVPLSNKTPLSVTKEKRLYMNESFRCFCFHPPIKTDLARRDRNRKTNLILWE

SEQ ID NO: 706 - protein, 352 aa, Vitis vinifera
  misc_feature (154)..(205): Pfam Name: AP2 Pfam Description: AP2 domain
  misc_feature: Public GI ID no. 225438481
  misc_feature: Bit score of 287.5 for HMM based on sequences of Figure 7
  misc_feature: Functional Homolog Of SEQ ID NO. 693
MCVLKVANARKSEQRLRVEGVRDDEMDGGAASGVMFPGHNREREMSAMVTALTNVVAGHVSDDLVNQTGSDPCCLLGSCSWGAGHKRGRDDQGHVSESVSTISRAFGDLSHGGSSSFRVGEGSVLNTNTTAASESSLMVPTYEYVDTYRGEPRRRYRGVRQRPWGKWAAEIRDPYRAARVWLGTFDSAEAAARAYDEAALRFRGNKAKLNFPENVQLRPSPSGSQATQLAISDSPETLFSVPSYTNPIVQSQPLHRSRSSELPGDYFNYSQMGSSSSDYFPRQPMNLLDQMRLASPLQSSSSLSSSSPLGSSVSSASSSPPPFSPFFPPQPPSAGQSGGADIPAPPWSDTSQ

SEQ ID NO: 707 - protein, 318 aa, Oryza sativa subsp. indica
  misc_feature (129)..(180): Pfam Name: AP2 Pfam Description: AP2 domain
  misc_feature: Public GI ID no. 125533543
  misc_feature: Bit score of 114.5 for HMM based on sequences of Figure 7
  misc_feature: Functional Homolog Of SEQ ID NO. 693
MCGGGKVASPPGPRLPRLAGAGGEEEEEEAAAGMLSRHGQAREMSVMVSALARVVAGGGGGEAEEWWPPAYGAAPLPPSTSPASHEHAAAMAAGQYAPATSSAVASPREQASSPSSGDAAAGGGGGGRKRYRGVRQRPWGKWAAEIRDPVKAARVWLGTFDTAEAAARAYDDAALRFRGCRAKLNFPEDAALLPPPPPPPAPAPTPPQSQGMVGVGEEYSEYARFLQGAGEPPHFLEQIMEDSPRPSTAAGASSSSSGQSSFPLFYSFAGHELGGNEANLARPPESGGAGGDGGRGSSPPATWPGYGWGAPPPWDPSR

SEQ ID NO: 708 - DNA, 939 bp, Populus balsamifera subsp. trichocarpa
  misc_feature: Ceres Annot ID no. 1451017
  misc_feature: Encodes the peptide sequence at SEQ ID NO. 709
atgtcagttatggtgactgctttgacacatgtagtggctggaaatgtgcctgcagatgattctgattgcataagtgaagcatttccaaataatcaagataattgtgctcatggtgatttgtcagcgaagagagaaagggaagaagggggtggtggcagtgaagagtataaaaggcacggtagagcatttggcgatgacttcttgcatgggggctcatcttctgctggaagagcctcaggaaaatccatcatcaccatgacacctgcagccacacggatggcattcacccccgtatatgaatataatgaaacctgcagagacgagccgaggagaaaatacaggggagtgaggcaaaggccatggggcaagtgggctgctgaaataagggatccattcaaggcatgtagagtttggttaggcactttcgacacagctgaggctgcagcaagagcctatgatgaagccgctctcagatttagaggcaacaaggccaaactaaacttcccagaaaacgtcaagctacgaccgactcccccaaatccaatagcaaaccagttgaccgtctctgattctccgagtagcaccggccttctgtccgttcctacatccaccgaggccatagttcattcccaagctcttcaccatacgcagaaccgtgagatttcaagagagcaggtgaaccaacctcaattgatcttaggtgttggtggctatcaaaggcaacccatgagtctatacgaccaaatgtttctgtcacctccacttgtttcgtcttatccttcgatgtcttcttcaacagagtattccgatcctatgtttttaccagctcagcaaccaggcgagattatgcctgccactagtagccaaagtggtggggaagaatttcagttgccagcgtggtcagattatagccattactatacttcgtcttctggatag

SEQ ID NO: 709 - protein, 309 aa, Populus balsamifera subsp. trichocarpa
  misc_feature (108)..(159): Pfam Name: AP2 Pfam Description: AP2 domain
  misc_feature: Ceres Annot ID no. 1451017
  misc_feature: Bit score of 148.1 for HMM based on sequences of Figure 7
  misc_feature: Functional Homolog Of SEQ ID NO. 693
MVTALTHVVAGNVPADDSDCISEAFPNNQDNCAHGDLSAKREREEGGGGSEEYKRHGRAFGDDFLHGGSSSAGRASGKSIITMTPAATRMAFTPVYEYNETCRDEPRRKYRGVRQRPWGKWAAEIRDPFKACRVWLGTFDTAEAAARAYDEAALRFRGNKAKLNFPENVKLRPTPPNPIANQLTVSDSPSSTGLLSVPTSTEAIVHSQALHHTQNREISREQVNQPQLILGVGGYQRQPMSLYDQMFLSPPLVSSYPSMSSSTEYSDPMFLPAQQPGEIMPATSSQSGGEEFQLPAWSDYSHYYTSSSG

SEQ ID NO: 710 - protein, 318 aa, Oryza sativa subsp. japonica
  misc_feature (129)..(180): Pfam Name: AP2 Pfam Description: AP2 domain
  misc_feature: Public GI ID no. 115484369
  misc_feature: Bit score of 109.9 for HMM based on sequences of Figure 7
  misc_feature: Functional Homolog Of SEQ ID NO. 693
MCGGGKVASPPGPRLPRLAGAGGEEEEEEAAAGMLSRHGQAREMSVMVSALARVVAGGGGGEAEEWWPPAYGAAPLPPSTSPASHEHAAAMAAGQYAPATSSAMASPREQASSPSSGDAAGGGGGGGRKRYRGVRQRPWGKWAAEIRDPVKAARVWLGTFDTAEAAARAYDDAALRFRGCRAKLNFPEDAALLPPPPPPPAPAPAPPQSQGMVGVGEEYSEYARFLQGAGEPPHFLEQIMEDSPRPSTAAGASSSSSGQSSFPLFYSFAGHELGGNEANLARPPESGGAGGDGGRGSSPPVTWPGYGWGAPPPWDPSR

SEQ ID NO: 711 - DNA, 930 bp, Populus balsamifera subsp. trichocarpa
  misc_feature: Ceres Annot ID no. 1456607
  misc_feature: Encodes the peptide sequence at SEQ ID NO. 712
atggtgactgctttgacacgtgtagtggctggaaatgtacctgcagatgattcggattcctcaacagcattttcaaataatcaaggagattgtattcatggtggtttgtcggcgaagagagaaagggaagaagagggtggttgcagtgaagagaatgaaaggctctgtagagcatttggtgatggcttcttacatggggacgactcctctgccgggagagccacaggaatttccgtcgtcactacaagcaccgtaacacctgcatctacacagatgacatttactccagtatatgaacacaatgaaacccgcagagacgagccacagagaaaatataggggagtgaggcaaaggccatggggcaagtgggctgctgaaataagagatccaatcaaggcagctagagtttggttaggcacttttgatacacctgaggctgcagcaagagcctacgatgaagctgctctgagatttcgaggcagcaaagccaagctcaacttcccagaaaacgtcaagctccgaccatctcctccccccagtccaacagcaaaccagttgactgtctctgattctccaagttccggccttctgtccctctctacatcctctgagctcttgcttcactcccaagctcttcaccatacgcaaaaccgtgagatttcaagagagcaagttagccaacctcaattgatcttgggtgttggtggttatcaaaagcaacccgtgagtctatacgaccaaatgtttttgtcatcttcgtttgtttcttctaactcttcatcatcctccacaaaatcttccggtcgtatgctttttccggctcagaaaccaggtgagtttaggcctgccactagtagtcagagtagcggaaacgattgtcagttgccggcctggtcaggttatagccatcatacttcctcttccggataa

SEQ ID NO: 712 - protein, 309 aa, Populus balsamifera subsp. trichocarpa
  misc_feature (110)..(161): Pfam Name: AP2 Pfam Description: AP2 domain
  misc_feature: Ceres Annot ID no. 1456607
  misc_feature: Bit score of 147.7 for HMM based on sequences of Figure 7
  misc_feature: Functional Homolog Of SEQ ID NO. 693
MVTALTRVVAGNVPADDSDSSTAFSNNQGDCIHGGLSAKREREEEGGCSEENERLCRAFGDGFLHGDDSSAGRATGISVVTTSTVTPASTQMTFTPVYEHNETRRDEPQRKYRGVRQRPWGKWAAEIRDPIKAARVWLGTFDTPEAAARAYDEAALRFRGSKAKLNFPENVKLRPSPPPSPTANQLTVSDSPSSGLLSLSTSSELLLHSQALHHTQNREISREQVSQPQLILGVGGYQKQPVSLYDQMFLSSSFVSSNSSSSSTKSSGRMLFPAQKPGEFRPATSSQSSGNDCQLPAWSGYSHHTSSSG

SEQ ID NO: 713 - DNA, 1146 bp, Sorghum bicolor
  misc_feature: Ceres Annot ID no. 8683331
  misc_feature: Encodes the peptide sequence at SEQ ID NO. 714
atggagctgctcctcctcgtcgtcgtcgtcaacgtacagacgagacggagaggagggaagcacacgcacagggtggcgaacgccgagggaggaggacgaggagtgccgccgccgtcgcggctctccgccgccgccggcggtggtgacgaggacgacgaggacggccggcaggaggcggcggcggtggcggcggcgtggcgaatgatgtcggggtacgagcggagccgggaggcgtccatcatggtcgacgcgctgaccgccgtcgtcgcgggcggggcggcagcggtggcgccgccggcggccagtggacgtcgtccggttcagcaggtggtggtgttgtcgccggcggaaggacagtggtgcagcgactactacgccgccgacgtgacgccgccgccgtccgctcgtcctgcactgacgaccgttcacgagcaccacggggcgtcagggattcccgcgacggcgccagcggtggcgtcacccggttcaaccgagcaggtcccctcgctgtcctccaccgactccggcggcactcctcggaggcggtaccgcggcgtgcgtcagcggccgtgggggaagtgggcggcggagatccgggacccgcacaaggcggcgcgcgtgtggctgggcaccttcgacaccgcggaggccgccgcgcgggcctacgacgcggcggcgctcaggttccgcggcagccgcgccaagctcaacttcccggagtccgccacgctcgtgtcgcaggcgctgccgccgcgggttcctcctcctccgcctccggcgccgccggagaggcccgaggcgctcctcgagtcgcaggcgctggcgatggagggcggcggcggggagtactcggtgtacgcccggttcctgcagggccccgccgagccaccgccgcgcctctacgaccaggcgcctgcggtgaccgcgccgtccggatcggcgtcgtcgtcgtcgttccccgtgctcttcagctttggaggcggaggtgagggcagcggtgccggcgcggcgagctgtcagtcgtggcagcagggtagcagcggctctccgagcgacggtgggtctgggtacccgtcgccgccgccggcgacctgggcggactccgggtggtggccgccgccgccgccgcgggacccgtcacgatga

SEQ ID NO: 714 - protein, 381 aa, Sorghum bicolor
  misc_feature (181)..(232): Pfam Name: AP2 Pfam Description: AP2 domain
  misc_feature: Ceres Annot ID no. 8683331
  misc_feature: Bit score of 102.7 for HMM based on sequences of Figure 7
  misc_feature: Functional Homolog Of SEQ ID NO. 693
MELLLLVVVVNVQTRRRGGKHTHRVANAEGGGRGVPPPSRLSAAAGGGDEDDEDGRQEAAAVAAAWRMMSGYERSREASIMVDALTAVVAGGAAAVAPPAASGRRPVQQVVVLSPAEGQWCSDYYAADVTPPPSARPALTTVHEHHGASGIPATAPAVASPGSTEQVPSLSSTDSGGTPRRRYRGVRQRPWGKWAAEIRDPHKAARVWLGTFDTAEAAARAYDAAALRFRGSRAKLNFPESATLVSQALPPRVPPPPPPAPPERPEALLESQALAMEGGGGEYSVYARFLQGPAEPPPRLYDQAPAVTAPSGSASSSSFPVLFSFGGGGEGSGAGAASCQSWQQGSSGSPSDGGSGYPSPPPATWADSGWWPPPPPRDPSR

SEQ ID NO: 715 - protein, 351 aa, Oryza sativa subsp. japonica
  misc_feature (128)..(179): Pfam Name: AP2 Pfam Description: AP2 domain
  misc_feature: Public GI ID no. 115441277
  misc_feature: Bit score of 160.0 for HMM based on sequences of Figure 7
  misc_feature: Functional Homolog Of SEQ ID NO. 693
MTVAGASELMSGYYQAQEMSTMVSALARVVAGGGGGGGDGDGDQWAWSSPSPSSSAAAAAARGVQERRREEQAMHELAGYACGGAPSPEFAGSEQSSDTQSASAATMDEHHSPVGGGGNAEGPDTPRRRYRGVRQRPWGKWAAEIRDPHKAARVWLGTFETAEAAARAYDEAALRFRGSRAKLNFPEDARLYPTAATTTTAAPPPAPVAAASPSAAIYPGASQSAEYLRYQMLLQGRLTTATPNQGTLLPFYGGGGGGGSMTNPYGGGGGGAMSGFLGSYYSFPTPSVSVATVPSSTSSAPGNYYSSHGGSHQSMSAAEEWNWENALVYPATAASWSESSYHHHPPPPHTQ

SEQ ID NO: 716 - DNA, 1411 bp, Triticum aestivum
  misc_feature: Ceres Clone ID no. 570057
  misc_feature: Encodes the peptide sequence at SEQ ID NO. 717
attcctcatcgctcagtcgcccgctcacaccaaaaacaaccaccagcagtagctcggctccggagaggcagagtcagaggcaaacatgggctccaccgcagccgacatggccgcctccgccgacgaggaggcgtgcatgtatgctctccagctcgtctcgtcgtcgatcctcccgatgacgctcaagaacgccatcgagctgggtctcctggagaccctggtggccgccggcggcaagctgctgacgcccgccgaggtggcagccaagctcccgtccacggcgaatcccgccgcggcggacatggtggaccgcatgctccggctgctggcctcgtacaacgtggtgtcgtgcacgatggaggagggcaaggacggccggctgtcccggcggtacggcgccgcgcccgtgtgcaagttcctcacccccaacgaagacggcgtctccatggcggcgctcgcgctcatgaaccaggacaaggtcctcatggagagctggtactacctgaaggacgcggtccttgacggcggcatcccgttcaacaaggcgtacgggatgtcggcgttcgagtaccacggcacggacccgcgcttcaaccgcgtcttcaacgaggggatgaagaaccactccatcatcatcaccaagaagctcctcgaggtctacaaggggcttcgagggcctcggcaccatcgtcgacgtgggcggcggcgtgggcgccaccgtgggcgccatcgtcgccgcctacccggccatcaagggcatcaacttcgacctcccccacgtcatctccgaggcgccaccgttcccgggcgtcacccacgtcggcggcgacatgttccagaaggtgccctcgggcgacgccatcctcatgaagtggatcctccacgactggagcgacgagcactgcgcgacgctgctcaagaactgctacgacgcgctgccggcgcacggcaaggtggtgctcgtggagtgcatcctgccggtgaacccggaggccacgcccaaggcgcagggggtattccacgtcgacatgatcatgctcgcgcacaaccccggcggcagggagaggtacgagagggagttcgaggccctggccaagggcgccggcttcaaagccatcaagaccacctacatctacgccaacgcatttgccatcgagttcaccaagtagatccatgccaaccgtccaccgctcgctttgagaccatcttcttcttcctcgctggcgctgctgaatatgtactttggcttgctgtttcctctgttttcctaattttgtcatcctagctctgaatcattctgaatgctactggttgtgccgtcgatctacccattcgaaatgtactgtactattaatagtgctgctcttaaaggttgcatgtgatgcaatgacatgatttctctcctttgttg

SEQ ID NO: 717 - protein, 399 aa, Triticum aestivum
  misc_feature (31)..(82): Pfam Name: Dimerisation Pfam Description: Dimerisation domain
  misc_feature (91)..(255): Pfam Name: Methyltransf_2 Pfam Description: O-methyltransferase
  misc_feature: Ceres Clone ID no. 570057
  misc_feature: Bit score of 942.2 for HMM based on sequences of Figure 6
  misc_feature: Functional Homolog Of SEQ ID NO. 717
  misc_feature: in Figure 6
MGSTAADMAASADEEACMYALQLVSSSILPMTLKNAIELGLLETLVAAGGKLLTPAEVAAKLPSTANPAAADMVDRMLRLLASYNVVSCTMEEGKDGRLSRRYGAAPVCKFLTPNEDGVSMAALALMNQDKVLMESWYYLKDAVLDGGIPFNKAYGMSAFEYHGTDPRFNRVFNEGMKNHSIIITKKLLEVYKGLRGPRHHRRRGRRRGRHRGRHRRRLPGHQGHQLRPPPRHLRGATVPGRHPRRRRHVPEGALGRRHPHEVDPPRLERRALRDAAQELLRRAAGARQGGARGVHPAGEPGGHAQGAGGIPRRHDHARAQPRRQGEVREGVRGPGQGRRLQSHQDHLHLRQRICHRVHQVDPCQPSTARFETIFFFLAGAAEYVLWLAVSSVFLILSS

SEQ ID NO: 718 - protein, 360 aa, Festuca arundinacea
  misc_feature (91)..(337): Pfam Name: Methyltransf_2 Pfam Description: O-methyltransferase
  misc_feature (31)..(82): Pfam Name: Dimerisation Pfam Description: Dimerisation domain
  misc_feature: Public GI ID no. 14578615
  misc_feature: Bit score of 899.7 for HMM based on sequences of Figure 6
  misc_feature: Functional Homolog Of SEQ ID NO. 717
  misc_feature: in Figure 6
MGSTAADMAASADEEACMFALQLASSSILPMTLKNAIELGLLEILVAAGGKSLTPTEVAAKLPSAANPEAPDMVDRMLRLLASYNVVSCLVEEGKDGRLSRSYGAAPVCKFLTPNEDGVSMAALALMNQDKVLMESWYYLKDAVLDGGIPFNKAYGMSAFEYHGTDPRFNRVFNEGMKNHSIIITKKLLELYHGFQGLGTLVDVGGGVGATVAAITAHYPAIKGVNFDLPHVISEAPPFPGVTHVGGDMFKEVPSGDAILMKWILHDWSDQHCATLLKNCYDALPAHGKVVLVECILPVNPEAKPSSQGVFHVDMIMLAHNPGGRERYEREFEALARGAGFTGVKSTYIYANAWAIEFTK

SEQ ID NO: 719 - protein, 360 aa, Lolium perenne
  misc_feature (91)..(337): Pfam Name: Methyltransf_2 Pfam Description: O-methyltransferase
  misc_feature (31)..(82): Pfam Name: Dimerisation Pfam Description: Dimerisation domain
  misc_feature: Public GI ID no. 4104220
  misc_feature: Bit score of 891.4 for HMM based on sequences of Figure 6
  misc_feature: Functional Homolog Of SEQ ID NO. 717
  misc_feature: in Figure 6
MGSTAADMAASADEDACMFALQLASSSVLPMTLKNAIELGLLEILVAAGGKSLTPTEVAAKLPSAANPEAPDMVDRILRLLASYNVVTCLVEEGKDGRLSRSYGAAPVCKFLTPNEDGVSMAALALMNQDKVLMESWYYLKDAVLDGGIPFNKAYGMSAFEYHGTDPRFNRVFNEGMKNHSIIITKKLLELYHGFEGLGTLVDVGGGVGATVAAIAAHYPTIKGVNFDLPHVISEAPQFPGVTHVGGDMFKEVPSGDTILMKWILHDWSDQHCATLLKNCYDALPAHGKVVLVQCILPVNPEANPSSQGVFHVDMIMLAHNPGGRERYEREFQALARGAGFTGVKSTYIYANAWAIEFTK

SEQ ID NO: 720 - protein, 356 aa, Hordeum vulgare subsp. vulgare
  misc_feature (87)..(333): Pfam Name: Methyltransf_2 Pfam Description: O-methyltransferase
  misc_feature (27)..(78): Pfam Name: Dimerisation Pfam Description: Dimerisation domain
  misc_feature: Public GI ID no. 148337324
  misc_feature: Bit score of 876.0 for HMM based on sequences of Figure 6
  misc_feature: Functional Homolog Of SEQ ID NO. 717
  misc_feature: in Figure 6
MGSIAAGADEDACMYALQLVSSSILPMTLKNAIELGLLETLMSAGGKFLTPAEVAAKLPSTANPEAPDMVDRMLRLLASYKVVSCRTEESKDGRLSRRYGAAPVCKYLTPNEDGVSMSALALMNQDKVLMESWYYLKDAVLDGGIPFNKAYGMSAFEYHGTDPRFNRVFNEGMKNHSIIITKKLLESYKGFEGLGTLVDVGGGVGATVGAIIARYPAVKGINFDLPHVISEAPAFPGVTHIGGDMFQKVPSGDAILMKWILHDWSDEHCATLLKNCYDALPAHGKVVLVECILPVNPEATPEVQGVFHVDMIMLAHNPGGRERYEREFEALAKGAGFAAMKTTYIYANAWAIEFTK

SEQ ID NO: 721 - protein, 360 aa, Bambusa oldhamii
  misc_feature (91)..(337): Pfam Name: Methyltransf_2 Pfam Description: O-methyltransferase
  misc_feature (31)..(82): Pfam Name: Dimerisation Pfam Description: Dimerisation domain
  misc_feature: Public GI ID no. 151579841
  misc_feature: Bit score of 890.0 for HMM based on sequences of Figure 6
  misc_feature: Functional Homolog Of SEQ ID NO. 717
  misc_feature: in Figure 6
MGSTAADMAAAADEEACMYAMQLASSSILPMTLKNAIELGLLEILVGAGGNALSPAEVAALLPSTANPDAPAMVDRMLRLLASYNVVSCVVEEGKDGRLSRRYGPAPVCKWLTPNEDGVSMAALALMNQDKVLMESWYYLKDAVLDGGIPFNKAYGMTAFEYRGTDPRFNRVFNEGMKNHSIIITKKLLEFYTGFDGVGTLIDVGGGIGATLYAITSKYPQIKGINFDLPHVISEAPPFPGVQHVGGNMFEKVPSGDAILMKWILHDWSDEHCATLLKNCYDALPAHGKVIIVECILPVNPEATPKAQGVFHVDMIMLAHNPGGKERYEREFEELARGAGFASVKATYIYATAWAIEFIK

SEQ ID NO: 722 - protein, 368 aa, Oryza sativa subsp. japonica
  misc_feature (98)..(345): Pfam Name: Methyltransf_2 Pfam Description: O-methyltransferase
  misc_feature (31)..(89): Pfam Name: Dimerisation Pfam Description: Dimerisation domain
  misc_feature: Public GI ID no. 115474869
  misc_feature: Bit score of 866.9 for HMM based on sequences of Figure 6
  misc_feature: Functional Homolog Of SEQ ID NO. 717
  misc_feature: in Figure 6
MGSTAADMAAAADEEACMYALQLASSSILPMTLKNAIELGLLETLQSAAVAGGGGKAALLTPAEVADKLPSKANPAAADMVDRMLRLLASYNVVRCEMEEGADGKLSRRYAAAPVCKWLTPNEDGVSMAALALMNQDKVLMESWYYLKDAVLDGGIPFNKAYGMTAFEYHGTDARFNRVFNEGMKNHSVIITKKLLDLYTGFDAASTVVDVGGGVGATVAAVVSRHPHIRGINYDLPHVISEAPPFPGVEHVGGDMFASVPRGGDAILMKWILHDWSDEHCARLLKNCYDALPEHGKVVVVECVLPESSDATAREQGVFHVDMIMLAHNPGGKERYEREFRELARAAGFTGFKATYIYANAWAIEFTK

SEQ ID NO: 723 - protein, 360 aa, Triticum aestivum
  misc_feature (91)..(337): Pfam Name: Methyltransf_2 Pfam Description: O-methyltransferase
  misc_feature (31)..(82): Pfam Name: Dimerisation Pfam Description: Dimerisation domain
  misc_feature: Public GI ID no. 30385246
  misc_feature: Bit score of 892.9 for HMM based on sequences of Figure 6
  misc_feature: Functional Homolog Of SEQ ID NO. 717
MGSTAADMAASADEEACMYALQLVSSSILPMTLKNAIELGLLETLVAAGGKLLTPAEVAAKLPSTANPAAADMVDRMLRLLASYNVVSCTMEEGKDGRLSRRYRAAPVCKFLTPNEDGVSMAALALMNQDKVLMESWYYLKDAVLDGGIPFNKAYGMSAFEYHGTDPRFNRVFNEGMKNHSIIITKKLLEVYKGFEGLGTIVDVGGGVGATVGAITAAYPAIKGINFDLPHVISEAQPFPGVTHVGGDMFQKVPSGDAILMKWILHDWSDEHCATLLKNCYDALPAHGKVVLVECILPVNPEATPKAQGVFHVDMIMLAHNPGGRERYEREFEALAKGAGFKAIKTTYIYANAFAIEFTK

SEQ ID NO: 724 - DNA, 1269 bp, Panicum virgatum
  misc_feature: Ceres Clone ID no. 1824196
  misc_feature: Encodes the peptide sequence at SEQ ID NO. 725
agcactggcgcacgccacttgactgttgcctctcgatcggtctcggcagctcaacgccggcaagaagccccccctagctcgccgccggcagctccaccactcgagcaggctgcagccagccatgggctccaccgccaccgacgtggccgcggccgcggacgaggaggcgtgcatgtacgcgctgcagctggcgtcgtcgtccatcctgccgatgacgctcaagaacgccatcgagctgggcctgctggaggtgctccagaaggaccccgcggctgcccgtgacgcccactaaccccgacgcggcgaccatggtcgaccgcatcctgcgcctgctcgcctcctacgacgtcgtccggtgccagatggaggagggcaaggacggcaagtactcgcgccgctacgccgccgcgcccgtctgcaagtggctcacccccaacgaggacggcgtctccatggccgccctcgcgctcatgaaccaggacaaggtcctcatggagagctggtactacctcaaggacgccgtgctggagggcggcatcccgttcaacaaggcgtacggcatgacggcgttcgagtaccacggcacggacccgcgcttcaaccgcgtgttcaacgagggcatgaagaaccactcggtgatcatcaccaagaagctgctcgagttctacaccggcttcgagggcgtcggcaccctggtcgacgtcggcggcggcatcggcgccaccctgcacgccatcacctcccactacccacgtcggcggcgacatgttcaaggccgtgcccgccggcgacgccatcctcatgaagtggatcctccacgactggagcgacgcccactgcgcggtgatcctcaagaactgctacgacgcgctccccgccggcggcaaggtgatcatcgtcgagtgcatcctgccggtgaacccggaggcgacgcccaaggcgcagggcgtgttccacgtcgacctcatcatgctcgcgcacaaccccggcgacaaggagcgctacgagagggagttcgaggagctcgccaagggcgccggcttcaccgggttcaaggccacctacatctacgccaacgcatgggccatcgagttcaccaagtagatctctgaagctgcttcctcgtgctgttgtcgcgcatgtgctttcgcttaatttgctttcttcttcttcatcatcatcatcctactggcctgcctgcctccatgtccatggccaccatcgatcttgttctggattccaaacgaactctaatggttgtatgtgttg

SEQ ID NO: 725 - protein, 267 aa, Panicum virgatum
  misc_feature (19)..(247): Pfam Name: Methyltransf_2 Pfam Description: O-methyltransferase
  misc_feature (2)..(17): Pfam Name: Dimerisation Pfam Description: Dimerisation domain
  misc_feature: Ceres Clone ID no. 1824196
  misc_feature: Bit score of 332.1 for HMM based on sequences of Figure 6
  misc_feature: Functional Homolog Of SEQ ID NO. 717
MVDRILRLLASYDVVRCQMEEGKDGKYSRRYAAAPVCKWLTPNEDGVSMAALALMNQDKVLMESWYYLKDAVLEGGIPFNKAYGMTAFEYHGTDPRFNRVFNEGMKNHSVIITKKLLEFYTGFEGVGTLVDVGGGIGATLHAITSHYPRRRRHVQGRARRRRHPHEVDPPRLERRPLRGDPQELLRRAPRRRQGDHRRVHPAGEPGGDAQGAGRVPRRPHHARAQPRRQGALREGVRGARQGRRLHRVQGHLHLRQRMGHRVHQVDL

SEQ ID NO: 726 - protein, 360 aa, Festuca arundinacea
  misc_feature (91)..(337): Pfam Name: Methyltransf_2 Pfam Description: O-methyltransferase
  misc_feature (31)..(82): Pfam Name: Dimerisation Pfam Description: Dimerisation domain
  misc_feature: Public GI ID no. 14578613
  misc_feature: Bit score of 896.9 for HMM based on sequences of Figure 6
  misc_feature: Functional Homolog Of SEQ ID NO. 717
MGSTAADMAASADEEACMFALQLASSSILPMTLKNAIELGLLEILVAAGGKSLTPTEVAAKLPSAANPEAPDMVDRMLRLLASYNVVTCLVEEGKDGRLSRSYGAAPVCKFLTPNEDGVSMAALALMNQDKVLMESWYYLKDAVLDGGIPFNKAYGMSAFEYHGTDPRFNRVFNEGMKNHSIIITKKLLELYHGFQGLGTLVDVGGGVGATVAAIAAHYPAIKGVNFDLPHVISEAPQFPGVTHVGGDMFKEVPSGDAILMKWILHDWSDQHCATLLKNCYDALPAHGKVVLVECILPVNPEAKPSSQGVFHVDMIMLAHNPGGRERYEREFEALARGAGFTGVKSTYIYANAWAIEFTK

SEQ ID NO: 727 - protein, 360 aa, Festuca arundinacea
  misc_feature (91)..(337): Pfam Name: Methyltransf_2 Pfam Description: O-methyltransferase
  misc_feature (31)..(82): Pfam Name: Dimerisation Pfam Description: Dimerisation domain
  misc_feature: Public GI ID no. 14578611
  misc_feature: Bit score of 890.8 for HMM based on sequences of Figure 6
  misc_feature: Functional Homolog Of SEQ ID NO. 717
MGSTAADMAASADEDACMFALQLASSSVLPMTLKNAIELGLLEILVAAGGKSLTPTEVAAKLPSAANPEAPDMVDRILRLLASYNVVTCLVEEGKDGRLSRSYGAAPVCKFLTPNEDGVSMAALALMNQDKVLMESWYYLKDAVLDGGIPFNKAYGMSAFEYHGTDPRFNRVFNEGMKNHSIIITKKLLELYHGFEGLGSLVDVGGGVGATVAAIAAHYPTIKGVNFDLPHVISEAPQFPGVTHVGGDMFKEVPSGDAILMKWILHDWSDQHCATLLKNCYDALPAHGKVVLVECILPVNPEANPSSQGVFHVDMIMLAHNPGGRERYEREFQALARGAGFTGVKSTYIYANAWAIEFTK

SEQ ID NO: 728 - protein, 360 aa, Festuca arundinacea
  misc_feature (91)..(337): Pfam Name: Methyltransf_2 Pfam Description: O-methyltransferase
  misc_feature (31)..(82): Pfam Name: Dimerisation Pfam Description: Dimerisation domain
  misc_feature: Public GI ID no. 14578617
  misc_feature: Bit score of 869.0 for HMM based on sequences of Figure 6
  misc_feature: Functional Homolog Of SEQ ID NO. 717
MGSSAADVAASADEEACMYALQLGSSSILPMTLKNTIELGLLETLMAAGGKSLTPTEVAAKLPCAANPEAPDMVDRMLRLLASYNVVSCLVEEGTDGRLSRRYGAAPVCKFLTPNEDGVSMAALALMNQDKVLMESWYYLKDAVLDGGIPFNKAYGMSAFEYHGTDPRFNRVFNEAMKNNSIIITKKLLELYDGFQGIGTLVDVGGSVGATVAAITAHYPAIEGINFDLPHVISEAPPFPGVTHVGGDMFKKVPSGDAILMKWILHDWSDQHCATLLKNCYDALPAHGKVVLVECILPVHPEAKPSSQGVFHVDMIMLAHNPGGRERYEREFEALAKGAGFAGFKSTYIYANAWAIEFTK

SEQ ID NO: 729 - DNA, 1261 bp, Triticum aestivum
  misc_feature: Ceres Clone ID no. 1453701
  misc_feature: Encodes the peptide sequence at SEQ ID NO. 730
tccaaagtaggtcatcgctcagtcgctcgctcacactcaacgccacgtagcagcagctcggctccggcggggcagaagcaagcagagatggggtcgatcgccgccggcgccgacgaggatgcgtgcatgtacgctctccagctcgtctcgtcgtcgatcctcccgatgacgctgaagaacgccatcgagctggggctcctcgagaccctgatggccgccggcggcaagttcttgactcccgctgaggtggcagccaagctcccgtccgcggcgaatccggaagcgccggacatggtggaccgtatgctccgtctgttggcctcgtacaacgtggtgtcgtgcaggacggaggagggcaaggacggccgcctctcccggcggtacggcgccgcgcccgtgtgcaagtacctcacccccaacgaggacggcgtgtccatgtcggcgctcgcgctcatgaaccaggacaaggtcctcatggagagctggtactatctcaaggatgcggtcctcgacggtggcatcccgttcaacaaggcgtacgggatgtcggcgttcgagtaccacggcacggacccacgcttcaaccgcgtcttcaacgaggggatgaagaaccattccatcatcatcaccaagaagctcctcgagtcctacaagggcttcgagggcctcggcaccctcgtcgacgtgggcggtggcgtcggcgccaccgtggccgccatcaccgctcactaccccaccatcaagggcatcaactttgaccttccccacgtcatcagtgaggcgccgccgttccccggtgtcacccacgtcggcggcgacatgttccagaaggtgccctcgggcgacgccatcctcatgaagtggatcctccacgactggagcgacgagcactgcgcgacgctgctcaagaactgctacgacgcgttgccggcgcacggcaaggtggtgctcgtggagtgcatcctgccggtgaacccggaggcgacgcctaaggcgcagggggtgttccatgtcgacatgatcatgctcgcgcacaacccgggtggcagggagaggtacgagagggagttcgaggccctggccaagggcgccgggttcgccgccatgaagactacttacatctacgccaacgcatgggccatcgagttcactaagtagatgatccatgacaacgagtctacctctctgatgcatccacctgcatgtgtactttctcttcgtttttccttcaaaaaaaatttcactctctgagtcaatctat

SEQ ID NO: 730 - protein, 356 aa, Triticum aestivum
  misc_feature (87)..(333): Pfam Name: Methyltransf_2 Pfam Description: O-methyltransferase
  misc_feature (27)..(78): Pfam Name: Dimerisation Pfam Description: Dimerisation domain
  misc_feature: Ceres Clone ID no. 1453701
  misc_feature: Bit score of 880.0 for HMM based on sequences of Figure 6
  misc_feature: Functional Homolog Of SEQ ID NO. 717
MGSIAAGADEDACMYALQLVSSSILPMTLKNAIELGLLETLMAAGGKFLTPAEVAAKLPSAANPEAPDMVDRMLRLLASYNVVSCRTEEGKDGRLSRRYGAAPVCKYLTPNEDGVSMSALALMNQDKVLMESWYYLKDAVLDGGIPFNKAYGMSAFEYHGTDPRFNRVFNEGMKNHSIIITKKLLESYKGFEGLGTLVDVGGGVGATVAAITAHYPTIKGINFDLPHVISEAPPFPGVTHVGGDMFQKVPSGDAILMKWILHDWSDEHCATLLKNCYDALPAHGKVVLVECILPVNPEATPKAQGVFHVDMIMLAHNPGGRERYEREFEALAKGAGFAAMKTTYIYANAWAIEFTK

SEQ ID NO: 731 - protein, 356 aa, Triticum aestivum
  misc_feature (87)..(333): Pfam Name: Methyltransf_2 Pfam Description: O-methyltransferase
  misc_feature (27)..(78): Pfam Name: Dimerisation Pfam Description: Dimerisation domain
  misc_feature: Public GI ID no. 77818928
  misc_feature: Bit score of 877.4 for HMM based on sequences of Figure 6
  misc_feature: Functional Homolog Of SEQ ID NO. 717
MGSIAAGADEDACMYALQLVSSSILPMTLKNAIELGLLETLMAAGGKFLTPAEVAAKLPSAANPEAPDMVDRMLRLLASYNVVSCRTEDGKDGRLSRRYGAAPVCKYLTPNEDGVSMSALALMNQDKVLMESWYYLKDAVLDGGIPFNKAYGMSAFEYHGTDPRFNRVFNEGMKNHSIIITKKLLESYKGFEGLGTLVDVGGGVGATVAAITAHYPTIKGINFDLPHVISEAPPFPGVTHVGGDMFQKVPSGDAILMKWILHDWSDEHCATLLKNCYDALPAHGKVVLVECILPVNPEATPKAQGVFHVDMIMLAHNPGGRERYEREFEALAKGAGFAAMKTTYIYANAWAIEFTK

SEQ ID NO: 732 - protein, 360 aa, Lolium perenne
  misc_feature (91)..(337): Pfam Name: Methyltransf_2 Pfam Description: O-methyltransferase
  misc_feature (31)..(82): Pfam Name: Dimerisation Pfam Description: Dimerisation domain
  misc_feature: Public GI ID no. 2388664
  misc_feature: Bit score of 873.6 for HMM based on sequences of Figure 6
  misc_feature: Functional Homolog Of SEQ ID NO. 717
MGSTAADMAASADEDVALFALQLASSSVLPMTLKNAIELGLLEILVAAGGKSLTPTEVAAKLPSAVNPEAPDMVDRILRLLASYNVVTCLVEEGKDGRLSRSYGAAPVCKFLTPNEDGVSMAALALMNQDKVLMESWYYLKDAVLDGGIPFNKAYGMSAFEYHGTDPRFNRVFNEGMKNHSIIITKKLLELYHGFQGLGTLVDVGGGVGATVAAIAAHYPAIKGVNFDLPHVISEAPQFPGVTHVGGDMFKEVPSGDAILMKWILHDWSDQHCATLLKNCYDALPANGKVVLVECILPVNPEANPSSQGVFHVDMIMLAHNPGGRERYEREFQALARGAGFTGVKSTYIYANAWAIEFTK

SEQ ID NO: 733 - protein, 360 aa, Triticum aestivum
  misc_feature (92)..(337): Pfam Name: Methyltransf_2 Pfam Description: O-methyltransferase
  misc_feature (31)..(82): Pfam Name: Dimerisation Pfam Description: Dimerisation domain
  misc_feature: Public GI ID no. 145693796
  misc_feature: Bit score of 825.5 for HMM based on sequences of Figure 6
  misc_feature: Functional Homolog Of SEQ ID NO. 717
MGSTATDIAASAHEEACMFALQLGSSSILPMTLKNSIELGLLDTLVAADGKLLSPAELAAKLPSTANPAAPDMVDRMLRLLASYKVVSCTLEEDKDGRLSRRYGAEPVCKFLTPNEEGVSMAPLALMNQDKVLMESWYYLKDAVLDGGSPFNKAHGMSAFEYHGTDPRFNCVFNEGMKNHSIIITKKLLELYKGFNGLDTLVDVGGGIGATVGAITAHYPTVKGINFDLPHVISEAPPFSGVTHVGGDMFQKIPSGDTILMKWILHDWSDEHCATLLKNCYDALPAHGKVVLVECILPVNPEATPEAQGGFHLDMIMLAHNPGGKERYEREFEALAKGAGFGAIKTTYIYANIWVIEFTK

SEQ ID NO: 734 - protein, 361 aa, Oryza sativa subsp. indica
  misc_feature (91)..(338): Pfam Name: Methyltransf_2 Pfam Description: O-methyltransferase
  misc_feature (24)..(82): Pfam Name: Dimerisation Pfam Description: Dimerisation domain
  misc_feature: Public GI ID no. 125560205
  misc_feature: Bit score of 837.1 for HMM based on sequences of Figure 6
  misc_feature: Functional Homolog Of SEQ ID NO. 717
MAAAADEEACMYALQLASSSILPMTLKNAIELGLLETLQSAAVAGGGGKAALLTPAEVAEKLPSKANPAAADMVDRMLRLLASYNVVRCEMEEGADGKLSRRYAAAPVCKWLTPNEDGVSMAALALMNQDKVLMESWYYLKDAVLDGGIPFNKAYGMTAFEYHGTDARFNRVFNEGMKNHSVIITKKLLDLYTGFDAASTVVDVGGGVGATVAAVVSRHPHIRGINYDLPHVISEAPPFPGVEHVGGDMFASVPRSGDAILMKWILHDWSDEHCARLLKNCYDALPEHGKVVVVECVLPESSDATAREQGVFHVDMIMLAHNPGGKERYEREFRELARAAGFTGFKATYIYANAWAIEFTK

SEQ ID NO: 735 - protein, 361 aa, Oryza sativa subsp. japonica
  misc_feature (91)..(338): Pfam Name: Methyltransf_2 Pfam Description: O-methyltransferase
  misc_feature (24)..(82): Pfam Name: Dimerisation Pfam Description: Dimerisation domain
  misc_feature: Public GI ID no. 125602246
  misc_feature: Bit score of 834.8 for HMM based on sequences of Figure 6
  misc_feature: Functional Homolog Of SEQ ID NO. 717
MAAAADEEACMYALQLASSSILPMTLKNAIELGLLETLQSAAVAGGRGKAALLTPAEVADKLPSKANPAAADMVDRMLRLLASYNVVRCEMEEGADGKLSRRYAAAPVCKWLTPNEDGVSMAALALMNQDKVLMESWYYLKDAVLDGGIPFNKAYGMTAFEYHGTDARFNRVFNEGMKNHSVIITKKLLDLYTGFDAASTVVDVGGGVGATVAAVVSRHPHIRGINYDLPHVISEAPPFPGVEHVGGDMFASVPRGGDAILMKWILHDWSDEHCARLLKNCYDALPEHGKVVVVECVLPESSDATAREQGVFHVDMIMLAHNPGGKERYEREFRELARAAGFTGFKATYIYANAWAIEFTK

SEQ ID NO: 736 - DNA, 1459 bp, Panicum virgatum
  misc_feature: Ceres Clone ID no. 1769444
  misc_feature: Encodes the peptide sequence at SEQ ID NO. 737
attcccagcactgagcacacgcggacacgccactagctagcctcctcccggtctgagcagctcatcaacgccgccggcaagaagccccctcgagctcgccgccggcagccagccagccagccagccatgggctcgaccgccgccgacgtggccgcggccgcggacgaggaggcgtgcatgtacgcgctgcagctggcgtcgtcgtccatcctgccgatgacgctcaagaacgccatcgagctgggcctgctggaggtgctccagaaggaccccgcggcggcgctggcgccggaggaggtggtggcgcggctgcccgtggcgccggccaacccggacgcggcggccatggtcgaccgcatgctgcgcctgctcgcctcctacgacgtcgtcaggtgccggatggaggagggcaaggacggccggtactcgcgccggtactccgccgcgccggtgtgcaagtggctcacccccaacgaggacggcgtctccatggccgcgctcgcgctcatgaaccaggacaaggtcctcatggagagctggtactacctcaaggacgcggtgctggagggcggcatcccgttcaacaaggcgtacggcatgacggcgttcgagtaccacggcacggacccgcgcttcaaccgcgtgttcaacgagggcatgaagaaccactcggtgatcatcaccaagaagctgctcgagttctacgccggcttcgagggcgtcggcaccctggtcgacgtcggcggcggcgtcggcgccaccctgcacgccatcacctcccgctaccccggcatcaggggggtcaacttcgacctgccccacgtgatctccgaggcgccgccgttccccggcgtggagcacgtcggcggggacatgttcaaggccgtgcccgccggtgacgccatcctcatgaagtggatcctccacgactggagcgacgcccactgcgcggcgatcctcaagaactgctacgacgcgctccccgccggcggcaaggtgatcgccgtcgagtgcatcctgccggtgaacccggaggcgacgcccaaggcgcagggcgtgttccacgtcgacatgatcatgctcgcgcacaaccccggaggcaaggagcgctacgagagggagttcgaggagctcgccaagggcgccggcttcaccgggttcaaggccacctacatctacgccaacgcatgggccatcgagttcaccaagtagatctgttgtcgcgcatgtgcttgtgcttaatttgctttcttcatcatcatcttcatcctgctgctggcctgcctgccggcctccatggccggaccaccatcgatccttgttctggattccaaattctaatggttgtatgtgttgagatgtctctaccatgtaccattaataaataataacagccaatgtactcttatatatatacatattgtaacaccccagttgttaatcacttgtagttaaggtc

SEQ ID NO: 737 - protein, 361 aa, Panicum virgatum
  misc_feature (92)..(338): Pfam Name: Methyltransf_2 Pfam Description: O-methyltransferase
  misc_feature (31)..(83): Pfam Name: Dimerisation Pfam Description: Dimerisation domain
  misc_feature: Ceres Clone ID no. 1769444
  misc_feature: Bit score of 823.7 for HMM based on sequences of Figure 6
  misc_feature: Functional Homolog Of SEQ ID NO. 717
MGSTAADVAAAADEEACMYALQLASSSILPMTLKNAIELGLLEVLQKDPAAALAPEEVVARLPVAPANPDAAAMVDRMLRLLASYDVVRCRMEEGKDGRYSRRYSAAPVCKWLTPNEDGVSMAALALMNQDKVLMESWYYLKDAVLEGGIPFNKAYGMTAFEYHGTDPRFNRVFNEGMKNHSVIITKKLLEFYAGFEGVGTLVDVGGGVGATLHAITSRYPGIRGVNFDLPHVISEAPPFPGVEHVGGDMFKAVPAGDAILMKWILHDWSDAHCAAILKNCYDALPAGGKVIAVECILPVNPEATPKAQGVFHVDMIMLAHNPGGKERYEREFEELAKGAGFTGFKATYIYANAWAIEFTK

SEQ ID NO: 738 - DNA, 1448 bp, Panicum virgatum
  misc_feature: Ceres Clone ID no. 1869486
  misc_feature: Encodes the peptide sequence at SEQ ID NO. 739
cagcactggcgcacgccacttgactgttgcctctcgatcggtctcggcagctcaacgccggcaagaagccccccctagctcgccgccggcagctccaccactcgagcaggctgcagccagccatgggctccaccgccaccgacgtggccgcggccgcggacgaggaggcgtgcatgtacgcgctgcagctggcgtcgtcgtccatcctgccgatgacgctcaagaacgccatcgagctgggcctgctggaggtgctccagaaggaccccgcggcggcgctggcgccggaggaggtggtggcgcggctgcccgtgacgcccactaaccccgacgcggcgaccatggtcgaccgcatcctgcgcctgctcgcctcctacgacgtcgtccggtgccagatggaggagggcaaggacggcaagtactcgcgccgctacgccgccgcgcccgtctgcaagtggctcacccccaacgaggacggcgtctccatggccgccctcgcgctcatgaaccaggacaaggtcctcatggagagctggtactacctcaaggacgccgtgctggagggcggcatcccgttcaacaaggcgtacggcatgacggcgttcgagtaccacggcacggacccgcgcttcaaccgcgtgttcaacgagggcatgaagaaccactcggtgatcatcaccaagaagctgctcgagttctacaccggcttcgagggcgtcggcaccctggtcgacgtcggcggcggcatcggcgccaccctgcacgccatcacctcccactacccgcggataacgggggtcaacttcgacctgccccacgtgatctccgaggcgccgccgttccccggcgtgcagcacgtcggcggcgacatgttcaaggccgtgcccgccggcgacgccatcctcatgaagtggatcctccacgactggagcggcgcccactgcgcggtgatcctcaagaactgctacgacgcgctccccgccggcggcaaggtgatcatcgtcgagtgcatcctgccggtgaacccggaggcgacgcccaaggcgcagggcgtgttccacgccgacctcatcatgctcgcgcacaaccccggcggcaaggagcgctacgagagggagttcgaggagctcgccaagggcgccggcttcaccgggttcaaggccacctacatctacgccaacgcatgggccatcgagttcaccaagtagatctctgaagctgcttcctcgtgctgttgtcgcgcatgtgctttcgcttaatttgctttcttcttcttcatcatcatcatcctactggcctgcctgcctccatgtccatggccaccatcgatcttgttctggattccaaacgaactctaatggttgtatgtgttgagatgtctctaccatgtaccattaataacagccaaggtactcttatatatatacatacatacttaatatgatgac

SEQ ID NO: 739 - protein, 361 aa, Panicum virgatum
  misc_feature (92)..(338): Pfam Name: Methyltransf_2 Pfam Description: O-methyltransferase
  misc_feature (31)..(83): Pfam Name: Dimerisation Pfam Description: Dimerisation domain
  misc_feature: Ceres Clone ID no. 1869486
  misc_feature: Bit score of 810.9 for HMM based on sequences of Figure 6
  misc_feature: Functional Homolog Of SEQ ID NO. 717
MGSTATDVAAAADEEACMYALQLASSSILPMTLKNAIELGLLEVLQKDPAAALAPEEVVARLPVTPTNPDAATMVDRILRLLASYDVVRCQMEEGKDGKYSRRYAAAPVCKWLTPNEDGVSMAALALMNQDKVLMESWYYLKDAVLEGGIPFNKAYGMTAFEYHGTDPRFNRVFNEGMKNHSVIITKKLLEFYTGFEGVGTLVDVGGGIGATLHAITSHYPRITGVNFDLPHVISEAPPFPGVQHVGGDMFKAVPAGDAILMKWILHDWSGAHCAVILKNCYDALPAGGKVIIVECILPVNPEATPKAQGVFHADLIMLAHNPGGKERYEREFEELAKGAGFTGFKATYIYANAWAIEFTK

SEQ ID NO: 740 - DNA, 846 bp, Panicum virgatum
  misc_feature: Ceres Clone ID no. 1769168
  misc_feature: Encodes the peptide sequence at SEQ ID NO. 741
agcactggcgcacgccacttgcctgttgcctctcgatcggtctcggcagctcaacgccggcaagaagccccccctagctcgccgccggcagctccaccactcgagcaggctgcagccagccatgggctccaccgccaccgacgtggccgcggccgcggacgaggaggcgtgcatgtacgcgctgcagctggcgtcgtcgtccatcctgccgatgacgctcaagaacgccatcgagctgggcctgctggaggtgctccagaaggaccccgcggcggcgctggcgccggaggaggtggtggcgcggctgcccgtggcgcccactaaccccgacgcggcgaccatggtcgaccgcatcctgcgcctgctcgcctcctacgacgtcgtccggtgccagatggaggagggcaaggacggcaagtactcgcgccgctacgccgccgcgcccgtctgcaagtggctcacccccaacgaggacggcgtctccatggccgccctcgcgctcatgaaccaggacaaggtcctcatggagagctggtactacctcaaggacgccgtgctggagggcggcatcccgttcaacaaggcgtacggcatgacggcgttcaagtaccacggcacggacccgcgcttcaaccgcgtgttcaacgagggcatgaagaaccactcggtgatcatcaccaagaagctgctcgagttctacaccggcttcgagggcgtcggcaccctggtcgacgtcggcggcggcatcggcgccaccctgcacgccatcacctcccactacccgcggatcaagggggtcaacttcgacctgccccatgtgatctccgaggcgccgccgttccccgg

SEQ ID NO: 741 - protein, 241 aa, Panicum virgatum
  misc_feature (92)..(241): Pfam Name: Methyltransf_2 Pfam Description: O-methyltransferase
  misc_feature (31)..(83): Pfam Name: Dimerisation Pfam Description: Dimerisation domain
  misc_feature: Ceres Clone ID no. 1769168
  misc_feature: Bit score of 369.3 for HMM based on sequences of Figure 6
  misc_feature: Functional Homolog Of SEQ ID NO. 717
MGSTATDVAAAADEEACMYALQLASSSILPMTLKNAIELGLLEVLQKDPAAALAPEEVVARLPVAPTNPDAATMVDRILRLLASYDVVRCQMEEGKDGKYSRRYAAAPVCKWLTPNEDGVSMAALALMNQDKVLMESWYYLKDAVLEGGIPFNKAYGMTAFKYHGTDPRFNRVFNEGMKNHSVIITKKLLEFYTGFEGVGTLVDVGGGIGATLHAITSHYPRIKGVNFDLPHVISEAPPFP

SEQ ID NO: 742 - DNA, 1089 bp, Sorghum bicolor
  misc_feature: Ceres Annot ID no. 8704591
  misc_feature: Encodes the peptide sequence at SEQ ID NO. 743
atggggtcgacggcggaggacgtggcggcggtggcggacgaggaggcgtgcatgtacgcgatgcagctggcgtcgtcgtcgatcctccccatgacgctgaagaacgcgctggagctgggcctgctggaggtgcttcagaaggacgccggcaaggcgctggcggcggaggaggtggtggcgcggctgcccgtggcgccgacgaaccccgccgcggcggacatggtggaccgcatgctccgcctcctcgcctcctacgacgtcgtgaagtgccagatggaggacaaggacggcaagtacgagcgtcggtactccgccgcccccgtcggcaagtggctcacccctaacgaggacggcgtctccatggccgccctcgcgctcatgaaccaggacaaggtcctcatggagagctggtactacctgaaggacgcggtgcttgacggcggcatcccgttcaacaaggcgtacgggatgacggcgttcgagtaccacggcacggacccgcgcttcaaccgcgtgttcaacgagggcatgaagaaccacagcgtgatcatcaccaagaagctcctcgagttctacacgggcttcgacgagtccgtctcgacgctcgtcgacgtgggcggcggcatcggcgccaccttacacgccatcacctcccaccactcccacatcaggggcgtcaacttcgacctcccccacgtgatctccgaggcgccgccgttccccggcgtgcagcacgtcggcggggacatgttcaagtcggtgccggccggcgacgccatcctcatgaagtggatcctccacgactggagcgacgcgcactgcgccacgctgctcaagaactgctacgacgcgctgccggagaagggcggcaaggtgatcgtcgtcgagtgcgtgctgccggtgaccaccgacgccgtccccaaggcgcagggcgtgttccatgtcgacatgatcatgctcgcgcataaccccggcggcagggagcggtacgagcgggagttccgtgacctcgccaaggccgctggcttctctgggttcaaggccacctacatctacgccaacgcctgggccatcgagttcatcaagtaa

SEQ ID NO: 743 - protein, 362 aa, Sorghum bicolor
  misc_feature (92)..(339): Pfam Name: Methyltransf_2 Pfam Description: O-methyltransferase
  misc_feature (31)..(83): Pfam Name: Dimerisation Pfam Description: Dimerisation domain
  misc_feature: Ceres Annot ID no. 8704591
  misc_feature: Bit score of 772.1 for HMM based on sequences of Figure 6
  misc_feature: Functional Homolog Of SEQ ID NO. 717
MGSTAEDVAAVADEEACMYAMQLASSSILPMTLKNALELGLLEVLQKDAGKALAAEEVVARLPVAPTNPAAADMVDRMLRLLASYDVVKCQMEDKDGKYERRYSAAPVGKWLTPNEDGVSMAALALMNQDKVLMESWYYLKDAVLDGGIPFNKAYGMTAFEYHGTDPRFNRVFNEGMKNHSVIITKKLLEFYTGFDESVSTLVDVGGGIGATLHAITSHHSHIRGVNFDLPHVISEAPPFPGVQHVGGDMFKSVPAGDAILMKWILHDWSDAHCATLLKNCYDALPEKGGKVIVVECVLPVTTDAVPKAQGVFHVDMIMLAHNPGGRERYEREFRDLAKAAGFSGFKATYIYANAWAIEFIK

SEQ ID NO: 744 - protein, 362 aa, Saccharum officinarum
  misc_feature (94)..(339): Pfam Name: Methyltransf_2 Pfam Description: O-methyltransferase
  misc_feature (31)..(85): Pfam Name: Dimerisation Pfam Description: Dimerisation domain
  misc_feature: Public GI ID no. 29839259
  misc_feature: Bit score of 791.8 for HMM based on sequences of Figure 6
  misc_feature: Functional Homolog Of SEQ ID NO. 717
MGSTAEDVAAVADEEACMYAMQLASASILPMTLKNALELGLLEVLQAEAPAGKALAPEEVVARLPVAPTNPDAADMVDRMLRLLASYDVVKCQMEDKDGKYERRYSAAPVGKWLTPNEDGVSMAALTLMNQDKVLMESWYYLKDAVLDGGIPFNKAYGMTAFEYHGTDPRFNRVFNEGMKNHSVIITKKLLEFYTGFEGVSTLVDVGGGIGATLHAITSHHPQIKGINFDLPHVISEAPPFPGVQHVGGDMFKSVPAGDAILMKWILHDWSDAHCATLLKNCYDALPENGKVIIVECVLPVNTEAVPKAQGVFHVDMIMLAHNPGGRERYEREFHDLAKGAGFSGFKATYIYANAWAIEFIK

SEQ ID NO: 745 - protein, 362 aa, Sorghum bicolor
  misc_feature (92)..(339): Pfam Name: Methyltransf_2 Pfam Description: O-methyltransferase
  misc_feature (31)..(83): Pfam Name: Dimerisation Pfam Description: Dimerisation domain
  misc_feature: Public GI ID no. 18033964
  misc_feature: Bit score of 770.2 for HMM based on sequences of Figure 6
  misc_feature: Functional Homolog Of SEQ ID NO. 717
MGSTAEDVAAVADEEACMYAMQLASSSILPMTLKNALELGLLEVLQKDAGKALAAEEVVARLPVAPTNPAAADMVDRILRLLASYDVVKCQMEDKDGKYERRYSAAPVGKWLTPNEDGVSMAALALMNQDKVLMESWYYLKDAVLDGGIPFNKAYGMTAFEYHGTDPRFNRVFNEGMKNHSVIITKKLLEFYTGFDESVSTLVDVGGGIGATLHAITSHHSHIRGVNFDLPHVISEAPPFPGVQHVGGDMFKSVPAGDAILMKWILHDWSDAHCATLLKNCYDALPEKGGKVIVVECVLPVTTDAVPKAQGVFHVDMIMLAHNPGGRERYEREFRDLAKAAGFSGFKATYIYANAWAIEFIK

SEQ ID NO: 746 - protein, 362 aa, Saccharum hybrid cultivar
  misc_feature (94)..(339): Pfam Name: Methyltransf_2 Pfam Description: O-methyltransferase
  misc_feature (31)..(85): Pfam Name: Dimerisation Pfam Description: Dimerisation domain
  misc_feature: Public GI ID no. 34398680
  misc_feature: Bit score of 791.5 for HMM based on sequences of Figure 6
  misc_feature: Functional Homolog Of SEQ ID NO. 717
MGSTAEDVAAVADEEACMYAMQLASASILPMTLKNALELGLLEVLQAEAPAGKALAPEEVVARLPVAPTNPDAADMVDRMLRLLASYDVVKCQMEDKDGKYERRYSAAPVGKWLTPNEDGVSMAALTLMNQDKVLMESWYYLKDAVLDGGIPFNKAYGMTAFEYHGTDPRFNRVFNEGMKNHSVIITKKLLEFYTGFEGVSTLVDVGGGIGATLHAITSHHPQIKGINFDLPHVISEAPPFPGVQHVGGDMFKSVPAGDAILMKWILHDWSDAHCATLLKNCYDALPENGKVIVVECVLPVNTEAVPKAQGVFHVDMIMLAHNPGGRERYEREFHDLAKGAGFSGFKATYIYANAWAIEFIK

SEQ ID NO: 747 - protein, 364 aa, Zea mays
  misc_feature (96)..(341): Pfam Name: Methyltransf_2 Pfam Description: O-methyltransferase
  misc_feature (31)..(87): Pfam Name: Dimerisation Pfam Description: Dimerisation domain
  misc_feature: Public GI ID no. 33641708
  misc_feature: Bit score of 778.2 for HMM based on sequences of Figure 6
  misc_feature: Functional Homolog Of SEQ ID NO. 717
MGSTAGDVAAVVDEEACMYAMQLASSSILPMTLKNAIELGLLEVLQKEAGGGKAALAPEEVVARMPAAPSDPAAAAAMVDRMLRLLASYDVVRCQMEDRDGRYERRYSAAPVCKWLTPNEDGVSMAALALMNQDKVLMESWYYLKDAVLDGGIPFNKAYGMTAFEYHGTDPRFNRVFNEGMKDHSVIITKKLLDFYTGFEGVSTLVDVGGGVGATLHAITSRHPHISGVNFDLPHVISEAPPFPGVRHVGGDMFASVPAGDAILMKWILHDWSDAHCATLLKNCYDALPENGKAIVVECVLPVNTEATPKAQGVFHVDMIMLAHNPGGKERYEREFRELAKGAGFSGFKATYIYANAWAIEFIK

SEQ ID NO: 748 - DNA, 488 bp, Panicum virgatum
  misc_feature: Ceres Clone ID no. 1955766
  misc_feature: Encodes the peptide sequence at SEQ ID NO. 749
attacccctcaaacatacacgaagaagcagcattcgaagtgcttacatcttgtgagattaaaatctgcaggtatatatctctgaagaagatgagcagctcggcagttggtgagggcaaggggtgtgatgctactcccaagacagagtggcctgagctagtgggaagcacgatcaaggaggcgacggagaagatcaatgcggagcggccggacctcaatgtggagccggtccctgttggcaccatagtcccccaagatttcgacccgaagcgcgtccgtctctgggttgacaccgtcgccgaggtccccaggattggctgaaccagcttaacgcaaagccaccgaataatgaatgctacatgcatgtgttccacagaccattctacataggtcaattaaataaataaaaaatatggctgtgatggagcgttctggtatgctattaaaattgtcatgtttcggatatacacaattattattttcaatatc

SEQ ID NO: 749 - protein, 76 aa, Panicum virgatum
  misc_feature (17)..(76): Pfam Name: potato_inhibit Pfam Description: Potato inhibitor I family
  misc_feature: Ceres Clone ID no. 1955766
  misc_feature: Bit score of 156.9 for HMM based on sequences of Figure 47
  misc_feature: Functional Homolog Of SEQ ID NO. 749
  misc_feature: in Figure 47
MSSSAVGEGKGCDATPKTEWPELVGSTIKEATEKINAERPDLNVEPVPVGTIVPQDFDPKRVRLWVDTVAEVPRIG

SEQ ID NO: 750 - DNA, 544 bp, Triticum aestivum
  misc_feature: Ceres Clone ID no. 570179
  misc_feature: Encodes the peptide sequence at SEQ ID NO. 751
atctggaaagcaagccggtgctaggaacgatcaaatcacatagaagtgcatagaggtcgtggcgtttgcccaatttcattcccaccatgagcaagccatgcgacggtgccaatcccaagacggagtggcctgagctggtcgggcgcacgatcaaggaggcggaggagaagatcaaggcggaccgaccggacctcaaagttgtcattgtcccggtaggaagtgttgtgacacaggaggtcgatctgaaccgcgtccgcgtctgggtcgacacagtggcggaggttcccaagattggctaagctagcttgtaattagccaactggaataaaagcccatgcaagtctcaacatcgtccagttaatttgccgaacaaataagcatgggtatgttgtgaagaaaaataagtattgttggtgttttgcggaaatgtatcatgtgtggatctgttatgtatgttattttgttgtaagttgtaataagcatcgttaatattatctggccctgtttatattgtctaataaatataatctactttagcggagcg

SEQ ID NO: 751 - protein, 70 aa, Triticum aestivum
  misc_feature (11)..(70): Pfam Name: potato_inhibit Pfam Description: Potato inhibitor I family
  misc_feature: Ceres Clone ID no. 570179
  misc_feature: Bit score of 154.3 for HMM based on sequences of Figure 47
  misc_feature: Functional Homolog Of SEQ ID NO. 749
  misc_feature: in Figure 47
MSKPCDGANPKTEWPELVGRTIKEAEEKIKADRPDLKVVIVPVGSVVTQEVDLNRVRVWVDTVAEVPKIG

SEQ ID NO: 752 - protein, 65 aa, Oryza sativa subsp. japonica
  misc_feature (6)..(65): Pfam Name: potato_inhibit Pfam Description: Potato inhibitor I family
  misc_feature: Public GI ID no. 54290293
  misc_feature: Bit score of 148.4 for HMM based on sequences of Figure 47
  misc_feature: Functional Homolog Of SEQ ID NO. 749
  misc_feature: in Figure 47
MCKTPKTEWPELVCRTIKEAKEKIKADRPDLKIEVVPVGTIVTQEFDENRVRIWVDTVAKTPTIG

SEQ ID NO: 753 - protein, 68 aa, Hordeum vulgare subsp. vulgare
  misc_feature (9)..(68): Pfam Name: potato_inhibit Pfam Description: Potato inhibitor I family
  misc_feature: Public GI ID no. 1617121
  misc_feature: Bit score of 153.4 for HMM based on sequences of Figure 47
  misc_feature: Functional Homolog Of SEQ ID NO. 749
  misc_feature: in Figure 47
MSKSCDGAKTEWPELVGCTIKEAKEKIKADRPDLKVVIVPVGSIVTQEIDLNRVRVWVDKVAKVPKIG

SEQ ID NO: 754 - DNA, 222 bp, Sorghum bicolor
  misc_feature: Ceres Annot ID no. 8724383
  misc_feature: Encodes the peptide sequence at SEQ ID NO. 755
atgagctccacggcgacggcggcggattgcggcggcgccaagacgtcgtggccggaggtggtcgggaagagcgtggaggaagcaaagaaggtgatcctcaaggacaagcctgacgccgacatcgtcgtgctgcccgtcggcacgattgtgaccgcagattttgtgcccagccgcgtgcgtatcttcgtcgacaccgtcgcccagacaccccacatcggctga

SEQ ID NO: 755 - protein, 73 aa, Sorghum bicolor
  misc_feature (14)..(73): Pfam Name: potato_inhibit Pfam Description: Potato inhibitor I family
  misc_feature: Ceres Annot ID no. 8724383
  misc_feature: Bit score of 168.0 for HMM based on sequences of Figure 47
  misc_feature: Functional Homolog Of SEQ ID NO. 749
  misc_feature: in Figure 47
MSSTATAADCGGAKTSWPEVVGKSVEEAKKVILKDKPDADIVVLPVGTIVTADFVPSRVRIFVDTVAQTPHIG

SEQ ID NO: 756 - DNA, 555 bp, Zea mays
  misc_feature: Ceres Clone ID no. 896724
  misc_feature: Encodes the peptide sequence at SEQ ID NO. 757
ctctagctggctgaacgggtctacaaatatacactactactccactaatgtcacatatccacaaccaggtgatctcaagtaattaacagaaaatatattccatcattgaaaatgagttccgttgttttgggtgctactggtagggagaataagacatcatggcctgaggtggtgggcatgtccatcaaggaggcaagagagatcattcttaaagacatgcccaacgctaacattcaagttctaccggttggctcgcttgtgacccaagactttcgccctgatcgtgttcgcatcttcgttgatattgttgcccagactccaacagttggctgacaaggatatgccttatctataggccaaataaacaaagcctacttttatgtatcatggctaataaatcctacatttcttggttatccttgattggtttagcttattagctatatcgccatcaaaaggggccccaagaaattacatgtatgtctatcataaaaatctcatcccgatggaatatataataaataaataatgatatatgcaatccgtaactatgcc

SEQ ID NO: 757 - protein, 73 aa, Zea mays
  misc_feature (14)..(73): Pfam Name: potato_inhibit Pfam Description: Potato inhibitor I family
  misc_feature: Ceres Clone ID no. 896724
  misc_feature: Bit score of 168.0 for HMM based on sequences of Figure 47
  misc_feature: Functional Homolog Of SEQ ID NO. 749
  misc_feature: in Figure 47
MSSVVLGATGRENKTSWPEVVGMSIKEAREIILKDMPNANIQVLPVGSLVTQDFRPDRVRIFVDIVAQTPTVG

SEQ ID NO: 758 - DNA, 433 bp, Glycine max
  misc_feature: Ceres Clone ID no. 607452
  misc_feature: Encodes the peptide sequence at SEQ ID NO. 759
aatcaagtctcacgcacagcgcaagtccaacttgctagcctgtcaatcatcgaatatcatcggccgtccgcgcgtccatcagctcggagaagaccgtccatcaatcgtgctacgaagatgagttcctccgacgacctcgccggtggaaagaagacttcgaggccggaggtggtcgggctgaccatcaagaaggccaaggagatcatccttaaggacaagcccgacgccgacatcgtcgtggtgccggtcggctccgccgtgaccgaggacttgaggcccaaccgtgtccgcatcttcgtgggcaccgtcgccgagatcccccacgttggctagttggattgcctttgcttgctgtggccggcatagatgctggctcatgaataaatcaataatggaggaataaaaatgtatgcaggttatatgttttatcggt

SEQ ID NO: 759 - protein, 71 aa, Glycine max
  misc_feature (12)..(71): Pfam Name: potato_inhibit Pfam Description: Potato inhibitor I family
  misc_feature: Ceres Clone ID no. 607452
  misc_feature: Bit score of 157.3 for HMM based on sequences of Figure 47
  misc_feature: Functional Homolog Of SEQ ID NO. 749
  misc_feature: in Figure 47
MSSSDDLAGGKKTSRPEVVGLTIKKAKEIILKDKPDADIVVVPVGSAVTEDLRPNRVRIFVGTVAEIPHVG

SEQ ID NO: 760 - protein, 69 aa, Brachypodium distachyon
  misc_feature (10)..(69): Pfam Name: potato_inhibit Pfam Description: Potato inhibitor I family
  misc_feature: Public GI ID no. 37904392
  misc_feature: Bit score of 146.1 for HMM based on sequences of Figure 47
  misc_feature: Bit score of 146.1 for HMM based on sequences of Figure 47
  misc_feature: Functional Homolog Of SEQ ID NO. 749
  misc_feature: in Figure 47
MSSSSVGEVTKSWPEVVGLSIKEAKKVILKDKPDADIVALPVGGKVTDDFLSNRVRIFVDTGGEIPRAG

SEQ ID NO: 761 - DNA, 488 bp, Panicum virgatum
  misc_feature: Ceres Clone ID no. 1870473
  misc_feature: Encodes the peptide sequence at SEQ ID NO. 762
attacccctcaaacatacaagaagaagcagcattcgaagtgcttacatcttgtggtatatatctctgaagaagatgagcagctcggcagttggtgatggcaaggggtgtgatgctactcccaagacagagtggcctgagctagtgggaagcacgatcaaggaggcgacggagaagatcaatgcggagcggccggacctcaatgtggagccggtccctgttggcaccatagtcccccaagatttcgacccgaagcgcgtccgtctctgggttgacaccgtcgccgaggtccccaggattggctgaaccagcttaacgcaaagccaccgaataatgaatgctacatgcatgtgttccacagaccattctacataggtcaattaaataaataaaaaatatggctgtgatggagcgttctggtatgccattaaaattgttatgtttcggatatacaccattattatttgcaatatcagaaacatgctattac

SEQ ID NO: 762 - protein, 76 aa, Panicum virgatum
  misc_feature (17)..(76): Pfam Name: potato_inhibit Pfam Description: Potato inhibitor I family
  misc_feature: Ceres Clone ID no. 1870473
  misc_feature: Bit score of 155.8 for HMM based on sequences of Figure 47
  misc_feature: Functional Homolog Of SEQ ID NO. 749
MSSSAVGDGKGCDATPKTEWPELVGSTIKEATEKINAERPDLNVEPVPVGTIVPQDFDPKRVRLWVDTVAEVPRIG

SEQ ID NO: 763 - DNA, 499 bp, Panicum virgatum
  misc_feature: Ceres Clone ID no. 2026564
  misc_feature: Encodes the peptide sequence at SEQ ID NO. 764
actacccatcaaacaaacaacaacaacaacaagaagcatcattcaaagtgcttacatcttgtgagattgaaatctgcaggtatctctgaagaagatgagcagctcggcaggtggtgatggcaaggggtgcgatgctgctcccaagacagagtggcctgagctagtgggaaagacgatcaaggaggcgacggagaagatcaatgcggagcggccggacctcaatgtggaggcggtccctgttggcaccatagtcaccccagtgttcgacccgacgcgcgtccgtctctgggttgacaccgtcgccgagatccccaggattggctaaaaaagaagcttaacgcaaagccaccgaataatggatggtacatgcatgcatgtgttcctcagaccaatatactagtacataggtcaattagactagaacattcggcccgcgatgcgcgccctaccatttcaacaatcaaatccagcaatacaataaaatcaaataaaattcaag

SEQ ID NO: 764 - protein, 76 aa, Panicum virgatum
  misc_feature (17)..(76): Pfam Name: potato_inhibit Pfam Description: Potato inhibitor I family
  misc_feature: Ceres Clone ID no. 2026564
  misc_feature: Bit score of 144.1 for HMM based on sequences of Figure 47
  misc_feature: Functional Homolog Of SEQ ID NO. 749
MSSSAGGDGKGCDAAPKTEWPELVGKTIKEATEKINAERPDLNVEAVPVGTIVTPVFDPTRVRLWVDTVAEIPRIG

SEQ ID NO: 765 - DNA, 645 bp, Panicum virgatum
  misc_feature: Ceres Clone ID no. 2004365
  misc_feature: Encodes the peptide sequence at SEQ ID NO. 766
atccatcatcgaacacaaaagaaaaaacatcaatcaaagtgcttacatctttgaggtaagccacaatacatgcgcccccttcaatttcctattgttctttgttcgtttagctatgaacattgcaaaagaagaacaagaaactgattgaagcccgtagttctggtttgcttcgtttctactactttgtgtagcctgaactcccatttttaacaaatggggcgcagaaattctgcaggtatctctgaagaagatgagctcaacagctgacagcaaggggtgcaatgctactcccaagacggagtggcctgagctagtgggatgcacgatcaaagaggcgatggagaggatcaaggcggagcggccgcacctcaatgtcgtgcctgtccctgtaggctcctttgtcacccaagaggttgaccctaatcgcgtccgtctctgggttgacatcgtcgccgaggttcctaaaattggctgaagcatcgaaacgccaagccaccaaataatggcatttgtgtgtgttcctatggaccattcatgtgggttaagtaaataaaagcatgtctgtgatggactcttgtatatggttcgcctgtcataagttgtgaattgtgatgattgagttattaataatacgttggcaacacc

SEQ ID NO: 766 - protein, 74 aa, Panicum virgatum
  misc_feature (15)..(74): Pfam Name: potato_inhibit Pfam Description: Potato inhibitor I family
  misc_feature: Ceres Clone ID no. 2004365
  misc_feature: Bit score of 148.6 for HMM based on sequences of Figure 47
  misc_feature: Functional Homolog Of SEQ ID NO. 749
MSSTADSKGCNATPKTEWPELVGCTIKEAMERIKAERPHLNVVPVPVGSFVTQEVDPNRVRLWVDIVAEVPKIG

SEQ ID NO: 767 - DNA, 491 bp, Panicum virgatum
  misc_feature: Ceres Clone ID no. 2020677
  misc_feature: Encodes the peptide sequence at SEQ ID NO. 768
atcatccatcatcgaacacacaagaaaaaacatcaatcaaagtgcttacatctttgagaaattctgcaggtatctctgaagaagatgagctcaacagctggcagcaaggggtgcaatgctactcccaagacggagtggcctgagctagtgggatgcacgatcaaggaggcgatggagaggatcaaggcggagcggccgcacctcaatgtcgtgcctgtccctgtaggctcctttgtcacccaagaggttgaccctaatcgcgtccgtctctgggttgacatcgtcgccgaggttcctaaaattggctgaagcatcgaaacgccaagccaccaaataatggcatttgtatgtgttcctatggaccattcatgtgggttaagtaaataaaagcatgtctgtgatggactcttgtatatggttcgcctgtcataagttgtgaattgtgatgattgagttatgaataatacgttggcaacactatcggaatctgc

SEQ ID NO: 768 - protein, 74 aa, Panicum virgatum
  misc_feature (15)..(74): Pfam Name: potato_inhibit Pfam Description: Potato inhibitor I family
  misc_feature: Ceres Clone ID no. 2020677
  misc_feature: Bit score of 146.0 for HMM based on sequences of Figure 47
  misc_feature: Functional Homolog Of SEQ ID NO. 749
MSSTAGSKGCNATPKTEWPELVGCTIKEAMERIKAERPHLNVVPVPVGSFVTQEVDPNRVRLWVDIVAEVPKIG

SEQ ID NO: 769 - DNA, 519 bp, Panicum virgatum
  misc_feature: Ceres Clone ID no. 2039538
  misc_feature: Encodes the peptide sequence at SEQ ID NO. 770
atcatccatcagcgaacacacaagaaaaaacatcaatcaaagtgcttacatctttgaggtatctctgaagaagatgagctcaacagctgacagcaaggggtgcaatgctactcccaagacggagtggcctgagctagtgggatgcacgatcaaggaggcgatggagaggatcaaggcggagcggccgcaactcaatgtcgtgcctgtccctgtagactcctttgtcacccaagaggttgaccctaatcgcgtccgtctctgggttgacatcgtcgccgaggttcctaaaattggctgaagcatcgaaacgccaagccaccaaataatggcatttgtatgtgttcctatggaccattcatgggggttaagtaaataaaagcatgtctgtgatgggctcttgtatatggttcgcctgtcataagttgtgaattgtgatgattgagttatgaataatacgttggcaacactatcggaatctgcagctttggggctttgctgatgagtgttgccgagtgccac

SEQ ID NO: 770 - protein, 74 aa, Panicum virgatum
  misc_feature (15)..(74): Pfam Name: potato_inhibit Pfam Description: Potato inhibitor I family
  misc_feature: Ceres Clone ID no. 2039538
  misc_feature: Bit score of 142.3 for HMM based on sequences of Figure 47
  misc_feature: Functional Homolog Of SEQ ID NO. 749
MSSTADSKGCNATPKTEWPELVGCTIKEAMERIKAERPQLNVVPVPVDSFVTQEVDPNRVRLWVDIVAEVPKIG

SEQ ID NO: 771 - DNA, 563 bp, Triticum aestivum
  misc_feature: Ceres Clone ID no. 844611
  misc_feature: Encodes the peptide sequence at SEQ ID NO. 772
atctggaaagcaagccagtgctagaaaagaccaaatcacatagaggtacatagagctgctggcgtttgtccaatttcgtttcaacatgagcacgccatgcgacggccccaagacggagtggcctgagctggtcggccggacgatcaaggaggcggaggagaagatcaaggcggaccgaccggacctcaccgtggatgttgtcccagtaggaactaatgtgacgggtgagttcaatgagaaccgcgtccgcgtctgggtcgacacggtggcggaggttccccggattggctaagctgcttttaattagcctacaggaatactggcccgtgcaggtctccacatcgtctagttaatcgaccgaataaataagcatgggcacggtctgaaaaatgtatggatgtactatgtcatgttgttctgttgtgagttgtaagcatgagtaatattgtggagccactggttattgtttaagagatataatctactttggcattaggacatgctctgtgaattttttttttcttcgacaaaggatgaattttattggctcaaaattgagcacc

SEQ ID NO: 772 - protein, 68 aa, Triticum aestivum
  misc_feature (9)..(68): Pfam Name: potato_inhibit Pfam Description: Potato inhibitor I family
  misc_feature: Ceres Clone ID no. 844611
  misc_feature: Bit score of 140.4 for HMM based on sequences of Figure 47
  misc_feature: Functional Homolog Of SEQ ID NO. 749
MSTPCDGPKTEWPELVGRTIKEAEEKIKADRPDLTVDVVPVGTNVTGEFNENRVRVWVDTVAEVPRIG

SEQ ID NO: 773 - protein, 67 aa, Oryza sativa subsp. indica
  misc_feature (8)..(67): Pfam Name: potato_inhibit Pfam Description: Potato inhibitor I family
  misc_feature: Public GI ID no. 125526847
  misc_feature: Bit score of 152.7 for HMM based on sequences of Figure 47
  misc_feature: Functional Homolog Of SEQ ID NO. 749
MSSSETPKTEWPELVCRTIKEAKEKIKADRPDLKIEVVPVGTIVTQEFDENRVRIWVDTVAKTPTIG

SEQ ID NO: 774 - DNA, 517 bp, Triticum aestivum
  misc_feature: Ceres Clone ID no. 597887
  misc_feature: Encodes the peptide sequence at SEQ ID NO. 775
atctggaaagcaagccagtgctagaaacgaccaaatcacatagaggtacatagagctggtggcgtttgtccaatttcgtttccaacatgagcaagcaaggcgacggtcccaagactgagtggccggagctggtcgggcgcacgatcaaggaggcaaaggagaagatcaaggcggaccggccggacctcaaagtcagaattgtcccggtaggaagtattgtgacagcagacttggatttgaaccgcgttcgcgtttgggtcgacacggtggcagaggttcccaagattggctaatatagcttataattagcctatcactgaaataaaggcccatggaagtctccacttcgttcagttaattggccgaataaataagcatgggtacagtttgaaaaaaatgtatggatgtgctatgtaatgttgttttgtttttgtttttgtttttgttttatttttgaggataactcgccgctttatttatctaatgaaagtttgggatctccttgaagaccacatcc

SEQ ID NO: 775 - protein, 68 aa, Triticum aestivum
  misc_feature (9)..(68): Pfam Name: potato_inhibit Pfam Description: Potato inhibitor I family
  misc_feature: Ceres Clone ID no. 597887
  misc_feature: Bit score of 146.4 for HMM based on sequences of Figure 47
  misc_feature: Functional Homolog Of SEQ ID NO. 749
MSKQGDGPKTEWPELVGRTIKEAKEKIKADRPDLKVRIVPVGSIVTADLDLNRVRVWVDTVAEVPKIG

SEQ ID NO: 776 - protein, 67 aa, Oryza sativa subsp. japonica
  misc_feature (8)..(67): Pfam Name: potato_inhibit Pfam Description: Potato inhibitor I family
  misc_feature: Public GI ID no. 58396949
  misc_feature: Bit score of 147.4 for HMM based on sequences of Figure 47
  misc_feature: Functional Homolog Of SEQ ID NO. 749
MSSSWTPKTEWPELVCRMIKEAKEKIKADRPDLKIEVVPVGTIVTQEFDENRVRIWVDTVAKTPTIG

SEQ ID NO: 777 - DNA, 502 bp, Triticum aestivum
  misc_feature: Ceres Clone ID no. 684778
  misc_feature: Encodes the peptide sequence at SEQ ID NO. 778
tctggaaagtagaaagcaagccagtgctaggaacgaccaaatcacatagagctagatagagctggtggcatttgtacgatttctttccaacatgagcaagccatgcgacgccaagacagagtggcctgagctggtcggacgcacgatcaaggaggcggaggagaagatcaaggcggaccggccggacctcaaagtcatcattgtcccggtaggaagttttgtgacaacagacgtcgatttgaaccgcgttcgcgtctgggtcgacacggtggcggaggttcccaagattggctaagctagcttaattagcctatcactggaataaaggcccatgccctccactttgttcagttaattggccgaataaataagcatgggtacagtctgaaaaatgtacggatgtgctatgtaatgttgttttgtatgtgagttgtaagcatcagtaatattgtcgagccactgtttattgttcaagaaatataatctacttcagcattagggc

SEQ ID NO: 778 - protein, 67 aa, Triticum aestivum
  misc_feature (8)..(67): Pfam Name: potato_inhibit Pfam Description: Potato inhibitor I family
  misc_feature: Ceres Clone ID no. 684778
  misc_feature: Bit score of 139.5 for HMM based on sequences of Figure 47
  misc_feature: Functional Homolog Of SEQ ID NO. 749
MSKPCDAKTEWPELVGRTIKEAEEKIKADRPDLKVIIVPVGSFVTTDVDLNRVRVWVDTVAEVPKIG

SEQ ID NO: 779 - DNA, 504 bp, Triticum aestivum
  misc_feature: Ceres Clone ID no. 699511
  misc_feature: Encodes the peptide sequence at SEQ ID NO. 780
atctggaaagcaagccagtgctagaaacgaccaaatcacatagaggtacatagagctggtggcgtttgtccaatttcgtttccaacatgagcacgccaggcgacggtcccaagacggagtggccggagctggtcgggcgcacgatcamssaggcgaaggagaagatcaaggcggaccggccggacctcaaagtcagaattgtcccggtaggaagtactattgtgacagcagacttcgatttgaatcgcgttcgcgtctgggtcgatacggtggcagaggttcccaagattggctaagctagcttaattagcctatactggaataaaggcccatgcaagtctccacttcgttcagttaatctgccgaataaataagcatgggtgcagtctggaaaaaaaatgtatggatgtgctgtgtaatgttgttttgtttgtgagttgtaaacatcagtaatattgtcgagccactgtttattgttcaagaaatatattctacttcaaccgc

SEQ ID NO: 780 - protein, 69 aa, Triticum aestivum
  misc_feature (9)..(69): Pfam Name: potato_inhibit Pfam Description: Potato inhibitor I family
  misc_feature: Ceres Clone ID no. 699511
  misc_feature: Bit score of 131.6 for HMM based on sequences of Figure 47
  misc_feature: Functional Homolog Of SEQ ID NO. 749
  misc_feature (21)..(21): Xaa is any aa, unknown, or other
  misc_feature (22)..(22): Xaa is any aa, unknown, or other
MSTPGDGPKTEWPELVGRTIXXAKEKIKADRPDLKVRIVPVGSTIVTADFDLNRVRVWVDTVAEVPKIG

SEQ ID NO: 781 - DNA, 480 bp, Panicum virgatum
  misc_feature: Ceres Clone ID no. 1803377
  misc_feature: Encodes the peptide sequence at SEQ ID NO. 782
acaagaaagccacttctagccatcaacaacgacttcttcaccatcatcgtcacctaactcagacagtattagcgactgaagaagaagaagaagaagaagatgagctcctccgcggaaccagctatgtgcggcggcggcggcaagacgtcgtggccggaggtggtggggatgagcatagaggaggccaagaaggtgatcctcaaagacaagcccgacgccgacatccaggtgctgccggtcggcacgccggtgaccaaggatttccgccccaaccgtgtccggatcttcgtcaacaccgtcgccgagacgcctcatgtgggctagcttagctgctcatagctgttgctcagagcatgatgctgcgtgccaaataaagccatcttcagtatgaataataatggatgtgtgttctttccctataaatcaaataaataagcaagggatgtgcccccggcatgtccctttcctctaaataatgcc

SEQ ID NO: 782 - protein, 74 aa, Panicum virgatum
  misc_feature (15)..(74): Pfam Name: potato_inhibit Pfam Description: Potato inhibitor I family
  misc_feature: Ceres Clone ID no. 1803377
  misc_feature: Bit score of 157.3 for HMM based on sequences of Figure 47
  misc_feature: Functional Homolog Of SEQ ID NO. 749
MSSSAEPAMCGGGGKTSWPEVVGMSIEEAKKVILKDKPDADIQVLPVGTPVTKDFRPNRVRIFVNTVAETPHVG

SEQ ID NO: 783 - DNA, 560 bp, Panicum virgatum
  misc_feature: Ceres Clone ID no. 1888961
  misc_feature: Encodes the peptide sequence at SEQ ID NO. 784
accaacagtacaagaagcacaagaaagtcacttctatagccatcaccaacgacttcttcgccatcatcgtcacctaactcagaccctagctagcgactgaagaagaagatgagctcctccccagcggaaccagctgtgtgcggcggcggcggcaagacgtcgtggccggaggtggtggggatgagcatagaggaggccaagaaggtgatcctcaaagacaagcccgacgccgacatccaggtgctgccggtcggcacgccggtgaccaaggatttccaccccaaccgtgtccggatcttcgtcaacaccgtcgccgagacgccccatgtgggctagcttagctgctcatagctgttgctcagagcatcatgctgtgtgccaaataaagccatcttcagtatgaataatggatgtgtgttttttccctataaatcaaataaataagcaagggatgtgcccccagcatgtccctttcgtctaaataatgccatattatgtgtaaagcatcgatcgtatcctgtcctggcatgaaaaagatgaatcagctatatcagcggacc

SEQ ID NO: 784 - protein, 75 aa, Panicum virgatum
  misc_feature (16)..(75): Pfam Name: potato_inhibit Pfam Description: Potato inhibitor I family
  misc_feature: Ceres Clone ID no. 1888961
  misc_feature: Bit score of 148.4 for HMM based on sequences of Figure 47
  misc_feature: Functional Homolog Of SEQ ID NO. 749
MSSSPAEPAVCGGGGKTSWPEVVGMSIEEAKKVILKDKPDADIQVLPVGTPVTKDFHPNRVRIFVNTVAETPHVG

SEQ ID NO: 785 - DNA, 476 bp, Triticum aestivum
  misc_feature: Ceres Clone ID no. 897331
  misc_feature: Encodes the peptide sequence at SEQ ID NO. 786
tcaagtagtacaacacaaagctctctatcaggaattcgatcaggatcgtcgttcaccagtctgaggctcgagagtgcgtggttcacttcaacagtacgagaatgagctcctcggacgacacctgcggcaagaaggcgtcgtggccggagctggttgggaagtccatcgaggaggccaagaagaccatcatgaaggacaggccggacgtgaagaacatcgaggtcttcccggtcggcacaccggtgaccggggacttcaggcccgaccgtgtccgcatcttcgtcgacaccgttgcggagaccccccgcattggctaactttgattgatgctccatcgtttatgtgtgtgtgtgtgttatattccagaataaaccatagctagtgagtagtggccatgtatgcatactgctcctagctatgtcggtcgatatgtaagatttaataattaagtcttttatgggaaataattaaagttg

SEQ ID NO: 786 - protein, 71 aa, Triticum aestivum
  misc_feature (11)..(71): Pfam Name: potato_inhibit Pfam Description: Potato inhibitor I family
  misc_feature: Ceres Clone ID no. 897331
  misc_feature: Bit score of 131.7 for HMM based on sequences of Figure 47
  misc_feature: Functional Homolog Of SEQ ID NO. 749
MSSSDDTCGKKASWPELVGKSIEEAKKTIMKDRPDVKNIEVFPVGTPVTGDFRPDRVRIFVDTVAETPRIG

SEQ ID NO: 787 - DNA, 480 bp, Triticum aestivum
  misc_feature: Ceres Clone ID no. 617775
  misc_feature: Encodes the peptide sequence at SEQ ID NO. 788
aaaatcaagtagtacaacacaaagctctctatcaggaattcgatcaggatcatcgtcgtccatcagtcgagacgtacgtggttcagttcaacaggtcctcagtacgagaatgagctcctcggacgacacctgcggcaagaaggcgtcgtggccggagctggttgggaagtccatcgaggaggccaagaagatcatcatgaaggacaggccggatgtgaagatcatcgaggtcttcccggtcggcaccgccgtgaccggggacttcaggcccgaccgtgtccgcatcttcgtcgacaccgttgcggagatcccccgcattggctagcttttgttgatgccccaccgttttatgtgtgtgtgtctgtatgtgttatgttcctgaataaaccatagctagtgagtagtgaccatgtatgcatactactcctagctatgtcggtcgctctgtaagaattaaaataatcattaaacttttttatg

SEQ ID NO: 788 - protein, 71 aa, Triticum aestivum
  misc_feature (11)..(71): Pfam Name: potato_inhibit Pfam Description: Potato inhibitor I family
  misc_feature: Ceres Clone ID no. 617775
  misc_feature: Bit score of 134.9 for HMM based on sequences of Figure 47
  misc_feature: Functional Homolog Of SEQ ID NO. 749
MSSSDDTCGKKASWPELVGKSIEEAKKIIMKDRPDVKIIEVFPVGTAVTGDFRPDRVRIFVDTVAEIPRIG

SEQ ID NO: 789 - protein, 72 aa, Hordeum vulgare subsp. vulgare
  misc_feature (13)..(72): Pfam Name: potato_inhibit Pfam Description: Potato inhibitor I family
  misc_feature: Public GI ID no. 20513866
  misc_feature: Bit score of 148.2 for HMM based on sequences of Figure 47
  misc_feature: Functional Homolog Of SEQ ID NO. 749
MSSSGAAVGECKKTSWPEVVGLTIKEAKEIILKDKPEADIVVVPVGSAVTEDFRPNRVRIFVGTVVETPHVG

SEQ ID NO: 790 - DNA, 222 bp, Sorghum bicolor
  misc_feature: Ceres Annot ID no. 8724387
  misc_feature: Encodes the peptide sequence at SEQ ID NO. 791
atgagctcctcggcggaagcggagcgcggcggcgccaagaagcagtcatggccagaggtggtcggactgagcgtggaggaggccaagaaggttatcctcaaagataagcccgatgcagacattttcgtgctgcccgtcggatcgccggtgaccagggatttccgtccgaaccgtgtccgcatcttcgtcgacaccgtcgccgagacgccccgtgtcggctag

SEQ ID NO: 791 - protein, 73 aa, Sorghum bicolor
  misc_feature (14)..(73): Pfam Name: potato_inhibit Pfam Description: Potato inhibitor I family
  misc_feature: Ceres Annot ID no. 8724387
  misc_feature: Bit score of 153.3 for HMM based on sequences of Figure 47
  misc_feature: Functional Homolog Of SEQ ID NO. 749
MSSSAEAERGGAKKQSWPEVVGLSVEEAKKVILKDKPDADIFVLPVGSPVTRDFRPNRVRIFVDTVAETPRVG

SEQ ID NO: 792 - DNA, 476 bp, Panicum virgatum
  misc_feature: Ceres Clone ID no. 1804405
  misc_feature: Encodes the peptide sequence at SEQ ID NO. 793
agtacaggaagcacaagaaagccacttctagccatcaacaacgacttcttcttcaccatcatcgtcacctaactcagacagcatcgatcgatccgcaggtattagcgactgaagaagaagaagatgagctcctccgcggaaccagctgtgtgcggcggcggcggcaagatcacgtcgtggccggaggtggtggggatgagcatagaggaggccaagaaggtgatcctcaaagacaagcccgacgccgacatccaggtgctgccggtcggcacgccggtgaccaaggatttccgccccaaccgtgtccggatcttcgtcaacaccgtcgccgagacgcctcatgtgggctagcttagctgctcatagctgttgctcagagcatgatgctgcgtgccaaataaagccatcttcagtttgaataataatggatgtgtgttctttccctataaatcaaataaataagcaagggatgtgtg

SEQ ID NO: 793 - protein, 75 aa, Panicum virgatum
  misc_feature (17)..(75): Pfam Name: potato_inhibit Pfam Description: Potato inhibitor I family
  misc_feature: Ceres Clone ID no. 1804405
  misc_feature: Bit score of 151.7 for HMM based on sequences of Figure 47
  misc_feature: Functional Homolog Of SEQ ID NO. 749
MSSSAEPAVCGGGGKITSWPEVVGMSIEEAKKVILKDKPDADIQVLPVGTPVTKDFRPNRVRIFVNTVAETPHVG

SEQ ID NO: 794 - protein, 74 aa, Zea perennis
  misc_feature (15)..(74): Pfam Name: potato_inhibit Pfam Description: Potato inhibitor I family
  misc_feature: Public GI ID no. 48093396
  misc_feature: Bit score of 155.3 for HMM based on sequences of Figure 47
  misc_feature: Functional Homolog Of SEQ ID NO. 749
MSSTECGGGGGGGAKTSWPEVVGLSVEEAKKVILKDKPDADIVVLPVGSVVTADYRPNRVRIFVDIVAQTPHVG

SEQ ID NO: 795 - protein, 89 aa, Oryza sativa subsp. japonica
  misc_feature (30)..(89): Pfam Name: potato_inhibit Pfam Description: Potato inhibitor I family
  misc_feature: Public GI ID no. 108862602
  misc_feature: Bit score of 140.2 for HMM based on sequences of Figure 47
  misc_feature: Functional Homolog Of SEQ ID NO. 749
MNSTSHFVAISFFHHQLDQTRRGKMSSSAKTSWPEVVGLSIEEAKKVILKDKPDADIVVLPFGTAVPEDFRFNRVRIFVDTVAETPRVG

SEQ ID NO: 796 - protein, 65 aa, Oryza sativa subsp. japonica
  misc_feature (6)..(65): Pfam Name: potato_inhibit Pfam Description: Potato inhibitor I family
  misc_feature: Public GI ID no. 115488400
  misc_feature: Bit score of 140.2 for HMM based on sequences of Figure 47
  misc_feature: Functional Homolog Of SEQ ID NO. 749
MSSSAKTSWPEVVGLSIEEAKKVILKDKPDADIVVLPFGTAVPEDFRFNRVRIFVDTVAETPRVG

SEQ ID NO: 797 - DNA, 438 bp, Triticum aestivum
  misc_feature: Ceres Clone ID no. 759663
  misc_feature: Encodes the peptide sequence at SEQ ID NO. 798
gaatcaagtcccacacagcgcaactcactagccggtcaatcatcgaatatcatcggccgtccgcgcgtccatcagtcggagaagaccgtccatcaatcgttatcaaccagtgctgcgaagatgagttcctccgacgacctcgccggtggaaagaagacttcgtggccggaggtggtcgggctgaccatcaaggaggccaaggagatcatcctgaaggacaagcccgacgccgacattgtcatggtgccggtcggctccgccgtgaccgaggacttgaggcccaaccgtgtccgcatcttcgtgggcaccgtcgccgagaccccccacgttggataggtggatagctcttgctggcttgctgtggcctgcatacatacatgctggctcacgaataaatgaatatggagaaataaagaagtatgcaagtcatgtgtgctt

SEQ ID NO: 798 - protein, 71 aa, Triticum aestivum
  misc_feature (12)..(71): Pfam Name: potato_inhibit Pfam Description: Potato inhibitor I family
  misc_feature: Ceres Clone ID no. 759663
  misc_feature: Bit score of 161.9 for HMM based on sequences of Figure 47
  misc_feature: Functional Homolog Of SEQ ID NO. 749
MSSSDDLAGGKKTSWPEVVGLTIKEAKEIILKDKPDADIVMVPVGSAVTEDLRPNRVRIFVGTVAETPHVG

SEQ ID NO: 799 - DNA, 651 bp, Panicum virgatum
  misc_feature: Ceres Clone ID no. 1801827
  misc_feature: Encodes the peptide sequence at SEQ ID NO. 800
agtacaagaagcacaagaaaaaacacttgtagccatcaacttcttcttcttcttcttcttcaccgtcatcaactcatcatcagctcagaccgtgagtggaatcccttgccttaatttttttacagtttctttgtacacatatatagctacatgtttttgactgcaaataaagcatcgatcgatccgcagctagctagcgaccgaagaagaagaagatgagctcctccgcggaagcagctgatcagtgcggcggcggcaagacgtcgtggccggaggtggtggggatgagcatagaggaggccaagaaggtgatcctcaaagacaagcccgacgccgacatccacgtgctgccggtcggcacgccggtgaccagggatttccgccccaaccgtgtccgcatcttcgtcggcaccgtcgcccagacgccccatgtgggctagcagctctgcccatagctttcttgctcacaacatcatgcgcgttccaaataaagccatcctatgtatgtatggatgtgtgttgttaccctatggatccaatcagggttagaaatatcggccgcaatttcacgatatacccgatatatcgggtttatcggtggggtctgatatttttttttatcggccgaaattgatttaatgaatatttttt

SEQ ID NO: 800 - protein, 74 aa, Panicum virgatum
  misc_feature (15)..(74): Pfam Name: potato_inhibit Pfam Description: Potato inhibitor I family
  misc_feature: Ceres Clone ID no. 1801827
  misc_feature: Bit score of 160.7 for HMM based on sequences of Figure 47
  misc_feature: Functional Homolog Of SEQ ID NO. 749
MSSSAEAADQCGGGKTSWPEVVGMSIEEAKKVILKDKPDADIHVLPVGTPVTRDFRPNRVRIFVGTVAQTPHVG

SEQ ID NO: 801 - protein, 75 aa, Tripsacum dactyloides
  misc_feature (16)..(75): Pfam Name: potato_inhibit Pfam Description: Potato inhibitor I family
  misc_feature: Public GI ID no. 48093418
  misc_feature: Bit score of 155.5 for HMM based on sequences of Figure 47
  misc_feature: Functional Homolog Of SEQ ID NO. 749
MSSTAAAAPECGGGAKTSWPEVVGLSVEEAKKVILKDKPDADIVVLPVGSVVTADYRPDRVRIFVDIVAQTPHIG

SEQ ID NO: 802 - protein, 72 aa, Zea diploperennis
  misc_feature (13)..(72): Pfam Name: potato_inhibit Pfam Description: Potato inhibitor I family
  misc_feature: Public GI ID no. 48093360
  misc_feature: Bit score of 154.7 for HMM based on sequences of Figure 47
  misc_feature: Functional Homolog Of SEQ ID NO. 749
MSSTECGGGGGAKTSWPEVVGLSVEEAKKVILKDKPDADIVVLPVGSVVTADYRPNRVRIFVDIVAQTPHVG

SEQ ID NO: 803 - DNA, 489 bp, Zea mays
  misc_feature: Ceres Clone ID no. 1457620
  misc_feature: Encodes the peptide sequence at SEQ ID NO. 804
acacaaagaagctccataattaattattgccctttcaattcgccatcggcagccgagcaccatgagctccacaggcggcggcgacgatggcgccaagaagtcttggccggaagtggtcgggctcagcctggaagaagccaagagggtgatcctgtgcgacaagcccgacgccgacatcgtcgtgctgcccgtcggcacgccggtgaccatggatttccgccccaaccgcgtccgcatcttcgtcgacaccgtcgcggaggcaccccacatcggctgaggtttaaatctacaaaatgaatgactcggacatgccatgcgtacctgtccgtcgccgaataatggatgtgtgtgtgcttcgttccaataaattgctagtaaaaataatggcatcgtcggtatgcatgaataaaatgtatcagaatgttcatcctttcacgattggatatatgaaaattggatatatgaaaatgtgctcagttgtttggtttc

SEQ ID NO: 804 - protein, 71 aa, Zea mays
  misc_feature (12)..(71): Pfam Name: potato_inhibit Pfam Description: Potato inhibitor I family
  misc_feature: Ceres Clone ID no. 1457620
  misc_feature: Bit score of 141.1 for HMM based on sequences of Figure 47
  misc_feature: Functional Homolog Of SEQ ID NO. 749
MSSTGGGDDGAKKSWPEVVGLSLEEAKRVILCDKPDADIVVLPVGTPVTMDFRPNRVRIFVDTVAEAPHIG

SEQ ID NO: 805 - protein, 72 aa, Zea diploperennis
  misc_feature (13)..(72): Pfam Name: potato_inhibit Pfam Description: Potato inhibitor I family
  misc_feature: Public GI ID no. 48093370
  misc_feature: Bit score of 152.7 for HMM based on sequences of Figure 47
  misc_feature: Functional Homolog Of SEQ ID NO. 749
MSSTECGGGGGAKTSWPEVVGLSVEEAKKVILKDKPDADIVVLPIGSVVTADYRPNRVRIFVDIVAQTPHVG

SEQ ID NO: 806 - DNA, 430 bp, Triticum aestivum
  misc_feature: Ceres Clone ID no. 639183
  misc_feature: Encodes the peptide sequence at SEQ ID NO. 807
  misc_feature (413)..(413): n is a, c, t, g, unknown, or other
aactaaagtctcacgcacagcgcaagtccaacttgctagcctgtccatcatcgaatatcatcggccgtccgcgcgtccatagctgggagaagaccgtccattaatcgttctcaaccagtgctacgaagatgagttcctccgacgacctcgccggtggaaagaagacttcgtggccggaggtggtcgggctgaccatcaaggaggccaaggagatcatcctcaaggacaagcccgacgccgacatcgtcgtggtgccggtcggctccgccgtgaccgaggacttgaggcccaaccgtgtccgcatcttcgtgggcaccgtcaccgagaccccccacgttggataggtggatagctcttgctggcttgctgtggcctgcatacatagatgctggctcacaagtaagtgaataatngagatataaagaagtat

SEQ ID NO: 807 - protein, 71 aa, Triticum aestivum
  misc_feature (12)..(71): Pfam Name: potato_inhibit Pfam Description: Potato inhibitor I family
  misc_feature: Ceres Clone ID no. 639183
  misc_feature: Bit score of 159.6 for HMM based on sequences of Figure 47
  misc_feature: Functional Homolog Of SEQ ID NO. 749
MSSSDDLAGGKKTSWPEVVGLTIKEAKEIILKDKPDADIVVVPVGSAVTEDLRPNRVRIFVGTVTETPHVG

SEQ ID NO: 808 - DNA, 460 bp, Zea mays
  misc_feature: Ceres Clone ID no. 1453564
  misc_feature: Encodes the peptide sequence at SEQ ID NO. 809
acacaaagaagctccataattaattattgccctttcagttcgccatcggcagccgagcaccatgagctccacaggcggcggcgacgatggcgccaagaagtcttggccggaagtggtcgggctcagcctggaagaagccaagagggtgatcctgtgcgacaagcccgacgccgacatcgtcgtgctgcccgtcggcacgccggtgaccatggatttccgccccaaccgcgtccgcatcttcatcgacaccgtcgcggaggcaccccacatcggctgaggtttaaatctacaaaatgaatgactcggacatgccatgcgtacctgtccgtcgcccaataatggatgtgtgtgtgcttcgatcgtccctataagttgctagtaaagataatggcatcgtcgttctgcatgaataacacgtatcagaaagtggaaactggctcgacttctaaacatcggagtc

SEQ ID NO: 809 - protein, 71 aa, Zea mays
  misc_feature (12)..(71): Pfam Name: potato_inhibit Pfam Description: Potato inhibitor I family
  misc_feature: Ceres Clone ID no. 1453564
  misc_feature: Bit score of 138.9 for HMM based on sequences of Figure 47
  misc_feature: Functional Homolog Of SEQ ID NO. 749
MSSTGGGDDGAKKSWPEVVGLSLEEAKRVILCDKPDADIVVLPVGTPVTMDFRPNRVRIFIDTVAEAPHIG

SEQ ID NO: 810 - DNA, 443 bp, Zea mays
  misc_feature: Ceres Clone ID no. 1531954
  misc_feature: Encodes the peptide sequence at SEQ ID NO. 811
atatatatccaacaaccagcagtgcaacaagcaagatttacctgcccatcgatcatatcgtcaactggtccggcagttcgcgacaccatgagctccaccgagtgcggcggcggcggcggcggcaccaagacgtcgtggcctgaggtggtcgggctgagcgtggaggacgccaagaaggtgatcctcaaggacaagccggacgccgacatcgtggtgctgcccgtcggctccgtggtgaccgcggattatcgccctaaccgagtccgcatcttcgtcgacatcgtcgcccagacgccccacatcggctgataatatataagctaacccctatttcctttccttgccccagaacttgaaataaatatatatacgatgaaataacgcgggcatgcctaataatggatgtgtgaattctcactctcgaagaacccaattcgccctat

SEQ ID NO: 811 - protein, 73 aa, Zea mays
  misc_feature (14)..(73): Pfam Name: potato_inhibit Pfam Description: Potato inhibitor I family
  misc_feature: Ceres Clone ID no. 1531954
  misc_feature: Bit score of 154.9 for HMM based on sequences of Figure 47
  misc_feature: Functional Homolog Of SEQ ID NO. 749
MSSTECGGGGGGTKTSWPEVVGLSVEDAKKVILKDKPDADIVVLPVGSVVTADYRPNRVRIFVDIVAQTPHIG

SEQ ID NO: 812 - DNA, 583 bp, Zea mays
  misc_feature: Ceres Clone ID no. 1460371
  misc_feature: Encodes the peptide sequence at SEQ ID NO. 813
acacaaagaagctccataattaattattgccctttcagttcgccatcggcagccgagcaccatgagctccacaggcggcgacgatggcgccaagaagtcttggccggaagtggtcgggctcagcctggaagaagccaagagggtgatcctgtgcgacaagcccgacgccgacatcgtcgtgctgcccgtcggcacgccggtgaccatggatttccgccccaaccgcgttcgcatcttcgtcgacaccgtcgcggaggcaccccacatcggctgagaatcaaatctataaaatgaataactcggacatgtcatgcgtgcatgtccgtcgccgaataatggatgtgtgtgcttcgttccaataaattgctagtaaaaataatggcatcgtcggtatgcatgaataaaatgtatcagaatgttcatcctttcacgattggatatatgaaaatgtgctcagttgtttggtttccaacttgttttctataaggtcgatgaactggaacgcaggctcaaataatgatggaatctgcacaatatagataggttaacgacttagagcatgtacatcttattaattaaatat

SEQ ID NO: 813 - protein, 70 aa, Zea mays
  misc_feature (11)..(70): Pfam Name: potato_inhibit Pfam Description: Potato inhibitor I family
  misc_feature: Ceres Clone ID no. 1460371
  misc_feature: Bit score of 138.0 for HMM based on sequences of Figure 47
  misc_feature: Functional Homolog Of SEQ ID NO. 749
MSSTGGDDGAKKSWPEVVGLSLEEAKRVILCDKPDADIVVLPVGTPVTMDFRPNRVRIFVDTVAEAPHIG

SEQ ID NO: 814 - DNA, 356 bp, Zea mays
  misc_feature: Ceres Clone ID no. 1627479
  misc_feature: Encodes the peptide sequence at SEQ ID NO. 815
atatatccaacaaccagcagtgcaacaagcaagatttacctgcccatataattcacatgccagatcgatcatatcgtcaactggtccggcagttcgcgacaccatgagctccacggagtgcggcggcggcggcggcggcgccaagacgtcgtggcctgaggtggtcgggctgagcgtggaggacgccaagaaggtgatcctcaaggacaagccggacgccgacatcgtggtgctgcccgtcggctccgtggtgaccgcggattatcgccctaaccgtgtccgcatcttcgtcgacatcgtcgcccagacgccccacatcggctgataatatataagctagccgctatttcctttcc

SEQ ID NO: 815 - protein, 73 aa, Zea mays
  misc_feature (14)..(73): Pfam Name: potato_inhibit Pfam Description: Potato inhibitor I family
  misc_feature: Ceres Clone ID no. 1627479
  misc_feature: Bit score of 155.9 for HMM based on sequences of Figure 47
  misc_feature: Functional Homolog Of SEQ ID NO. 749
MSSTECGGGGGGAKTSWPEVVGLSVEDAKKVILKDKPDADIVVLPVGSVVTADYRPNRVRIFVDIVAQTPHIG

SEQ ID NO: 816 - DNA, 560 bp, Zea mays
  misc_feature: Ceres Clone ID no. 992630
  misc_feature: Encodes the peptide sequence at SEQ ID NO. 817
agtctcacatagcatagccatcttcttcgtcgacaagcaggggagttaggtctcacatgcatgcttcatcacattgttgactgcataacgaaacacatcgtcgtcggatcggagatgatgagttccgtcgtcgtggatgctgctgctaccagcagcagcgagaagaagacgtcgtggccggaggtggtgggcatgtccatcaaggaggcgacggagactattctcaaggacatgcccaacgcgtacatccaggtgctgcctgttgggtcgcccgtgacgctggaccttcgccccgaccgcgtccgtatcttcgttgacaccgtcgccatgactccgacagttgggtgatacataccaaatgcaataaacaaaccctactttttattttatgtttccagttaataataaaccaggccttagcttcttggttgtccttccttggttggtgttagcttctaagctactagtacaccattaaaaaaaggaggacctcatgtatggctaccgtgaaaaatgtgatcttgatggaataatatatcataaataagcaattaatgatg

SEQ ID NO: 817 - protein, 76 aa, Zea mays
  misc_feature (17)..(76): Pfam Name: potato_inhibit Pfam Description: Potato inhibitor I family
  misc_feature: Ceres Clone ID no. 992630
  misc_feature: Bit score of 138.6 for HMM based on sequences of Figure 47
  misc_feature: Functional Homolog Of SEQ ID NO. 749
MSSVVVDAAATSSSEKKTSWPEVVGMSIKEATETILKDMPNAYIQVLPVGSPVTLDLRPDRVRIFVDTVAMTPTVG

SEQ ID NO: 818 - DNA, 518 bp, Triticum aestivum
  misc_feature: Ceres Clone ID no. 685480
  misc_feature: Encodes the peptide sequence at SEQ ID NO. 819
atcacacagctactagctagcacagcagcattgacttgggatttggggatcacatcacacaagaaaatattactccatgggaggccaaaagggtcctgctgcgatcatggtgggtgtgctcctcatactggggctggccactgcggcgatgagctcctcggagaaggtggccaccggcgagaagacgtcgtggccggaggtggtggggctatgcgcggaggaggccaagaagatcatcctcaaggacaagcccgatgccaacatcgtcgttctccccgccggctcgatggtcaccatggactacgatcccctgcgcgtccgcatcttcgtcgataccgtcgccgaggccccccacaccggctagctaagcttggtacctacacggttacacagaagtgactattaatgtcaagggacatggaagaataatttcatataccccccatatccatgcatggatgtcacgggcatatgtgtgctagctccttaatttgcattgtcactttagttttgcgccc

SEQ ID NO: 819 - protein, 95 aa, Triticum aestivum
  misc_feature (36)..(95): Pfam Name: potato_inhibit Pfam Description: Potato inhibitor I family
  misc_feature: Ceres Clone ID no. 685480
  misc_feature: Bit score of 132.9 for HMM based on sequences of Figure 47
  misc_feature: Functional Homolog Of SEQ ID NO. 749
MGGQKGPAAIMVGVLLILGLATAAMSSSEKVATGEKTSWPEVVGLCAEEAKKIILKDKPDANIVVLPAGSMVTMDYDPLRVRIFVDTVAEAPHTG

SEQ ID NO: 820 - protein, 73 aa, Zea mays subsp. parviglumis
  misc_feature (14)..(73): Pfam Name: potato_inhibit Pfam Description: Potato inhibitor I family
  misc_feature: Public GI ID no. 75994159
  misc_feature: Bit score of 154.9 for HMM based on sequences of Figure 47
  misc_feature: Functional Homolog Of SEQ ID NO. 749
MSSTECGGGGGGAKTSWPEVVGLSVEDAKKVILKDKPDADIVVLPVGSVVTADYRPNRVRIFVDIVAQTPHVG

SEQ ID NO: 821 - DNA, 222 bp, Sorghum bicolor
  misc_feature: Ceres Annot ID no. 8724380
  misc_feature: Encodes the peptide sequence at SEQ ID NO. 822
atgagctccacggcggcggcaccagagagcggcggtgccaagacatcgtggccggagttggtggggctcaacgtggaggaagccaagaaggtgatcctcaaggacaagcctgacgccgacattgtcgtgctgcccgtcggctcgccggtgaccagggattatcgccccaaccgcgtccgcatcttcgtcgacatcgtcgccgaggcaccccatgtcggctga

SEQ ID NO: 822 - protein, 73 aa, Sorghum bicolor
  misc_feature (14)..(73): Pfam Name: potato_inhibit Pfam Description: Potato inhibitor I family
  misc_feature: Ceres Annot ID no. 8724380
  misc_feature: Bit score of 147.2 for HMM based on sequences of Figure 47
  misc_feature: Functional Homolog Of SEQ ID NO. 749
MSSTAAAPESGGAKTSWPELVGLNVEEAKKVILKDKPDADIVVLPVGSPVTRDYRPNRVRIFVDIVAEAPHVG

SEQ ID NO: 823 - protein, 71 aa, Zea diploperennis
  misc_feature (12)..(71): Pfam Name: potato_inhibit Pfam Description: Potato inhibitor I family
  misc_feature: Public GI ID no. 48093378
  misc_feature: Bit score of 153.3 for HMM based on sequences of Figure 47
  misc_feature: Functional Homolog Of SEQ ID NO. 749
MSSTECGGGGAKTSWPEVVGLSVEEAKKVILKDKPDADIVVLPVGSVVTADYRPNRVRIFVDIVAQTPHVG

SEQ ID NO: 824 - protein, 70 aa, Zea mays subsp. parviglumis
  misc_feature (11)..(70): Pfam Name: potato_inhibit Pfam Description: Potato inhibitor I family
  misc_feature: Public GI ID no. 75994143
  misc_feature: Bit score of 150.5 for HMM based on sequences of Figure 47
  misc_feature: Functional Homolog Of SEQ ID NO. 749
MSSTECGGGAKTSWPEVVGLSVEDAKKVILKDKPDADIVVLPVGSVVTADYRPNRVRIFVDIVAQTPHIG

SEQ ID NO: 825 - protein, 71 aa, Zea mays subsp. parviglumis
  misc_feature (12)..(71): Pfam Name: potato_inhibit Pfam Description: Potato inhibitor I family
  misc_feature: Public GI ID no. 75994153
  misc_feature: Bit score of 151.8 for HMM based on sequences of Figure 47
  misc_feature: Functional Homolog Of SEQ ID NO. 749
MSSTECGGGGAKTSWPEVVGLSVEDAKKVILKDKPDADIVVLPVGSVVTADYRPNRVRIFVDIVAQTPHIG

SEQ ID NO: 826 - DNA, 225 bp, Sorghum bicolor
  misc_feature: Ceres Annot ID no. 8724381
  misc_feature: Encodes the peptide sequence at SEQ ID NO. 827
atgagctccacggcgacggcggcaccagagtgcggcggcgccaagacgtcgtggccggaggtggtcgggaagagcgtggaggaagccaagaaagtgatcctcaaggacaagcccgacgccgacatcgtcgtgctgcccgtcggctcgccggtgaccatggattaccgcaccaaccgcgtccggatcttcgtcgacacagtcgcccagacgccccatgtcggctga

SEQ ID NO: 827 - protein, 74 aa, Sorghum bicolor
  misc_feature (15)..(74): Pfam Name: potato_inhibit Pfam Description: Potato inhibitor I family
  misc_feature: Ceres Annot ID no. 8724381
  misc_feature: Bit score of 154.2 for HMM based on sequences of Figure 47
  misc_feature: Functional Homolog Of SEQ ID NO. 749
MSSTATAAPECGGAKTSWPEVVGKSVEEAKKVILKDKPDADIVVLPVGSPVTMDYRTNRVRIFVDTVAQTPHVG

SEQ ID NO: 828 - protein, 71 aa, Zea mays subsp. parviglumis
  misc_feature (12)..(71): Pfam Name: potato_inhibit Pfam Description: Potato inhibitor I family
  misc_feature: Public GI ID no. 75994157
  misc_feature: Bit score of 150.4 for HMM based on sequences of Figure 47
  misc_feature: Functional Homolog Of SEQ ID NO. 749
MSSTECGGGGVKTSWPEVVGLSVEDAKKVILKDKPDADIVVLPVGSVVTADYRPNRVRIFVDIVAQTPHIG

SEQ ID NO: 829 - DNA, 452 bp, Triticum aestivum
  misc_feature: Ceres Clone ID no. 730301
  misc_feature: Encodes the peptide sequence at SEQ ID NO. 830
aagtactcctaccggtcaagttcagactcgcatagtcgaacatgagctacggcgagagcatcgccgccggatgcctcgccggggaggagaagaagacgtcatggccggagttagtgggaaagtccatcgaggaggctagggagatcatcctcaaggacatgcctgatgcggacatcgtcgttgtccctactggctccgcggtaaccgaggacttgaggagcaaccgtgtccgcatcttcgtcgacactgtcgcgaccactcctcacattggctagctagctagctagctttgctcgctgggagcgatgtgcatgcggcaggcatcacgtgtgctgatgaccaagtaatagtttcaataatggatgaataagtacatgctgaccaccaccatgttacttatgaatcaacttgcttttcagctgtctaggttgttgaccgatgtgctcgactag

SEQ ID NO: 830 - protein, 77 aa, Triticum aestivum
  misc_feature (18)..(77): Pfam Name: potato_inhibit Pfam Description: Potato inhibitor I family
  misc_feature: Ceres Clone ID no. 730301
  misc_feature: Bit score of 141.6 for HMM based on sequences of Figure 47
  misc_feature: Functional Homolog Of SEQ ID NO. 749
MSYGESIAAGCLAGEEKKTSWPELVGKSIEEAREIILKDMPDADIVVVPTGSAVTEDLRSNRVRIFVDTVATTPHIG

SEQ ID NO: 831 - DNA, 222 bp, Sorghum bicolor
  misc_feature: Ceres Annot ID no. 8724388
  misc_feature: Encodes the peptide sequence at SEQ ID NO. 832
atgagttccattgtcatggatgttaccagcggcgagaagaagacatcatggcccgaggtgctgggcatgtccatcaaggaggcgacggagatcattctgaaagacatgcccaacgcgtacattcaggtgctgcctgttggttcacctgtgaccctggacattcgccccgatcgcgtccgcatcttcgttgataccgtcgccaagactccgacagttggctga

SEQ ID NO: 832 - protein, 73 aa, Sorghum bicolor
  misc_feature (14)..(73): Pfam Name: potato_inhibit Pfam Description: Potato inhibitor I family
  misc_feature: Ceres Annot ID no. 8724388
  misc_feature: Bit score of 141.2 for HMM based on sequences of Figure 47
  misc_feature: Functional Homolog Of SEQ ID NO. 749
MSSIVMDVTSGEKKTSWPEVLGMSIKEATEIILKDMPNAYIQVLPVGSPVTLDIRPDRVRIFVDTVAKTPTVG

SEQ ID NO: 833 - DNA, 1349 bp, Panicum virgatum
  misc_feature: Ceres Clone ID no. 1724846
  misc_feature: Encodes the peptide sequence at SEQ ID NO. 834
attgctcgcccccctaccttcactgctcacattgaaggctccctttatctctcccccaacaaaacaaatggattcgggcgagtcttctggttcgtgcgccgccaccggtagcgcctcttcgcggagatccaccggacgcatcgccggcgcatctttgcggaggtccagccgcggtggcccatctcgccgggcttgctctgcacccggtcgattgccagattgggggcatccgttggtcatgggatggcctgaatcattggacaagcatttggtggaggggtgtttgaaagtggttcaggatggaatatatgtaacagaatacacgggcttgttttatgtggaagttgcaaaatacatctgggcacaaaccagtatgtctatctcaaggactgatctgaaagcaaggtttgaatacttcaaaggattgtggggacggtaccacaagttaacgcgggagttggcaagatcgccggcgggtacctcaaatgaacatataaaaaaagaacttgaatcggataaatacaaacgtatgttgcaatttgaggatcagctcgctgtgatatttatagcatgtgatgagtataagtcaaaaccaatagctgcgtaccgcaccaatattaaatgtgggaacttcagtagtacaagtagtgggaagcgcagaactgatgaggagtcctcccgccaagttcggcagaagagctcagaagttcatatgcctcagtcatcacaagatggcatgacccgtttggataaccacaagctgaagcaacagattcagccaaagggtgtgaactcatcctggtccactgacaccgatcagcagtcggagaaccacgggagtatgtcaagggggtcagcttcagcggcggtgatgagagagcaaaagtatgaacagcccactgactatatttctgcactgacgaatttggatgaacatcggtgttcagcaagttatttctttttttattcacttgcgctgagggaccctgttgctctgagtggttttatagctaagaagacctattccagtaggagaaaatacctcaatcacttgctagaccaccattttgtgacgctggaaccagataaaatgaatcgctggcatgagctacgtgttcgtgagctagatgctcctgttgctcctgttgaccatgcatgccctagagactcagcctgatggcgctgccggttctgtctgtagtttggagtcgcagtcgcttgtctactttctactaattctagatcgtgtgaacttaagacattgtgctagtcatgctggatgcttggtgttgtaaactttagacattgtgttgctgttttaattactaatgtatcaatgttgtgaactt

SEQ ID NO: 834 - protein, 312 aa, Panicum virgatum
  misc_feature: Ceres Clone ID no. 1724846
  misc_feature: Bit score of 714.5 for HMM based on sequences of Figure 11
  misc_feature: Functional Homolog Of SEQ ID NO. 834
  misc_feature: in Figure 11
MGWPESLDKHLVEGCLKVVQDGIYVTEYTGLFYVEVAKYIWAQTSMSISRTDLKARFEYFKGLWGRYHKLTRELARSPAGTSNEHIKKELESDKYKRMLQFEDQLAVIFIACDEYKSKPIAAYRTNIKCGNFSSTSSGKRRTDEESSRQVRQKSSEVHMPQSSQDGMTRLDNHKLKQQIQPKGVNSSWSTDTDQQSENHGSMSRGSASAAVMREQKYEQPTDYISALTNLDEHRCSASYFFFYSLALRDPVALSGFIAKKTYSSRRKYLNHLLDHHFVTLEPDKMNRWHELRVRELDAPVAPVDHACPRDSA

SEQ ID NO: 835 - DNA, 1047 bp, Sorghum bicolor
  misc_feature: Ceres Annot ID no. 8701141
  misc_feature: Encodes the peptide sequence at SEQ ID NO. 836
atggaggacgttgaaggctcttcagctggttcgtcctcgcaccagcacggcgattgcgcttcagctggttcgtcctcgcaccagcaccgcgcgagctcgacggcgacggcaccaatccgctccccctcgcctgcaacagagggaccagcacggcgattatcgcaccagcacggcgatagacgatatcctcgctggaccggtgcccggctcagatattcgcggtctttaccgggtcgattgtcaggcggtgcccagctcagatcttcgcggtctttaccgggtcgattgtcagagatcatggcaccgctacaatggcctgagcccatgatggactattttgtggatgagtgtttcaagatggttcagggtggtagaacgccagcgaatgaaactttttttcggacacttgaccgctccatggccagtaaatcctttggtactaccttcagtcaaatggatctgactaagcagtttgaacgagtaaaatctttatggaatagttaccatacgattctgaagaatttggaaataacaaagaaaactggtgatatttatgctaggaaattcacccttattaggaaatatgaaataaagctcaacacgatctttgaaagttattatgatagcaaggcaaaatcacttagtacgtacaggttcaatattgaacacagtgatcgatacagtggggacagtaatagttcaagtaaaaggcgtagccttggtgagcccttctcacgccagattcggctgaagagctcagacatgcctgagtcatcacaaaatggcagcgcctctgaaatctctgaaatacaagactatgacaaagcaatgggcgaacttatcaataaagttgatgatggaacttatgtcatagctggtcaatgccttcgagaccctaaaattctgcaatcatactcacatattccaaccattgaaagaaagatcagtttcttgcacggaacctggagggtgatgcatgaacccaagtgtgtcttagagaatttgcaaccagccgatcagctatttgtgaggagcccaaactcctga

SEQ ID NO: 836 - protein, 348 aa, Sorghum bicolor
  misc_feature: Ceres Annot ID no. 8701141
  misc_feature: Bit score of 759.8 for HMM based on sequences of Figure 11
  misc_feature: Functional Homolog Of SEQ ID NO. 834
  misc_feature: in Figure 11
MEDVEGSSAGSSSHQHGDCASAGSSSHQHRASSTATAPIRSPSPATEGPARRLSHQHGDRRYPRWTGARLRYSRSLPGRLSGGAQLRSSRSLPGRLSEIMAPLQWPEPMMDYFVDECFKMVQGGRTPANETFFRTLDRSMASKSFGTTFSQMDLTKQFERVKSLWNSYHTILKNLEITKKTGDIYARKFTLIRKYEIKLNTIFESYYDSKAKSLSTYRFNIEHSDRYSGDSNSSSKRRSLGEPFSRQIRLKSSDMPESSQNGSASEISEIQDYDKAMGELINKVDDGTYVIAGQCLRDPKILQSYSHIPTIERKISFLHGTWRVMHEPKCVLENLQPADQLFVRSPNS

SEQ ID NO: 837 - DNA, 1505 bp, Sorghum bicolor
  misc_feature: Ceres Clone ID no. 917740
  misc_feature: Encodes the peptide sequence at SEQ ID NO. 838
cctcttgagtcactgaccacagccgcaggcgaggcgaagaatagctaccccggattgaaggctctccccccaaattgaaggctctctcccggcctcccccaagaaatggaggacattgaaggctcttcatctggttcgtcctcgcaccagcaccgcgcgagctcgactgcgacggcgacggcaccaatccgctccccctcgcctgcaacagagggaccagcacggcgattatcgcaccagcacggcgatagacgatatcctcgctggaccggtgcccggctcagatattcgcggtctttaccgggtcgattgtcaggcggtgcccggctcagatcttcgcggtctttaccgggtcgattgtcagagatcatggcaccactacaatggcctgagcccatgatggactattttctggatgagtgtttcaagatggttcaggatggtagaacgccagcgaatgaaacttttttccggacacttgaccgatccatggccaggaaatcctttggtactaccttccgtcaaacggatctgactgaccagtttacacgagtaagatctttatggaataagtaccatgagattctgaagaatttggaaataataaaggcacaagaacgacaaagccagactgatcctgataaattgcgtcttaaaactggtgatatttatgctaggaaattcagccttattaggaaatatgaaataaagctcaacacgatctttgaaagttattatggaagcaaggcaaaatcacttagtacgtacaggttcaatattgaacacagtgatcgatacagtggggacaatagtagttcaagtaaaaggcgtagccttggtgagcccttctcacgccagattcggctgaagagctcagacatgcctgagtcatcacaaaatggcagcgcctctgaaatctctgaaatacaagactctgcaatcatagctggtcaatgccttcgagaccctaaaactctgcaatcatactcacatattcgaaccattgaaagaaagatcagtttcttgcacggaacctggacggtgatgtgtgaacccaagtgtgtcttagagaatttgcaaccagtcgatcagctatttgtgaggagcccaaactcctgagctcccgcctgctgtctgacagaaggagatgcgagttcttcaagtggtatgatgataaagcttttcctcaatatatcaccaacttgctgtgggacttgcgagacaaggttgatgagcaggaacgagaactggtggtcttgcgaggacaattgcagatcaaggaacaagaactcagcgatttggaagaacagatgaatcaactttggaggactacttgaaccggtgttcatgtaggactacttgaaccagtgctaccttgcttgttgttctgtagaccatttttattgtaatatgtacttcagaactttgtttacggtttgggaagtgaccatgttctgagttacagtgacctgcaggtaataaatacacctgtctaatgattcctc

SEQ ID NO: 838 - protein, 337 aa, Sorghum bicolor
  misc_feature: Ceres Clone ID no. 917740
  misc_feature: Bit score of 730.1 for HMM based on sequences of Figure 11
  misc_feature: Functional Homolog Of SEQ ID NO. 834
  misc_feature: in Figure 11
MEDIEGSSSGSSSHQHRASSTATATAPIRSPSPATEGPARRLSHQHGDRRYPRWTGARLRYSRSLPGRLSGGARLRSSRSLPGRLSEIMAPLQWPEPMMDYFLDECFKMVQDGRTPANETFFRTLDRSMARKSFGTTFRQTDLTDQFTRVRSLWNKYHEILKNLEIIKAQERQSQTDPDKLRLKTGDIYARKFSLIRKYEIKLNTIFESYYGSKAKSLSTYRFNIEHSDRYSGDNSSSSKRRSLGEPFSRQIRLKSSDMPESSQNGSASEISEIQDSAIIAGQCLRDPKTLQSYSHIRTIERKISFLHGTWTVMCEPKCVLENLQPVDQLFVRSPNS

SEQ ID NO: 839 - DNA, 758 bp, Zea mays
  misc_feature: Ceres Clone ID no. 101143919
  misc_feature: Encodes the peptide sequence at SEQ ID NO. 840
  misc_feature (13)..(13): n is a, c, t, g, unknown, or other
cgccgttctccantctcctctgtctgctctctcgctcgaggctgtcaaatcaccattgctgcccccaggaatcctgcatccatgaagactcggacgcaaccggagcggcgggctcgcaaaagtaaattgaaatctggtgggcagaccaagaaagccaagctaaagcaacagattcaggcacccgtgagcgcagcctccattcaaagttcaacggaagggcctaaaagtcagcagattcatcaaaggagtctgaggttgaccagatcctgttcttcagtctcccaccatggaaggaaatcttcgcttggagttacaattgagccaaagattgtgaactcatcccggtccattgacatagatcagcagtcggagaagcacgagagtatgtcaagagggacaaagaggtcaagggggtcaggttcatgggagacgacgagagagctaaatgttgaacaacccagtgactatgaatctgcgctgaagtatttggttgaatttcggtgtccagacgcttattactttgtttatgcacatgcactgaatgacactgttgttctgaagacttttatagctaagacgacctatagaagtagacaaaaatacctcgatttcttgctagatggtgatttagtgagcctgggtccaaaggtcatgaatagctggcgtaagatgcgtcatttttatcgcgatgctgaccatgcgggccattaacactaacctgatggcgctgccggatctgtctttagtttacagcccca

SEQ ID NO: 840 - protein, 209 aa, Zea mays
  misc_feature: Ceres Clone ID no. 101143919
  misc_feature: Bit score of 334.0 for HMM based on sequences of Figure 11
  misc_feature: Functional Homolog Of SEQ ID NO. 834
  misc_feature: in Figure 11
MKTRTQPERRARKSKLKSGGQTKKAKLKQQIQAPVSAASIQSSTEGPKSQQIHQRSLRLTRSCSSVSHHGRKSSLGVTIEPKIVNSSRSIDIDQQSEKHESMSRGTKRSRGSGSWETTRELNVEQPSDYESALKYLVEFRCPDAYYFVYAHALNDTVVLKTFIAKTTYRSRQKYLDFLLDGDLVSLGPKVMNSWRKMRHFYRDADHAGH

SEQ ID NO: 841 - DNA, 1295 bp, Panicum virgatum
  misc_feature: Ceres Clone ID no. 1858677
  misc_feature: Encodes the peptide sequence at SEQ ID NO. 842
tacaatatggttaaggatggttgtcaaccaacaaatgaaagtgttttttttgcgaggcttgaaaagaacatgcaactacgttttgttgatgttccacttggtaaagcggatctgattaaacagtttaagcgattaaatcatttatggggacgataccatcacgatttgcatgattggacgttgagacgtggaatggaacagatgggccactctgatcctgagctgttcaagggtaataaaagcaattatgtttatggtactaaattcacagatatcctgagaaatgaggaaaagatcaactttatctttagcaagtaccatcttgaaaaggcaaaatcacttaatgcgtatgagttcaatgttcaacacagtgatcgctacactgagagcgatagtgttacaagtaaaaggcgtagaattgatgggcccttctcccgccaggttcggcagaagagctcaggcattgatatgcccgagtcatcacaaaatggcatggcctttgataatgcagcctttagtacagcattgaaagaacttgcagatgctgagggcgttaatcaaatgacttatagtatagcctctttaatccttaaagagcctgaagctctgtctgcatactcatatctgccaaccttagaaaaaaaggtcgaatacctgctctttacctggaggttgaggcaggatcccaagagtgtcttaagggcagaacttcccaccagccagctagtgtgaggagaggagcctaaacctgagctcctgcctgctgctcaaggaaatgcagaaggagttggcagagagggatgccagtcagcaagcaatgtcaacgaagagtagtgcaaggagtccatgcagttgttcaagctgcattgttgttgttttggccttgctgtttggtctgatgttaagaacagggatgtttggctgatgccaattgtgcaggaaactgagatcacaatgctgcttgtttcatcatccggctccggctggcagtagtaaattatatgaactggattagttcttttggtcaacaatggttcttttgttgcaagggtggctaatttctcatgttgtccaaagatttcaggaattgtttgcacagacaaaatacaaggaagcagcagagctggctgcggaatctccctagggcctgctgaggacgcctaagatcgtagcgaaatttcaggaatataaacattttttagaggaggctaaaaaacgtgatcataggttactagggcaggcacaggaactcttctttttccatcctcttagccgtggaagctgcttcttccttc

SEQ ID NO: 842 - protein, 241 aa, Panicum virgatum
  misc_feature: Ceres Clone ID no. 1858677
  misc_feature: Bit score of 454.0 for HMM based on sequences of Figure 11
  misc_feature: Functional Homolog Of SEQ ID NO. 834
  misc_feature: in Figure 11
MVKDGCQPTNESVFFARLEKNMQLRFVDVPLGKADLIKQFKRLNHLWGRYHHDLHDWTLRRGMEQMGHSDPELFKGNKSNYVYGTKFTDILRNEEKINFIFSKYHLEKAKSLNAYEFNVQHSDRYTESDSVTSKRRRIDGPFSRQVRQKSSGIDMPESSQNGMAFDNAAFSTALKELADAEGVNQMTYSIASLILKEPEALSAYSYLPTLEKKVEYLLFTWRLRQDPKSVLRAELPTSQLV

SEQ ID NO: 843 - protein, 172 aa, Oryza sativa subsp. japonica
  misc_feature: Public GI ID no. 125571017
  misc_feature: Bit score of 232.0 for HMM based on sequences of Figure 11
  misc_feature: Functional Homolog Of SEQ ID NO. 834
  misc_feature: in Figure 11
MTNDHFIPLDLNNQYVPLTNSKVRSKLGRYETSWLEKGSGSQQMIVDEKFCLASQFTCSGARLIGHDGLFTSLFTASEATGTGAPSVSKKRKYTTPKDLGSSLKCLAEHGCKDIEHYIFTVALEDPAALKGFLAMKSYEDKRKHLIGLWKKGIVKVPAVEGINPELLPPDFQ

SEQ ID NO: 844 - protein, 213 aa, Oryza sativa subsp. japonica
  misc_feature: Public GI ID no. 53791578
  misc_feature: Bit score of 312.5 for HMM based on sequences of Figure 11
  misc_feature: Functional Homolog Of SEQ ID NO. 834
  misc_feature: in Figure 11
MGKKNREAKAASTHVSTDQEEVALLEFAAKLAKKQSFKDNKSDFFKRLAKMTNDHFIPLDLNNQYVPLTNSKIVDEKFCLASQFTCSGARLIGHDGLFTSLFTASEATGTGAPSVSKKRKYTTPKDLGSSLKCLAEHGCKDIEHYIFTVALEDPAALKGFLAMKSYEDKRKHLIGLWKKGIVKGPGVDNKPSSGSAGTAGSWSHGDGDEDLNL

SEQ ID NO: 845 - DNA, 1711 bp, Panicum virgatum
  misc_feature: Ceres Clone ID no. 1727628
  misc_feature: Encodes the peptide sequence at SEQ ID NO. 846
agctggctccttgctgagagggggagaaggcggaggagatgaagacccggagctccgcgaggggggagcccaggcgcctcgggaatgtggctctcctggccctcatgctctgctccgtcgtcgccctctccctcatccgggggaggttcgccccaatcgtcaacagtgccggagatgccatcaaatccgaagaggaggcggccgcggtgagcaaggcggccgtcaacattgacaccggcgacggcgccgacgaggccgccgcggaagctgctgcggaggagaaagacaaggaggaggcccagcccaagcccaccgccgcggccgccaagccggtgtgctacgagacgagccaccgctccgacacctgcgaggcggccggcgacgtgcgcgtgatggggagcagccagacagtgtacgtcgacacgctggaccgggagtggaagaccaagccgtactgccggaagcacgacaacttcgcgctgtcccacgtcaaggagtggaccctcaagccgctcccctccggcgcggcgccgcggtgcacggtcaacagcacggccaccgccttcgtgctctccaccggcgggttcacgggcaaccccttccacgactacacggacgtgctgatcccggccttcatcacggcgcaccatttgggcggcgaggtgcagttcctggtgagcagctacaagtcgtggtgggtgaaccggtacatccagatcttccagcagatgagccggcacgaggtggtggacatcgacgccgacgacgatgtccggtgctaccgtaacgtggtggtggggccgacgttccaccgggagctcggcgtggacgcgtccaagacgccgtcgggctactccacggccgacttccgcaagatgctgcgcgacgcgttcgggctggagcgcgcgacggccacgccgagcggcgaccagtgggacatccggcgccggccgcggctgctgatcatctcgcggcgcccctcccgcggccgcgcgttcatgaacgagcgcgcgatggccgacatggcggcgagcctcgggttcgacgtgcggatcggggagcccgacacgagcacggacacgtccaagttcgcgcggctggtgaactcgtgcgacgtgatggtgggcgtgcacggcgccgggctgaccaacatggtgttcctgccggccggcgccgtggtggtgcaggtggtgccgtacgggcggctcgagtggctggcccggaacacgttcgcggagccgtcggcggggatggaggtccactacctggagtacgcggtgcagctggacgagacgacgctgagcgagcagtacccgagcgaccacccggcgctgagggatcccatggccatccacaagcaggggtggaacgcgctcaagaccacgtacctggacaagcagaacgtgcggccgcacctggggcgcctcaagaacaccttcctccaggcgctcaagatgctgccgcacggacgggacgattaggaaggaggtgatctagacatcggatattagagggtagatgtatagcttaattaatgataattactacttttttggcttgttttttcttctttatttgttcgtatgagtaagagggcgcgcttcagtagcagccgcaagcaagtagtagtggcagtgcgactgtgaatgggatcgcagggacaaattctagtgtttaactgtttataagttatctttttcttttcttttcc

SEQ ID NO: 846 - protein, 480 aa, Panicum virgatum
  misc_feature (98)..(342): Pfam Name: DUF563 Pfam Description: Protein of unknown function (DUF563)
  misc_feature: Ceres Clone ID no. 1727628
  misc_feature: Bit score of 1398.4 for HMM based on sequences of Figure 15
  misc_feature: Functional Homolog Of SEQ ID NO. 846
  misc_feature: in Figure 15
MKTRSSARGEPRRLGNVALLALMLCSVVALSLIRGRFAPIVNSAGDAIKSEEEAAAVSKAAVNIDTGDGADEAAAEAAAEEKDKEEAQPKPTAAAAKPVCYETSHRSDTCEAAGDVRVMGSSQTVYVDTLDREWKTKPYCRKHDNFALSHVKEWTLKPLPSGAAPRCTVNSTATAFVLSTGGFTGNPFHDYTDVLIPAFITAHHLGGEVQFLVSSYKSWWVNRYIQIFQQMSRHEVVDIDADDDVRCYRNVVVGPTFHRELGVDASKTPSGYSTADFRKMLRDAFGLERATATPSGDQWDIRRRPRLLIISRRPSRGRAFMNERAMADMAASLGFDVRIGEPDTSTDTSKFARLVNSCDVMVGVHGAGLTNMVFLPAGAVVVQVVPYGRLEWLARNTFAEPSAGMEVHYLEYAVQLDETTLSEQYPSDHPALRDPMAIHKQGWNALKTTYLDKQNVRPHLGRLKNTFLQALKMLPHGRDD

SEQ ID NO: 847 - DNA, 1476 bp, Sorghum bicolor
  misc_feature: Ceres Annot ID no. 8670072
  misc_feature: Encodes the peptide sequence at SEQ ID NO. 848
atgaagacccggagctcagcgagaggggagccgaggcggctcgggaatgcggctctcctggcgctcatgctctgctccgtcgtcgcgctctccctcatccgggggaggttcgccccaattgttaccaccgcaggagacgccatcaaatccgaggacgacgctgctgcagcggcggtggcggtcagcaaggcggctgctgtcaacgttgacaccggcgacggcgccgacgaggccgccgctgaagctgctgctgaggagaaagacaaggaggaggtccagccgaagccagccgccgacggttcccgcggcggcgcagccaagccggtgtgctacgagacgagccgccgctccgacacctgcgaggcggctggcgacgtgcgcgtgttggggagctcccagacggtgtacgtcgactcgctggaccgggagtggaagaccaagccgtactgccggaagcacgacaacttcgcgctcgcccacgtcaaggagtggtccctcaagccgctcccctccggcgctgcgccgcagtgcacggtgaacagctcggccaccgcgttcgtgctctccacgggcggcttcacgggcaacccgttccacgactacacggacgtgctgatcccggccttcatcacggcgcacccgctccgcggcgaggtccagttcctggtcagcagctacaagtcgtggtggatgaaccgctacatccagatcttccagcagatgagccggcacgaggtggtggacatcgacgccgacgacgaggtccgctgctaccggaacgtggtggtggggccgacgttccaccgtgagctcggcgtggacgcgtccaagtccccgtcgccggggtactccacggccgacttccgcaagatgctgcgcgacgcgttcgggctggagcgcgccacggccacgcccagcggcgaccggtgggacatccggcgccggccgcggctgctcatcatctcgcgccgcccgtcccgcgggcgcgccttcatgaacgagcgcgccatggcggacatggcggcgagcctcgggttcgacgtgcggatcggggagcccgacagcagcaccgacacgtccaagttcgcgcggctggtgaactcgtgcgacgtgatggtgggcgtccacggcgccgggctcaccaacatggtgttcctgccggccggcgccgtggtggtgcaggtggtgccgtacgggcggctggagtggctggcccggaacacgttcgcggagccgtcggcggggatggaggtccactacctggagtacgtggtgcagctggacgagacgacgctgagcgagcagtacccgagcgatcacccggtgctgagggaccccatggccatccacaagcaggggtggaacgcgctcaagaccacgtacctggacaagcagaacgtgcgcccgcacctgggccgcctcaagaacaccttcctacaggcgctcaagatgctgccgcacggccgggacgattga

SEQ ID NO: 848 - protein, 491 aa, Sorghum bicolor
  misc_feature (108)..(353): Pfam Name: DUF563 Pfam Description: Protein of unknown function (DUF563)
  misc_feature: Ceres Annot ID no. 8670072
  misc_feature: Bit score of 1421.1 for HMM based on sequences of Figure 15
  misc_feature: Functional Homolog Of SEQ ID NO. 846
  misc_feature: in Figure 15
MKTRSSARGEPRRLGNAALLALMLCSVVALSLIRGRFAPIVTTAGDAIKSEDDAAAAAVAVSKAAAVNVDTGDGADEAAAEAAAEEKDKEEVQPKPAADGSRGGAAKPVCYETSRRSDTCEAAGDVRVLGSSQTVYVDSLDREWKTKPYCRKHDNFALAHVKEWSLKPLPSGAAPQCTVNSSATAFVLSTGGFTGNPFHDYTDVLIPAFITAHPLRGEVQFLVSSYKSWWMNRYIQIFQQMSRHEVVDIDADDEVRCYRNVVVGPTFHRELGVDASKSPSPGYSTADFRKMLRDAFGLERATATPSGDRWDIRRRPRLLIISRRPSRGRAFMNERAMADMAASLGFDVRIGEPDSSTDTSKFARLVNSCDVMVGVHGAGLTNMVFLPAGAVVVQVVPYGRLEWLARNTFAEPSAGMEVHYLEYVVQLDETTLSEQYPSDHPVLRDPMAIHKQGWNALKTTYLDKQNVRPHLGRLKNTFLQALKMLPHGRDD

SEQ ID NO: 849 - protein, 492 aa, Zea mays
  misc_feature (110)..(354): Pfam Name: DUF563 Pfam Description: Protein of unknown function (DUF563)
  misc_feature: Public GI ID no. 162460449
  misc_feature: Bit score of 1423.1 for HMM based on sequences of Figure 15
  misc_feature: Functional Homolog Of SEQ ID NO. 846
  misc_feature: in Figure 15
MKTRSSARGEPRRLGNAALLALMLCSVVALSLIRGRFAPIVTTAGDAIKSEDDAAAAALSVSKAAVNVDTGDSADEAAAEAAAEEKEKEEVQPKPADSSGSGSGGSAAKPVCYETSRRSDTCEAAGDVRVVGSTQTVYVDSLDREWKTKPYCRKHDNFALAHVKEWSLKPLPSGAAPQCTVNSSATAFVLSTGGFTGNPFHDYTDVLIPAFITAHPLRGEVQFLVSSYKSWWMNRYIQIFQQMSRHEVVDIDADDEVRCYRSVVVGATFHRELGVDASKSPPGYSTADFRKMLRDAFGLERATATPSGDRWDIRRRPRLLIISRRPSRGRAFMNERAMADMAASLGFDVRIGEPDTSTDTSKFARLVNSCDVMVGVHGAGLTNMVFLPAGAVVVQVVPYGRLEWLARNTFAEPSAGMEVHYLEYVVQLDETTLSEQYPSDHPVLRDPMAIHKQGWNALKTTYLDKQNVRPHLGRLKNTFLQALKMLPHGRDD

SEQ ID NO: 850 - protein, 484 aa, Saccharum officinarum
  misc_feature (102)..(346): Pfam Name: DUF563 Pfam Description: Protein of unknown function (DUF563)
  misc_feature: Public GI ID no. 56409862
  misc_feature: Bit score of 1408.9 for HMM based on sequences of Figure 15
  misc_feature: Functional Homolog Of SEQ ID NO. 846
  misc_feature: in Figure 15
MKTRSSARGEPRRLGNAALLALMLCSVVALSLIRGRFAPIGDAIKSEDDAAAAAVAVSKVAINVDTGDGADEAAVEAAAEEKQKEEVQPKPADGSGGGAAKPVCYETSRRSDTCEAAGDVRVVGSSQTVYVDLLDREWKTKPYCRKHDNFALAHVKEWSLKPLPSGAAPQCTVNSSATAFVLSTGGFTGNPFHDYTDVLIPAFITAHPLRGEVQFLVSSYKSWWMNRYIQIFQQMSRHEVVDIDADDEVRCYRSVVVGPTFHRELGVDASKSPSGYSTADFRKMLRDAFGLERATATPSGDRWDIRRRPRLLIISRRPSRGRAFMNERAMADMAASLGFDVRIGEPDSSTDTSKFARLVNSCDVMVGVHGAGLTNMVFLPAGAVVVQVVPYGRLEWLARNTFAEPSAGMEVHYLEYVVQMDETTLSEQYPSDHPVLRDPMAIHKQGYRALNRTYLDKQNVRPHLGRLKNTFLQALKMLPHGRDD

SEQ ID NO: 851 - protein, 500 aa, Oryza sativa subsp. japonica
  misc_feature (107)..(360): Pfam Name: DUF563 Pfam Description: Protein of unknown function (DUF563)
  misc_feature: Public GI ID no. 115482674
  misc_feature: Bit score of 1442.1 for HMM based on sequences of Figure 15
  misc_feature: Functional Homolog Of SEQ ID NO. 846
  misc_feature: in Figure 15
MKTRSSGRGGGEPRRRLRNAAVMALMLSSLVALSLVRARFSPIASDGGEALKLKADESKLVVTTNHAVVNTESGDSSSSSSSAAAEEEEEVAAPAKPAAAGGGGARPVCYETSRRSDTCEAAGDVRVVGGSQTVYADTLDREWKTKPYCRKHDAFALSHVKEWTLRPLPSGDGGGGGAAVAPRCTTNSTATAFVLSTGGFTGNPFHDYTDVLIPAFITAHRFGGEVQFLVSSYKSWWMNKYIQIFQQMSRHDVVDVDADGDEVRCYRSAVVGPEFHRELGVDPTKTPSGYSVLDFRKMLRGAFGLDRATATPSGDRWDIRRRPRLLIISRRAARGRAFMNERAMADMAASLGFDVRVGEPDASTDTSKFARLVNSCDVMVGVHGAGLTNMVFLPAGAVLVQVVPYGKLEWLARNTFAEPSSAMEIHYLEYAVQLDETTLSEQYPADHPVLRDPMAIHKQGWEALKTTYLDKQNVRPHLGRLKNTFLQALKLLPHDKETMN

SEQ ID NO: 852 - DNA, 1712 bp, Panicum virgatum
  misc_feature: Ceres Clone ID no. 1770027
  misc_feature: Encodes the peptide sequence at SEQ ID NO. 853
agctggctcccttgctgagagaggaatcggccaagaagagaaggcggagaggagatgaagacccggagctccgcgaggggggagcacaggcggctcgggaatgtggctctcctggccctcatgctctgctccgtcgtcgccctctccctcatccgggggaggttcgccccaatcgtcaacagtgccggagacgccatcaaatccgaggaggcggcggccgcggtgagcaaggcggccgtcaacattgacactggcgacagcgccgacgaggccgccgcggaagctgctgcggaggagaaagacaaggaggagcccgagcccaaccccgccgccaagccggtgtgctacgagacgagccgccgctccgacacctgcgaggcggccggcgacgtgcgcgtgatggggagcagccagaccgtgtacgtcgacacgctggaccgggagtggaagaccaagccgtactgccggaagcacgacaacttcgcgctgtcccacgtcaaggagtggaccctcaagccgctcccctccggcgcggcgccgcggtgcacggtcaacagctcggccaccgccttcgtgctctccaccggcgggttcacgggcaaccctttccacgactacacggacgtgctgatcccggtcttcatcacggcgcaccccttgggcggcgaggtgcagttcttggtgagcagctacaagtcgtggtgggtgaaccggtacatccagatcttccagcagatgagccggcacgaggtggtggacatcgacgccgacgacgaggtccggtgctaccgcaacgtggtggtagggccgacgttccaccgggagctcggcgtggatgcgtccaagacgccgtcgggctactccacggccgacttccgcaagatgctgcgcgacgcgttcgggctggagcgcgcgacggccacgccgagcggcgaccagtgggacatccggcgccggccgcggctgctcatcatctcgcggcgtccctcccgcggccgcgcgttcatgaacgagcgcgcgatggcggacatggcggcgagcctcgggttcgacgtgcggatcggggagcccgacacgagcacggacacgtccaagttcgcgcggctggtgaactcgtgcgacgtgatggtgggcgtgcacggcgccggactgaccaacatggtgttcctgccggccggcgccgtggtggtgcaggtggtgccgtacgggaggctcgagtggctggcccggaacacgttcgcggagccgtcggcggggatggaggtccactacctcgagtacgcggtgcagctggacgagacgacgctgagcgagcagtacccgagcgaccacccggtgctgagggaccccatggccatccacaagcaggggtggaacgcgctcaagaccacgtacctggacaagcagaacgtgcggccgcacctggggcgcctcaagaacaccttcctccaggcgctcaagatgctgccgcacggccgggacgattaggaaggaggtgatctagacctctcggatattagagggtaggtgtatagcttaattaatggtaattactactttttttggcttgttttttcttctttatttgttcgtatgagtaagagggcgctccagtaccagcaagtagtagtggcagtgctactgtgaatgggatcgcagagacaaattctagtgtttaactgttcataagttatctttttttttcttttcct

SEQ ID NO: 853 - protein, 477 aa, Panicum virgatum
  misc_feature (95)..(339): Pfam Name: DUF563 Pfam Description: Protein of unknown function (DUF563)
  misc_feature: Ceres Clone ID no. 1770027
  misc_feature: Bit score of 1373.4 for HMM based on sequences of Figure 15
  misc_feature: Functional Homolog Of SEQ ID NO. 846
MKTRSSARGEHRRLGNVALLALMLCSVVALSLIRGRFAPIVNSAGDAIKSEEAAAAVSKAAVNIDTGDSADEAAAEAAAEEKDKEEPEPNPAAKPVCYETSRRSDTCEAAGDVRVMGSSQTVYVDTLDREWKTKPYCRKHDNFALSHVKEWTLKPLPSGAAPRCTVNSSATAFVLSTGGFTGNPFHDYTDVLIPVFITAHPLGGEVQFLVSSYKSWWVNRYIQIFQQMSRHEVVDIDADDEVRCYRNVVVGPTFHRELGVDASKTPSGYSTADFRKMLRDAFGLERATATPSGDQWDIRRRPRLLIISRRPSRGRAFMNERAMADMAASLGFDVRIGEPDTSTDTSKFARLVNSCDVMVGVHGAGLTNMVFLPAGAVVVQVVPYGRLEWLARNTFAEPSAGMEVHYLEYAVQLDETTLSEQYPSDHPVLRDPMAIHKQGWNALKTTYLDKQNVRPHLGRLKNTFLQALKMLPHGRDD

SEQ ID NO: 854 - DNA, 1508 bp, Zea mays
  misc_feature: Ceres Clone ID no. 100815759
  misc_feature: Encodes the peptide sequence at SEQ ID NO. 855
gtccggatgcgccagcgccgcctggtcaacagatttttgccctgcgctgtcactccaccacgctgcttgtactgaaagctttttcccagaataaaggctggggaggaggaagcggcggcggcggcgctctcagaagagagggtgagatgaagactcggagctcagcgagaggggagccgaggcgtctcggaaatgcggctcttctggcgctcatgctctgctccgtcgtcgcgctctccctcatccgggggagattcgccccaattggagatgccatcaaatccgaggacgacgctgcggcggctgcgctcagtgtcagcaaggcggccgtcaacgttgacaccggcgacagcgccgacgaggccgccgccgaagctgctgctgaggagaaagagaaggaggaagtccagccgaagcccgctgacagttccggctccggttccggtggcagcgcagccaagccggtgtgctacgagacgagccgccgctccgacacctgcgaggcagctggcgacgtgcgcgtcgtggggagcacccagacggtgtacgtggactcgctggaccgggagtggaagaccaagccgtactgccggaagcacgacaacttcgcgctcgcccacgtcaaggagtggtccctgaagccgctcccctccggcgcggcgccgcagtgcacggtcaacagctcggccaccgcgttcgtgctgtccacgggcgggttcaccggcaacccgttccacgactacacggacgtgctcatcccggccttcatcacggcgcacccgctccgcggcgaggtccagttcctggtgagcagctacaagtcgtggtggatgaaccgctacatccagatcttccagcagatgagccggcacgaggtggtggacatcgacgcggacgacgaggtccggtgctaccgcagcgtggtggtgggggcgacgttccaccgggagctgggcgtggacgcgtccaaatcgccgccggggtactccacggccgacttccgcaagatgctgcgcgacgcgttcgggctggagcgtgccacggccacgcccagcggcgaccggtgggacatccggcgccgcccccggctgctcatcatctcgcgccgcccgtcccgcgggcgcgccttcatgaacgagcgcgccatggcggacatggcggccagcctggggttcgacgtgcggatcggggagccagacaccagcaccgacacgtccaagttcgcgcggctggtgaactcgtgcgacgtgatggtgggcgtccacggcgccgggctcaccaacatggtgttcctgcctgccggcgccgtggtggtgcaggtggtgccgtacgggcggctggagtggctggcgcggaacacgttcgcggagccgtcggcggggatggaggtccactacctggagtacgtggtgcagctggacgagacgacgctgagcgagcagtacccgagcgatcacccggtgctgagggaccccatggccatccacaagcaggggtggaacgcgctc

SEQ ID NO: 855 - protein, 454 aa, Zea mays
  misc_feature (106)..(350): Pfam Name: DUF563 Pfam Description: Protein of unknown function (DUF563)
  misc_feature: Ceres Clone ID no. 100815759
  misc_feature: Bit score of 1249.3 for HMM based on sequences of Figure 15
  misc_feature: Functional Homolog Of SEQ ID NO. 846
MKTRSSARGEPRRLGNAALLALMLCSVVALSLIRGRFAPIGDAIKSEDDAAAAALSVSKAAVNVDTGDSADEAAAEAAAEEKEKEEVQPKPADSSGSGSGGSAAKPVCYETSRRSDTCEAAGDVRVVGSTQTVYVDSLDREWKTKPYCRKHDNFALAHVKEWSLKPLPSGAAPQCTVNSSATAFVLSTGGFTGNPFHDYTDVLIPAFITAHPLRGEVQFLVSSYKSWWMNRYIQIFQQMSRHEVVDIDADDEVRCYRSVVVGATFHRELGVDASKSPPGYSTADFRKMLRDAFGLERATATPSGDRWDIRRRPRLLIISRRPSRGRAFMNERAMADMAASLGFDVRIGEPDTSTDTSKFARLVNSCDVMVGVHGAGLTNMVFLPAGAVVVQVVPYGRLEWLARNTFAEPSAGMEVHYLEYVVQLDETTLSEQYPSDHPVLRDPMAIHKQGWNAL

SEQ ID NO: 856 - protein, 503 aa, Oryza sativa subsp. japonica
  misc_feature (119)..(365): Pfam Name: DUF563 Pfam Description: Protein of unknown function (DUF563)
  misc_feature: Public GI ID no. 46390169
  misc_feature: Bit score of 1053.1 for HMM based on sequences of Figure 15
  misc_feature: Functional Homolog Of SEQ ID NO. 846
MKSNRNLTRGDGRRLGNAALIAFMLGSLLVLSLVRARFSPIGKPGEAIKTEEQEAMRKGSVKMETLEAADEAAASAAAEEEEETQPKAGDTTAGGGGGGASSAAVAAASTTATDHLTKPVCYESSRRSDTCEATGDVRVHGRSQTIHISPLEQEWKVKPYCRKHDAFALSHVKEWALRPLSTADTYPAVPHCTVNSSATAFVLSTGGFTGNPFHDYTDVLIPAFITAHRFAGEVQFLVSSFKSWWTNRYMQIFQRLSKYELVDIDNDDEVRCYRSVVVGPTFHKELGVDASRTPSGYSMVDFRTMLRGALGLERAVAEPSGDRWDIRRRPRLLIISRRNSRAFLNERAMADMAMSLGFYVRLGEPDISTDVSKFARLVNSADVMVGVHGAGLTNMVFLPAGAVLIQVVPYGGLEWLARGTFKEPAADMQIHYLEYMIQLDETTLSEQYPKDDPVLKDPYSIHKQGWNALKMVYLDKQNVRPHLGRLKNTFMEALKLLPHGHTN

SEQ ID NO: 857 - protein, 504 aa, Oryza sativa subsp. japonica
  misc_feature (120)..(366): Pfam Name: DUF563 Pfam Description: Protein of unknown function (DUF563)
  misc_feature: Public GI ID no. 115445889
  misc_feature: Bit score of 1051.1 for HMM based on sequences of Figure 15
  misc_feature: Functional Homolog Of SEQ ID NO. 846
MKSNRNLTRGDGRRLGNAALIAFMLGSLLVLSLVRARFSPIGKPGEAIKTEEQEAMRKGSVKMETLEAADEAAASAAAAEEEEETQPKAGDTTAGGGGGGASSAAVAAASTTATDHLTKPVCYESSRRSDTCEATGDVRVHGRSQTIHISPLEQEWKVKPYCRKHDAFALSHVKEWALRPLSTADTYPAVPHCTVNSSATAFVLSTGGFTGNPFHDYTDVLIPAFITAHRFAGEVQFLVSSFKSWWTNRYMQIFQRLSKYELVDIDNDDEVRCYRSVVVGPTFHKELGVDASRTPSGYSMVDFRTMLRGALGLERAVAEPSGDRWDIRRRPRLLIISRRNSRAFLNERAMADMAMSLGFYVRLGEPDISTDVSKFARLVNSADVMVGVHGAGLTNMVFLPAGAVLIQVVPYGGLEWLARGTFKEPAADMQIHYLEYMIQLDETTLSEQYPKDDPVLKDPYSIHKQGWNALKMVYLDKQNVRPHLGRLKNTFMEALKLLPHGHTN

SEQ ID NO: 858 - protein, 481 aa, Oryza sativa subsp. japonica
  misc_feature (97)..(343): Pfam Name: DUF563 Pfam Description: Protein of unknown function (DUF563)
  misc_feature: Public GI ID no. 125581917
  misc_feature: Bit score of 990.3 for HMM based on sequences of Figure 15
  misc_feature: Functional Homolog Of SEQ ID NO. 846
MLGSLLVLSLVRARFSPIGKPGEAIKTEEQEAMRKGSVKMETLEAADEAAASAAAAEEEEETQPKAGDTTAGGGGGGASSAAVAAASTTATDHLTKPVCYESSRRSDTCEATGDVRVHGRSQTIHISPLEQEWKVKPYCRKHDAFALSHVKEWALRPLSTADTYPAVPHCTVNSSATAFVLSTGGFTGNPFHDYTDVLIPAFITAHRFAGEVQFLVSSFKSWWTNRYMQIFQRLSKYELVDIDNDDEVRCYRSVVVGPTFHKELGVDASRTPSGYSMVDFRTMLRGALGLERAVAEPSGDRWDIRRRPRLLIISRRNSRAFLNERAMADMAMSLGFYVRLGEPDISTDVSKFARLVNSADVMVGVHGAGLTNMVFLPAGAVLIQVVPYGGLEWLARGTFKEPAADMQIHYLEYMIQLDETTLSEQYPKDDPVLKDPYSIHKQGWNALKMVYLDKQNVRPHLGRLKNTFMEALKLLPHGHTN

SEQ ID NO: 859 - DNA, 1500 bp, Sorghum bicolor
  misc_feature: Ceres Annot ID no. 8734902
  misc_feature: Encodes the peptide sequence at SEQ ID NO. 860
atgaagtcgaaccggaacctgtcaagggcggaggggaggaggctggggaatgtggcactcatcgccttcatgctcggatccctcctgctgctctccctcatcagggccaagttctccccgattggtaaaacaggggacgccatcaaagcagaggagcagcaggcaatggcgaaagacagcgtcgagatggcgaacgcgcatgacgctgcagctgcagccgaggaggaaggcgaggagactcggtccaaccccaccgactccaactctggcagcggcagcggcggcggcggcgtgagcggcacggccattgtggtcggcgacgaccacaccgagagggcgagcaaaagcaagccggtgtgctacgagtcgagccggcggtcggacacctgcgaggcggccggcgacgtgcgcgtggtggggcgtgcccagacggtgctggtgagccctctggagcgggagtggaaggtgaagccttactgccggaagcacgacgcgttcgcgctgtcccacgtcaaggagtggacgctccgtccggtgggaagcgacgacgcgccgcggtgcacggtgaacagctcggcgacggcgttcgtgctgtcgacgggcgggttcacgggcaacctgttccacgactacacggacgtgctgatcccggcgttcatcacggcgcggcggtacgccggcgacgtgcagctgctggtgagcagctacaagccgtggtggaccaccaagtacctgcaggtgctgcagcagctgagccggcacgaggtggtggacgcggacgcggacgccgaggtccgctgctacccgcgcgtcgtggtaggcccgacgttccaccgcgagctaggcgtggacgcgtcctcctcgtcgccgtccatgccggagttccgcgcgatgctgcgggacgcgttcgggctagagcgcgcggcggcggcgccgagcggggaccggtgggacatccgccggcgcccgcgcctcctcatcatctcgcggaggacctcgcggcggctgctgaacgagcgcgccatggcggacatggcgacgagcctggggttcgacgtgcggacgggggacccggaggtgagcacggacgtggggcggttcgcgcggctggtgaactcggcggacgtgatggtgggcgtgcacggcgacgggctcaccaacatggtgttcctccccgccggcgccgtgctggtgcaggtggtgccgtacggcgggctggagtggctggcgcgcggcacgttccgggagcccgcggaagggatggaggtgcactacctcgagtacgtggtgcagaaggacgagacgacgctgagcgaggagtacggcgaggacgatccggtgatcagagaccccgccgccatccataagcaggggtgggacgcgctcaaggccgtgtacctcgacaagcagaacgtccggccgcacctcggcaggctcaagaacaccttcgtgcaggcgctcaagctgctgccccatggacggcaggtcgccgacgactga

SEQ ID NO: 860 - protein, 499 aa, Sorghum bicolor
  misc_feature (118)..(358): Pfam Name: DUF563 Pfam Description: Protein of unknown function (DUF563)
  misc_feature: Ceres Annot ID no. 8734902
  misc_feature: Bit score of 969.8 for HMM based on sequences of Figure 15
  misc_feature: Functional Homolog Of SEQ ID NO. 846
MKSNRNLSRAEGRRLGNVALIAFMLGSLLLLSLIRAKFSPIGKTGDAIKAEEQQAMAKDSVEMANAHDAAAAAEEEGEETRSNPTDSNSGSGSGGGGVSGTAIVVGDDHTERASKSKPVCYESSRRSDTCEAAGDVRVVGRAQTVLVSPLEREWKVKPYCRKHDAFALSHVKEWTLRPVGSDDAPRCTVNSSATAFVLSTGGFTGNLFHDYTDVLIPAFITARRYAGDVQLLVSSYKPWWTTKYLQVLQQLSRHEVVDADADAEVRCYPRVVVGPTFHRELGVDASSSSPSMPEFRAMLRDAFGLERAAAAPSGDRWDIRRRPRLLIISRRTSRRLLNERAMADMATSLGFDVRTGDPEVSTDVGRFARLVNSADVMVGVHGDGLTNMVFLPAGAVLVQVVPYGGLEWLARGTFREPAEGMEVHYLEYVVQKDETTLSEEYGEDDPVIRDPAAIHKQGWDALKAVYLDKQNVRPHLGRLKNTFVQALKLLPHGRQVADD

SEQ ID NO: 861 - protein, 481 aa, Oryza sativa subsp. indica
  misc_feature (120)..(343): Pfam Name: DUF563 Pfam Description: Protein of unknown function (DUF563)
  misc_feature: Public GI ID no. 125539258
  misc_feature: Bit score of 943.7 for HMM based on sequences of Figure 15
  misc_feature: Functional Homolog Of SEQ ID NO. 846
MKSNRNLTRGDGRRLGNAALIAFMLGSLLVLSLVRARFSPIGKPGEAIKTEEQEAMRKGSVKMETLEAADEAAASAAAAEEEEETQPKAGDTTAGGGGGGASSAAVAAASTTATDHLTKPVCYESSRRSDTCEATGDVRVHGRSQTIHISPLEQEWKVKPYCRKHDAFALSHVKEWALRPLSTADTYPAVPHCTVNSSATAFVLSTGGFTGNPFHDYTDVLIPAFITAHHFAGEVQFLVSSFKSWWTNRYMQIFQRLSKYELVDIDNDDEDAVGYSMVDFRTMLRGALGLERAVAEPSGDRWDIRRRPRLLIISRRNSRAFLNERAMADMAMSLGFDVRLGEPDISTDVSKFARLVNSADVMVGVHGAGLTNMVFLPAGAVLIQVVPYGGLEWLARGTFKEPAADMQIHYLEYMIQLDETTLSEQYPKDDPVLKDPYSIHKQGWNALKMVYLDKQNVRPHLGRLKNTFMEALKLLPHGHTN

SEQ ID NO: 862 - DNA, 2078 bp, Panicum virgatum
  misc_feature: Ceres Clone ID no. 1726616
  misc_feature: Encodes the peptide sequence at SEQ ID NO. 863
agtcagatccaagctccacacggcagcatcagccagcagcttaagaccagtctccctcctcctccacgccttcagctaagcaaagcatctcgagccttccttccttgtcctcgtccccgttcccattccctgccggtgccagctcgcccgcccaccctttcttcttcggcttcggagagagagcagcagatcggagggggcagcgaaaggcggccgcttcgggcgcggcgcgccagatctgggccgggtgggggctccggccggcaggcggcggctgcggcgggaggaggaggacggcgagatgaagccgtcgctgcggagccggcaggagccgcggcgggtcagcaacggcgtcatcatcggcgccatgctgctctcgctctgcgtcctcagcatcgtcaaggccagatactgcgccacccccttcggcaaggcggaggaccagctccaggagcagatgaacgccagcatccggatggagacggaggagtcgccgaccaggacgcccggagagggggaggaggaggaagaggaggtgtccagcacggcgcccgcggtggccacgccggccgccgtggccatcaccacctccggcggcgggaaaggcagaggcaagaaggggtccaaggcgaagccgacgtgctacatgacgagcaagcggtcggagcggtgcgacgcgtcgggcgacatccgggtggacgggaaccgctccaccatctacgtcagcgggatagaccgggagtggcggaccaagccgtacgcgcgctaccacgaccccgtcgccatggcccacgtccgcgagtacaccctcaagccgctccccgtcggcgacgccgcgccggcgtgcacaaagaactactcggtcccggggttcctcttctccaacggcggcttctccggcaacctctaccacgactacaccgacgtgctggtgccgctcttcatcagcacccaccagttcaagggccgcgtgcagttcctgctctccgggatgaagccctggtgggtgggcaagttcacccccttcttccggcagctcacccggcacgacgtcatcgacgtcgacaacgaccaggaggtccactgcttcccccggatcgtggtcggcgccaccttccacaaggacatgggcgtggacccgcggcggtcgccggggcacgtctcggtggtggacttcaagcgcgcgctccgccgcgccttcgggctggggcgcgaggcggcgtcccgcggcggcgccacgggcgccggcatgccgcgcctgctcatcatctcccggcgcgggtcgcggcggttcctgaacgagcgggagatggcgcgcgcggcggcggcggccgggttcgaggtgcgcgtggcggagcccgaccagcacacggacatggcgacgttcgcgcggctggtgaactcggcggacgtgatggtggacgtgcacggcgccgggctgaccaacatggtgttcctgccccgcggcgccgtgctgatccaggtggtgcccttcggcgggctggagtggctcaccggcgtgacgttcaaggacccggcggcggacatggaggtgagctacatggactacaacgtgaggctggaggagagctcgctgatcgaccagtacccgaggaaccaccaggtgctcaccgacccctacgccgtgcacaagcagggctgggacgcgctcaagacggcctacctggacaagcagaacatccggatggacctcgacaggttcaaggccacgctgcaggaggccatgagccggctgccatgaccaccggctccgtccgggaggaggtagataggttggtgtatctatcggacggacacatctgcgcctgccttgtggtcgctcgctcaacttcgacttcttttttttttttcgagcttcgatcgatcctttttagcaagattcattggatccattgttttgttacataaaggaggatgggaaaatggtggaaggcaaaagcaagaacatgttgacatgttgtttatatactactactgtactgtagaggccagctcaatccagcccggatgatgatttgttaattgcttaatttatagaaaccctttcttttgtgatt

SEQ ID NO: 863 - protein, 486 aa, Panicum virgatum
  misc_feature (112)..(353): Pfam Name: DUF563 Pfam Description: Protein of unknown function (DUF563)
  misc_feature: Ceres Clone ID no. 1726616
  misc_feature: Bit score of 620.5 for HMM based on sequences of Figure 15
  misc_feature: Functional Homolog Of SEQ ID NO. 846
MKPSLRSRQEPRRVSNGVIIGAMLLSLCVLSIVKARYCATPFGKAEDQLQEQMNASIRMETEESPTRTPGEGEEEEEEVSSTAPAVATPAAVAITTSGGGKGRGKKGSKAKPTCYMTSKRSERCDASGDIRVDGNRSTIYVSGIDREWRTKPYARYHDPVAMAHVREYTLKPLPVGDAAPACTKNYSVPGFLFSNGGFSGNLYHDYTDVLVPLFISTHQFKGRVQFLLSGMKPWWVGKFTPFFRQLTRHDVIDVDNDQEVHCFPRIVVGATFHKDMGVDPRRSPGHVSVVDFKRALRRAFGLGREAASRGGATGAGMPRLLIISRRGSRRFLNEREMARAAAAAGFEVRVAEPDQHTDMATFARLVNSADVMVDVHGAGLTNMVFLPRGAVLIQVVPFGGLEWLTGVTFKDPAADMEVSYMDYNVRLEESSLIDQYPRNHQVLTDPYAVHKQGWDALKTAYLDKQNIRMDLDRFKATLQEAMSRLP

SEQ ID NO: 864 - protein, 485 aa, Oryza sativa subsp. japonica
  misc_feature (111)..(350): Pfam Name: DUF563 Pfam Description: Protein of unknown function (DUF563)
  misc_feature: Public GI ID no. 115444075
  misc_feature: Bit score of 607.0 for HMM based on sequences of Figure 15
  misc_feature: Functional Homolog Of SEQ ID NO. 846
MKQSMRSRQEPRRVSNGVIIAAMLLSLCVLSIVKARYCSTPFVKPDDQLQEQMNSSIRMETDEPATMAAGEQEEDEEEESSGGGGAEPEVSATPAVVVTAAAGGGGGKRKPTCRMTSKRSERCEARGDIRVEGNASTIYIGGIDKEWKTKPYARYHDPVAMAVVREFTLKPVTESSPACTRNHSVPAFVFSNGGFSGNLYHDYTDVLVPLFLSTHQFKGQVQFLLSGLKPWWVNKFNLFFRQLTKYDILDIDNDKDVHCFPRIVVGATFHKDMGVDPKRSPGHVSVVDFKRALRRAFGLERVAASRGGATGNGKPRLLIISRKNSRRFLNEREMAQAAAAVGFEVRIAEPDQHTDMSTFAQLVNSADVMIGVHGAGLTNMVFLPRGAVLIQVVPFGGLEWLTTVTFKNPAKDMEVTYMDYNVQLEESSLIDQYPRNHQVLTDPYAVHKQGWDALKTAYLDKQNIKMDMDRFKKTLQEALDRLPPA

SEQ ID NO: 865 - DNA, 2060 bp, Triticum aestivum
  misc_feature: Ceres Clone ID no. 825530
  misc_feature: Encodes the peptide sequence at SEQ ID NO. 866
ctcacttatgagttgccgcagagcattccgattctttattaccaccctcgtttaatcatcggcgctcggcaagcagagcagctgaggtccatccagatccagccgcacgagaaagtttcaaagcatctctctctccctctctctctgtctcgagaagagtcttcctccttggggggaggcaggcggcagggaagaagcaaagcccagcaagcaagcaagcttccttgcttgctccagatctggtctaggtcggaggaggagcgggagggcgcgctggggtcggcgtcggagatgaaggcggcgctgcggagccggcaggagccgcggcgggtcagcaacggcgtcatcatcgccgccatgctcctctccctctgcgtcctcagcatcgtcaaggccagatactgctccacccccttcggcaagccggacgaccagctcaaggagcagatgaactccagcatccggatggagaccgacgacgagcccacgcccgccgccaccacggtcggagtgtcagaggaggacgcggaggaggatgtggaggaggacagcgccgccccggtgcccaaggtcaccgcggagagggcggagaagacagccgttttctccggcgccggcgcggggaggaaggataaggataaggggcacaacaagaagaagaagccgacctgcttcatgacgagcaagcgctccgagcggtgcgaggcggcgggggacatccgggtggtcggcaacgcctccaccatctacatcgactcgctggaccgggagtggcggaccaagccgtacgcgcggtaccacgaccccgtcgccatgacccacgtccgggagttcctcctcaggcccttcccggccgacgcgccgccgccggcctgcaccaagaaccactccgtccccgggtttgtgttttccaaccgcggcttctccggcaacctctaccacgactacacggacgtgctggtgccgctcttcctcagcacgcgcaggttcaacggcgaggtgcagttcctgctcagcgacctcaagccctggtgggtggccaagttccggccgctgttccggcagctgtccaagtacgaggtcgtcgacgtgaacaacgacctggaggtgcactgcctgccccgcatcgtcgtcggctccgacttccacaaggacatgggcatcgtcccgtccaaggccggcggcggcgtctccatcgtcgacttcaagcgcaccctccgcgacgccttcgggctggagcgcgccgcggcgtcccgcggcggcgccacgggcgccggcaagccgcgcctcctcatcatctcccgcaagaactcgcggcggttcctcaacgagcgggagatggcggccgccgccacggccatgggcttcgacgtgcgcatcgcggagcccgaccagcacaccgacatgtccaccttcgcgcggctggtgaactcggcggacgtgatggtgggcgtgcacggcgccgggctgaccaacatggtgttcctccccgcgggggccgtgctgatccaggtggtgccgttcgggggcctggagtggctcaccggcgtgaccttcaagaacccggcggcggacatggaggtgacgtacatggactacaacgtgcagctggaggagagctcgctgctggagcagtacccgcggaaccaccaggtgctgacggacccctacgccgtgcacaagcaggggtgggacgcgctcaaggccgcctacctggacaagcagaacgtgcggctggacctggacaagttcagggccacgctccgggacgcgctcagccggctgccgccggcgtcgacgccggcggcctgagcctcagcccgcccttctcggccgcgcccgtccccggtccggtagatgtagatccgtccgtgtatatctatctgctctgctccatgcctgcctcgttttgcttaacttgattcttgatttcttcttcttttcttcttcttcttcctcttgctcttcttctggtaagaccccattgacggcgagcaagaacttgtggtaacagaggatgtttggttcatatccttttgtgattatttgcttcttctacc

SEQ ID NO: 866 - protein, 506 aa, Triticum aestivum
  misc_feature (125)..(366): Pfam Name: DUF563 Pfam Description: Protein of unknown function (DUF563)
  misc_feature: Ceres Clone ID no. 825530
  misc_feature: Bit score of 623.7 for HMM based on sequences of Figure 15
  misc_feature: Functional Homolog Of SEQ ID NO. 846
MKAALRSRQEPRRVSNGVIIAAMLLSLCVLSIVKARYCSTPFGKPDDQLKEQMNSSIRMETDDEPTPAATTVGVSEEDAEEDVEEDSAAPVPKVTAERAEKTAVFSGAGAGRKDKDKGHNKKKKPTCFMTSKRSERCEAAGDIRVVGNASTIYIDSLDREWRTKPYARYHDPVAMTHVREFLLRPFPADAPPPACTKNHSVPGFVFSNRGFSGNLYHDYTDVLVPLFLSTRRFNGEVQFLLSDLKPWWVAKFRPLFRQLSKYEVVDVNNDLEVHCLPRIVVGSDFHKDMGIVPSKAGGGVSIVDFKRTLRDAFGLERAAASRGGATGAGKPRLLIISRKNSRRFLNEREMAAAATAMGFDVRIAEPDQHTDMSTFARLVNSADVMVGVHGAGLTNMVFLPAGAVLIQVVPFGGLEWLTGVTFKNPAADMEVTYMDYNVQLEESSLLEQYPRNHQVLTDPYAVHKQGWDALKAAYLDKQNVRLDLDKFRATLRDALSRLPPASTPAA

SEQ ID NO: 867 - DNA, 1500 bp, Sorghum bicolor
  misc_feature: Ceres Annot ID no. 8671335
  misc_feature: Encodes the peptide sequence at SEQ ID NO. 868
atgaagtcgtcgctgaggacccggcaggagccgcggcgggtcagcaacggcgtcatcatcggcgccatgctgctgtccctctgcgtcctcagcatcgtcaaggccagatactgcgccacccccttcggcaaggccgaggaccagctccaggagcagatgaactccagcatcaggatggagccggaggagtcgtcgccggccaggacgcccggagaggaggaggacgagcaggaagaggaagaagaagaaaacggggcatcggcgacccccgccaccaccacggcgcctgcggtgacgaagacgacgccgacggccgtcccggccaccgccggcaacaggggcaaggtgagcaagggcggcaagggcaagccgacgtgctacatgacgagcaagcggtcggagcggtgcgacgcgtcaggtgacatccgggtggacgggaaccgctccgccatctacgtcagcgggatagacaaggagtggaagaccaagccgtacgcgcgctaccacgaccccgtggccatggcccacgtccgcgagtacaccctcaagccgctcccggcggcggaggcgccggcgtgcaccaggaaccactccgtccctggcttcctcttctccaacggcggcttctccggcaacctgtaccacgactacaccgacgtgctggtgccgctgttcatcagcacccaccagttccgtggccgcgtgcagttcctgctcagcgggatgaagccgtggtgggtggccaagttcaccccgttcttccggcagctcaccaagtacgacgtcatcgacgtggacaacgaccaggaggtgcactgcttcccccggatcgtggccggcgccaccttccacaaggacatgggcgtcgacccacgccggtcgccgggccacgtctccgtggtggacttcaagcgcgcgctgcgccgcgcgttcggcctggagcgcgaggcggcgtcccgcggcggcgccacgggccacggcaagccacgcctcctcatcatctcccgccgtggctcccgccggttcctgaacgagcgtgagatggcgcgggccgccgccgacgccgggttcgaggtgcgtgtggcggagcccgaccagcacacggacatggccacgttcgcggcgctggtgaactcggcggacgtgatggtgggcgtgcacggcgccgggctcaccaacatggtgttcctgccccgcggcgccgtgctcatccaggtggtgccgttcggcgggctggagtggctcaccagcgtcaccttcaaggaccccgccgcggacatggaggtgaactacatggactacaacgtgaagctggaggagagctcgctgctggaccagtacccgaggaaccaccaggtgctcaccgacccctacgccgtgcacaagcagggctgggacgcgctcaagacggcgtacctggacaagcagaacatccggatggatcttgacaggttcagagccacgctgcgggaggcaatgagccggttgccgtctccgtga

SEQ ID NO: 868 - protein, 499 aa, Sorghum bicolor
  misc_feature (124)..(364): Pfam Name: DUF563 Pfam Description: Protein of unknown function (DUF563)
  misc_feature: Ceres Annot ID no. 8671335
  misc_feature: Bit score of 600.9 for HMM based on sequences of Figure 15
  misc_feature: Functional Homolog Of SEQ ID NO. 846
MKSSLRTRQEPRRVSNGVIIGAMLLSLCVLSIVKARYCATPFGKAEDQLQEQMNSSIRMEPEESSPARTPGEEEDEQEEEEEENGASATPATTTAPAVTKTTPTAVPATAGNRGKVSKGGKGKPTCYMTSKRSERCDASGDIRVDGNRSAIYVSGIDKEWKTKPYARYHDPVAMAHVREYTLKPLPAAEAPACTRNHSVPGFLFSNGGFSGNLYHDYTDVLVPLFISTHQFRGRVQFLLSGMKPWWVAKFTPFFRQLTKYDVIDVDNDQEVHCFPRIVAGATFHKDMGVDPRRSPGHVSVVDFKRALRRAFGLEREAASRGGATGHGKPRLLIISRRGSRRFLNEREMARAAADAGFEVRVAEPDQHTDMATFAALVNSADVMVGVHGAGLTNMVFLPRGAVLIQVVPFGGLEWLTSVTFKDPAADMEVNYMDYNVKLEESSLLDQYPRNHQVLTDPYAVHKQGWDALKTAYLDKQNIRMDLDRFRATLREAMSRLPSP

SEQ ID NO: 869 - DNA, 1616 bp, Panicum virgatum
  misc_feature: Ceres Clone ID no. 1795292
  misc_feature: Encodes the peptide sequence at SEQ ID NO. 870
gctagccgctgctgcttcgcgagctccggccagatccagagacccggcggccggcggcggcgatgaagcagccgaggggccggcaggagccgcgccggatgggcaacgccgccatggtcgtcaccatgctcgtctccctctgcgtcctcacctacatcaaggcgcgatactgctccaaccccttccccaagccggcggaggaggtggaggtggtggaggtggacgaggactacgacagcacgaggtacaagctggagggccccgtcggggaggaggacttcgaccccagccgcccgacctgctacaacacgagcaagcgctcggagcggtgcgcggcggtgggcgacatccgcgtcgacggcaaccactccaagatctacatcagcccgctggaccgcgagtggcgcaccaagccgtacgcgcgccggcacgaccccgtcgccatggacgacgtccgcgagtacacgctcgtgccattcggcggcgccaacgacaccgccgtgccgccgccctgcaccgtcaaccactccgtcccgggcttcctcttctccaacggcggcttcgcgggcaacctctaccacgactacaccgacgtcctcgtgccgctcttcaccagcacgcaccacctcggcggcgaggtccgcttcctgctcagcgggatgaaggactggtggaacgacaagttcacgccgctgttccggcagctgtcccggtacgacgtcatcgacgtcgacaacgaccgggaggtccactgcttcccgcggatcgtcaccggcgccaccttccaccggcccatgggcatcgacccctcgcgctcgccggggggcgtcaccgtcgccgacttcaagcgcctcctccgccgcgcgttccggctggagcgcgccgtagcgtcgcggtcgggggcgccgcgccgggaccggccgcgcctcctcatcatctcccgcaagagctcgcgccggttcttgaacgagcgcgccatggcgcacgcggcggcgcgggcgcgcttcgacgtgcgcatcgccgagccggacaaccacacggacatgcccaacttcgcgcggctggtgaactcggcggacgtgatgatgggggtgcacggcgccgggctcaccaacatggtgttcctgcccagccgcgccgtgctcatccaggtggtgcccttcggggggctcgagtggctcgccagggtcaccttcaaggacccggccagggacatggacgtcaactacatggagtacaacgtgtcgctggaggagagctcgctcagggacctctacccggaggaccatttctacctcaaccacccctacgacgtgcacaagaaggggtgggacgccatcaagacggtctacctcgacaagcagaacgtcaggctcaacctcaccaggttcaccaagacgctcgagcaggcgcgcgatctcctgcccgagccctgatcatagatcgatcctcatgctcatggatgccaatgccatgccttcagattggcccggcacctgccatgcaagtggtagataggctcgctcacaccatgtcttgaaacttgtttttgtttacttgttttctcctccttttttttctccttctcccctcttgtggcaagattcatttctttc

SEQ ID NO: 870 - protein, 457 aa, Panicum virgatum
  misc_feature (78)..(322): Pfam Name: DUF563 Pfam Description: Protein of unknown function (DUF563)
  misc_feature: Ceres Clone ID no. 1795292
  misc_feature: Bit score of 565.2 for HMM based on sequences of Figure 15
  misc_feature: Functional Homolog Of SEQ ID NO. 846
MKQPRGRQEPRRMGNAAMVVTMLVSLCVLTYIKARYCSNPFPKPAEEVEVVEVDEDYDSTRYKLEGPVGEEDFDPSRPTCYNTSKRSERCAAVGDIRVDGNHSKIYISPLDREWRTKPYARRHDPVAMDDVREYTLVPFGGANDTAVPPPCTVNHSVPGFLFSNGGFAGNLYHDYTDVLVPLFTSTHHLGGEVRFLLSGMKDWWNDKFTPLFRQLSRYDVIDVDNDREVHCFPRIVTGATFHRPMGIDPSRSPGGVTVADFKRLLRRAFRLERAVASRSGAPRRDRPRLLIISRKSSRRFLNERAMAHAAARARFDVRIAEPDNHTDMPNFARLVNSADVMMGVHGAGLTNMVFLPSRAVLIQVVPFGGLEWLARVTFKDPARDMDVNYMEYNVSLEESSLRDLYPEDHFYLNHPYDVHKKGWDAIKTVYLDKQNVRLNLTRFTKTLEQARDLLPEP

SEQ ID NO: 871 - protein, 510 aa, Oryza sativa subsp. japonica
  misc_feature (136)..(375): Pfam Name: DUF563 Pfam Description: Protein of unknown function (DUF563)
  misc_feature: Public GI ID no. 125580725
  misc_feature: Bit score of 586.6 for HMM based on sequences of Figure 15
  misc_feature: Functional Homolog Of SEQ ID NO. 846
MKQSMRSRQEPRRVSNGVIIAAMLLSLCVLSIVKARYCSTPFVKPDDQLQEQMNSSIRMETDEPATMAAGGSSSPSLALRIVCDWCSTSASLNLQSKRRTRRRRGSGGGGAEPEVSATPAVVVTAAAGGGGGKRKPTCRMTSKRSERCEARGDIRVEGNASTIYIGGIDKEWKTKPYARYHDPVAMAVVREFTLKPVTESSPACTRNHSVPAFVFSNGGFSGNLYHDYTDVLVPLFLSTHQFKGQVQFLLSGLKPWWVNKFNLFFRQLTKYDILDIDNDKDVHCFPRIVVGATFHKDMGVDPKRSPGHVSVVDFKRALRRAFGLERVAASRGGATGNGKPRLLIISRKNSRRFLNEREMAQAAAAVGFEVRIAEPDQHTDMSTFAQLVNSADVMIGVHGAGLTNMVFLPRGAVLIQVVPFGGLEWLTTVTFKNPAKDMEVTYMDYNVQLEESSLIDQYPRNHQVLTDPYAVHKQGWDALKTAYLDKQNIKMDMDRFKKTLQEALDRLPPA

SEQ ID NO: 872 - DNA, 1389 bp, Sorghum bicolor
  misc_feature: Ceres Annot ID no. 8744577
  misc_feature: Encodes the peptide sequence at SEQ ID NO. 873
atgaccatgaagcagccgaggggccggcaggagccgcgccggatgggcaacgccgccatggtcgtcaccatgctcgtctccctctgcgtcctcacctacatcaaggcgcgatactgctccaaccccttccccaagccggcggaggagctggaggtagtggaggtggacgaggactacgacagcacgcggtacaagctctcaggccccatcggcgaggaggacttcgacccgtcccgcccgacctgctacaacaccagcaagcgctccgagcggtgcgccgccgtgggcgacatccgcgtggacggcaaccactcgcggatctacatcagccctctgtcccgcgagtggaagaccaagccgtacgcgcgcctgcacgacccggtggccatggacgacgtccgcgagttcacgctcgtccccttcggtcccggctcccccaacggcaccgtcgtcccgccgctctgcacgcggaaccactccgtcccgggtttcctcttctccagcggcgggttcgcgggcaacctctaccacgactacgccgacgtgctggtgccgctcttcgcgtccacgcaccacttcggcggggaggtccagttcctgctcgccgacatcaaggactggtgggccgacaagttcaagcccctcttccgccagctctcccgctacgacgtcatcgacgtgaacaacgaccgcgaggtgcactgcttcccgcggatcgtcatcggctccaccttccaccgcgccatgggcatcgacgcgtcgcggtcccccggtggcgagacggtggccgacttcaagcgcgtgctccgccgcgcgttcaagctggaacgcgccgtggcgtcgcggtcgggggcgccccggcgcaaggaccggcccaggctcctcatcatctcccgcaagagctcgcgccggttcgtgaacgagcgcgccatggcgcgcgccgccgcggcggccaagttcgacgtgcggatcgccgagccggacaaccacacggacatgccaaacttcgcgcggctggtgaactcggcggacgtcatgatgggcgtgcacggcgccgggctcaccaacatggtgttcctgcccagccgcgccgtgctggtgcaggtggtgccgttcggcgggctggagtggctcaccagggtcaccttcaaggaccccgccagggacatggacgtcacctacatggagtacaacgtgtcgctggaggagagctcgctcagggacctctacccggaggaccatttctacctgaagcacccctacgacgtgcacaagaagggctgggacgccatcaagacggtgtacctggacaagcagaacgtcaggctcaacctcaccagattcacaaggacgctggagcaggcacgagatctcttgccgtcgccatga

SEQ ID NO: 873 - protein, 462 aa, Sorghum bicolor
  misc_feature (80)..(327): Pfam Name: DUF563 Pfam Description: Protein of unknown function (DUF563)
  misc_feature: Ceres Annot ID no. 8744577
  misc_feature: Bit score of 550.5 for HMM based on sequences of Figure 15
  misc_feature: Functional Homolog Of SEQ ID NO. 846
MTMKQPRGRQEPRRMGNAAMVVTMLVSLCVLTYIKARYCSNPFPKPAEELEVVEVDEDYDSTRYKLSGPIGEEDFDPSRPTCYNTSKRSERCAAVGDIRVDGNHSRIYISPLSREWKTKPYARLHDPVAMDDVREFTLVPFGPGSPNGTVVPPLCTRNHSVPGFLFSSGGFAGNLYHDYADVLVPLFASTHHFGGEVQFLLADIKDWWADKFKPLFRQLSRYDVIDVNNDREVHCFPRIVIGSTFHRAMGIDASRSPGGETVADFKRVLRRAFKLERAVASRSGAPRRKDRPRLLIISRKSSRRFVNERAMARAAAAAKFDVRIAEPDNHTDMPNFARLVNSADVMMGVHGAGLTNMVFLPSRAVLVQVVPFGGLEWLTRVTFKDPARDMDVTYMEYNVSLEESSLRDLYPEDHFYLKHPYDVHKKGWDAIKTVYLDKQNVRLNLTRFTRTLEQARDLLPSP

SEQ ID NO: 874 - protein, 460 aa, Oryza sativa subsp. japonica
  misc_feature (81)..(325): Pfam Name: DUF563 Pfam Description: Protein of unknown function (DUF563)
  misc_feature: Public GI ID no. 115469852
  misc_feature: Bit score of 556.6 for HMM based on sequences of Figure 15
  misc_feature: Functional Homolog Of SEQ ID NO. 846
MKHHHVARGRAEPRRMGNAAMVITMLLSLCVLTYIKARYCSTPFPKAAEEMEVVEIDEDYDSTRYKMTGPIGEEDFDPTRPTCYVTSKRSERCAAVGDIRVDGNHSKIYINPLDKEWRTKPYARLHDAVAMDDVREFTLVPFGGANHTAVPPLCTRNHSVPAFLFSSGGFAGNLYHDYTDVLVPLFTSTNHFGGEVQFLLSGIKDWWLDKFTPLFRQLSRYDVIDVDNDQEVHCFPRIFIGATFHRAMGIDPARSPGGVTVADFKRLLRRTFRLERAVASRTGAPRRDKPRLLIISRKSSRRFLNERAMAHAAALARFDVRIAEPDNHTDMPNFARLVNSADVMMGVHGAGLTNMVFLPSRAVLIQVVPFGGLEWLTRVTFKDPAKDMDVNYMEYNVSFDESSLRELYPRDHFYIQHPYDVHKKGWDAIKTVYLDKQNVELNLTKLTNTLERARDFLPEP

SEQ ID NO: 875 - DNA, 1972 bp, Triticum aestivum
  misc_feature: Ceres Clone ID no. 845464
  misc_feature: Encodes the peptide sequence at SEQ ID NO. 876
atcaacgcggcctcggaagctgccgtgctgtctccggcgaaatttatctgagtgggcgactgcatcagccgtccgtccccggccaatcggcggcgagggggcagcggccagtgggtcgttggcctggggcggtggtccagcatcacaggagctagtagccgctgccctgcccgccgtagtggttgccgtgccgggtccctcaggtcaggtagagccacacccaccacggccggcgcgcgcgcgacgcgagcccaccaaccaacctccgggcctgaacctcctccgcgcgctacatcgccatcgcctccaccaaccacgcctttaatacccttgcgccgcacagctcccccgcccgcgctgcgctgtcgctgctgtggcttccggtcgatccccggcccgccgtgccaagccatctccacctccaccaccggcgggcaggcgccatgaagcagccgaggtcgcggcaggagccgcgccggatgggcaactcggccatggtggtcaccatgctgctctccctctgcgtcctcaccttcatcaaggcccgctactgctccaccccgtaccccaacaagccggcgccgctgctggacctggaggtggagatcgacgaggactacgacagcagccggtacaagatctccggccccatcggggaggaggagttcgaccccagccgccccacctgctacaacaccagcaagcgctcggagcggtgcgcggccgtgggcgacgtccgggtcgacggcaaccactccaaaatctacatcagcccgctgggcaaggagtggcgcaccaagccgtacgcgcgccgccacgacgccgtcgccatggacgacgtccgcgagttcgcgctgttccccttcggcggcgccaacgacagcgccgtgccgccgctctgcaccaggaaccactccgtcccggccttcctcttctccagcggcgggttcgcgggcaacctgtaccacgactacaccgacgtgctggtgccgctcttcaccagcacccaccacttcggcggcgaggtgcagttcctgctcacagacatcaaggactggtggctggacaagttcacgccgctcttccgccagctctccaactacgacgtcatcgacgtggacaacgaccaggaggtgcactgcttctcgcgcatcgtcatcggctccaccttccaccggcccatgggcatcgacggcacgcgctcctcgggcggcgagaccgtggccgacttcaagcgcctgctccggcgcgccttccggctcgaccgcgtggtggcgtcccacgacggggccgccagcctcggcaagccgcggctcctcatcatctcccgcaagtcctcccggcggttcctgaacgagcgcgccatggcgcacgcggcggcggcggcgcagttcgacgtgcgcatcgcggagccggacaaccacacggacatgcccaacttcgcgcggctggtgaactcggcggacgtgatgatgggggtgcacggcgccgggctgaccaacatggtgttcctcccgagccgcgccgtgctgctgcaggtggtgccgttcggcgggctggagtggctgtcccgggtgaccttcaaggacccggccaaggacttcgacgtgacctacatggagtacaacgtgtcgctggaggagagctcgctcaaggacctctaccccaaggaccatttctacctgcagcacccctacgacgtgcacaagaagggctggaacgccatcaagaccacctacctcgacaagcagagcgtccggctcgacctcgccaagctcacgcgcacgctccagcacgcgcgcagcctcctgccctccccctcctcgcactgacactgagcccctgcttcaagttcggtttctccatgctagattaggccttcttcttcctcctcatcctctctctccctcccatgtttggttcacttcttgatttgttgttgtggtggtgccaaagattcatttctttcttt

SEQ ID NO: 876 - protein, 462 aa, Triticum aestivum
  misc_feature (80)..(324): Pfam Name: DUF563 Pfam Description: Protein of unknown function (DUF563)
  misc_feature: Ceres Clone ID no. 845464
  misc_feature: Bit score of 534 for HMM based on sequences of Figure 15
  misc_feature: Functional Homolog Of SEQ ID NO. 846
MKQPRSRQEPRRMGNSAMVVTMLLSLCVLTFIKARYCSTPYPNKPAPLLDLEVEIDEDYDSSRYKISGPIGEEEFDPSRPTCYNTSKRSERCAAVGDVRVDGNHSKIYISPLGKEWRTKPYARRHDAVAMDDVREFALFPFGGANDSAVPPLCTRNHSVPAFLFSSGGFAGNLYHDYTDVLVPLFTSTHHFGGEVQFLLTDIKDWWLDKFTPLFRQLSNYDVIDVDNDQEVHCFSRIVIGSTFHRPMGIDGTRSSGGETVADFKRLLRRAFRLDRVVASHDGAASLGKPRLLIISRKSSRRFLNERAMAHAAAAAQFDVRIAEPDNHTDMPNFARLVNSADVMMGVHGAGLTNMVFLPSRAVLLQVVPFGGLEWLSRVTFKDPAKDFDVTYMEYNVSLEESSLKDLYPKDHFYLQHPYDVHKKGWNAIKTTYLDKQSVRLDLAKLTRTLQHARSLLPSPSSH

SEQ ID NO: 877 - DNA, 667 bp, Panicum virgatum
  misc_feature: Ceres Clone ID no. 1767521
  misc_feature: Encodes the peptide sequence at SEQ ID NO. 878
ctgaatccagcaagccacaagaggcagctgctgcttctgcttgcctgcctggctgcatctgcaggctagcatcgatcgcacaccagagtgctcgatcagccaaccaatcaatccagcagccatccggcgtcagcctccgcgccgactggccggatccttctcagcggcggcacgccatgaccaagcaaaagatcgtgatcagggtgaacctggcgagcgagaagacccggtccaaggccatggcgctggtcgccagagcggacggggtgagctcgatgggggttaccggcgacggcagggaccagctggaggtggtcggcgacggcgtcgacaccgtcggcctcgtccagtgcctgcgcaagaagatcgggcacgccgagatcctcaaggtggaggaagtgaagccggcggagaagaagcccgaggagaagaagccggagccgctgccggactggtggtggtaccacaattactaccactaccacccgccgccgccgtgctggtgaggtggccccggtggtcgccagccagccatggaagcggcggccgtttttgatgtattactagttgggaattggaattcaactcgtgctcgccttatatttgtattcgagctgttctgtatttgggtgaaaacaaaaaaaaggcaaaagacggttacttgtcc

SEQ ID NO: 878 - protein, 109 aa, Panicum virgatum
  misc_feature: Ceres Clone ID no. 1767521
  misc_feature: Bit score of 288.6 for HMM based on sequences of Figure 19
  misc_feature: Functional Homolog Of SEQ ID NO. 878
  misc_feature: in Figure 19
MTKQKIVIRVNLASEKTRSKAMALVARADGVSSMGVTGDGRDQLEVVGDGVDTVGLVQCLRKKIGHAEILKVEEVKPAEKKPEEKKPEPLPDWWWYHNYYHYHPPPPCW

SEQ ID NO: 879 - DNA, 324 bp, Sorghum bicolor
  misc_feature: Ceres Annot ID no. 8701398
  misc_feature: Encodes the peptide sequence at SEQ ID NO. 880
atgaagcaaaagatcgtgatcaggctgagcgtggcgagcgacaagtgccggtccaaggccatggtgctggcggccaaagcagacggggtgagcaagatggggatcaccggcgacggaaaggaccagctggaggtggagggcgacggcatcgacaccgtctgcctcgtcaactgcctgcgcaagaagatcggccgcgccgacatcgtcaaggtggaggtggtgaagcccgaggagaagaaaccggaggagaagaagcccgaggtcgtgccgctgccgtacggctggtgctaccccaattactaccagtaccacccgcactggtag

SEQ ID NO: 880 - protein, 107 aa, Sorghum bicolor
  misc_feature: Ceres Annot ID no. 8701398
  misc_feature: Bit score of 265.3 for HMM based on sequences of Figure 19
  misc_feature: Functional Homolog Of SEQ ID NO. 878
  misc_feature: in Figure 19
MKQKIVIRLSVASDKCRSKAMVLAAKADGVSKMGITGDGKDQLEVEGDGIDTVCLVNCLRKKIGRADIVKVEVVKPEEKKPEEKKPEVVPLPYGWCYPNYYQYHPHW

SEQ ID NO: 881 - DNA, 626 bp, Panicum virgatum
  misc_feature: Ceres Clone ID no. 2030878
  misc_feature: Encodes the peptide sequence at SEQ ID NO. 882
caaagaaaacatcgatcggagtaagcaagccaagccacccgatcagcctcgctctaccgatccaatttgtttccccagctcctctttttcgcctcaggaggtagcggacgccagaaaccagcagctagttagcacgctgcgatgaagcaaaagatcgtgatcaaggtgagcatggcgtccgagaagagccggtccagggccatggagctcgtcgctagagcagacggggtgagctcgatgggggtcaccggcgccggcagggaccagctggaggtggtcggcgacttcgtcgacaccgtctgcctggtcaagtgcctgcgcaggaagctcggccaggccgacatcctcaaggtggaggaggtgaaggacaagaagcccgaggagaagaagccggaggagcccaagattatcgcggacccgccgccgtactattaccccggttactactaccaccagcacatgccagcaccgtggtggtgacgatagaaacgcgaaggaaacagctagtttttgtatttatttgattcaaattcgttccacactcgtttttgctactgttctgtgtgaggggaaagttataagaaacagtattgctattgtgcatccgtttgaaattttggttcttt

SEQ ID NO: 882 - protein, 112 aa, Panicum virgatum
  misc_feature: Ceres Clone ID no. 2030878
  misc_feature: Bit score of 266.9 for HMM based on sequences of Figure 19
  misc_feature: Functional Homolog Of SEQ ID NO. 878
  misc_feature: in Figure 19
MKQKIVIKVSMASEKSRSRAMELVARADGVSSMGVTGAGRDQLEVVGDFVDTVCLVKCLRRKLGQADILKVEEVKDKKPEEKKPEEPKIIADPPPYYYPGYYYHQHMPAPWW

SEQ ID NO: 883 - protein, 119 aa, Oryza sativa subsp. japonica
  misc_feature: Public GI ID no. 21741986
  misc_feature: Bit score of 298.1 for HMM based on sequences of Figure 19
  misc_feature: Functional Homolog Of SEQ ID NO. 878
  misc_feature: in Figure 19
MTKQKIVIKVSMPCEKSRSKAMALVARASGVNSMEVTGDGKDRLQVVGDGVDPVCLVACLRRKIGYAEIVQVEEVKDKKPEEKQPEPPKPVPCYYPAPPCYYPPATVVCSDEPSPCSIM

SEQ ID NO: 884 - DNA, 699 bp, Zea mays
  misc_feature: Ceres Clone ID no. 488555
  misc_feature: Encodes the peptide sequence at SEQ ID NO. 885
aaagtcccaccacagcaaagcaactgcttgcagcctccgcacaacaaaaaaccccacgggtagtctcggatctccacgccaccaaaacattcgaagcttcttcgatctcttgcgcggcgttctggaatctgaaccttcaatcttggagagcggcgcgtccccaaagaattagatcagccatggccaagcaaaagatcgtgatcaaggtgccgatggcgagcgacaagtcccggtccaaggcaatggcgctggtggcagccgcgggcggggtcaactccgtggccatcgccggcgacggcaaggaccaggtggtcgtcgttggcgagggcgtcgactccatcaagctcaccaccatcctgcgcaagaagatgggcgacgcgcagctcgtcgaggtcgccgaggacaagaagaaggaggagaagaagcccgaccccgtcgccgaagctgcggcggcgtactacaaccagtactactaccactacccaccgccggscgccgtcgtttacgacccctacccacggccgggcaacacctgctccataatgtagactcagcctgtggacatatgcaagttaagttttgtgtgtagcggtgcgtgtgtgggggaggcgcgcaagtgtagtttctatacggaattcttctcttatctcccttttgaggttaagggcatgtgcagtcccagttaatatatggtcattc

SEQ ID NO: 885 - protein, 122 aa, Zea mays
  misc_feature: Ceres Clone ID no. 488555
  misc_feature: Bit score of 290.7 for HMM based on sequences of Figure 19
  misc_feature: Functional Homolog Of SEQ ID NO. 878
  misc_feature: in Figure 19
  misc_feature (105)..(105): Xaa is any aa, unknown, or other
MAKQKIVIKVPMASDKSRSKAMALVAAAGGVNSVAIAGDGKDQVVVVGEGVDSIKLTTILRKKMGDAQLVEVAEDKKKEEKKPDPVAEAAAAYYNQYYYHYPPPXAVVYDPYPRPGNTCSIM

SEQ ID NO: 886 - DNA, 366 bp, Populus balsamifera subsp. trichocarpa
  misc_feature: Ceres Annot ID no. 1472210
  misc_feature: Encodes the peptide sequence at SEQ ID NO. 887
atgaagcaaaagatagtgatcaaggtgacggtgaatggaccgaagtcccgctccaaatccttgcagattgcagttgggttttcaggtgttgaatctgctggtttaggagggcaagataagagccagatagaggtggtaggcgatggagttgatgcagtagaacttacaaatcgtctgagaaagaaagtaggctacgcagagatagtaagtgtagcagctgtgggagaaaagaaagaagagaagaaaccggaggcagtagtgcagcctgttctttggtccatgtatggtggaggcgtgcctcagacctatatccatccgattcacccccccaactattatcaggacccttcgtgctccatcatgtaa

SEQ ID NO: 887 - protein, 121 aa, Populus balsamifera subsp. trichocarpa
  misc_feature: Ceres Annot ID no. 1472210
  misc_feature: Bit score of 290.6 for HMM based on sequences of Figure 19
  misc_feature: Functional Homolog Of SEQ ID NO. 878
  misc_feature: in Figure 19
MKQKIVIKVTVNGPKSRSKSLQIAVGFSGVESAGLGGQDKSQIEVVGDGVDAVELTNRLRKKVGYAEIVSVAAVGEKKEEKKPEAVVQPVLWSMYGGGVPQTYIHPIHPPNYYQDPSCSIM

SEQ ID NO: 888 - DNA, 658 bp, Panicum virgatum
  misc_feature: Ceres Clone ID no. 1778664
  misc_feature: Encodes the peptide sequence at SEQ ID NO. 889
aagcagcgatcgcacaccagaccagagtgctcagcgatccaaccaatccgacagccatcagcggcgtcagccaagcctccgcgccgaccggatccttctcagcgggcggcacgccatgaccaagcaaaagatcgtgatcagggtgagcctggcgagcgagaagacccggtccaaggccatggcgctggtcgccaaagcggacggggtgagctcgatgggggtcaccggcgacggcagggaccagctggaggtggtcggcgacggcgtcgacaccgtctgcctggtccagtgcctgcgcaagaagatcggccacgccgagatcctcaaggtggaggaggtgaagccggccgacaagaaacccgaggagaagaagcccgacgacaagaagccggagccgctgccgtactggtggtaccacaattactaccactaccacccgcagccgccgtgctggtgaggtggccctggtggtcgccactcgccaggcagccgttcatggaagcggcggccgtttttgatggattactagttgggaattggaattctgctcatgctcgccttatatgtgtattcgagctgctctgtatttgagtgaaaacagaaaaaaaaggcaaaaggctgctacttgtccatatttgatctgttttcagtttcaccc

SEQ ID NO: 889 - protein, 113 aa, Panicum virgatum
  misc_feature: Ceres Clone ID no. 1778664
  misc_feature: Bit score of 268.3 for HMM based on sequences of Figure 19
  misc_feature: Functional Homolog Of SEQ ID NO. 878
MTKQKIVIRVSLASEKTRSKAMALVAKADGVSSMGVTGDGRDQLEVVGDGVDTVCLVQCLRKKIGHAEILKVEEVKPADKKPEEKKPDDKKPEPLPYWWYHNYYHYHPQPPCW

SEQ ID NO: 890 - protein, 122 aa, Oryza sativa subsp. japonica
  misc_feature: Public GI ID no. 115458882
  misc_feature: Bit score of 238.4 for HMM based on sequences of Figure 19
  misc_feature: Functional Homolog Of SEQ ID NO. 878
MKQKIVIKVSMPCEKSRSKAMKLVVMASGVSSVEVTGDGKDRLQVVGDGVDAACLVTCLRKKIGHAELVQVEEVKEKKPEEKKPEEKKPEPCYCPHPCYYHHHYGGIPVAVGDQPSDPCSIM

SEQ ID NO: 891 - DNA, 336 bp, Sorghum bicolor
  misc_feature: Ceres Annot ID no. 8701404
  misc_feature: Encodes the peptide sequence at SEQ ID NO. 892
atgaagcaaaagatcgtgatcaaggtcagcatgtcgtcagagaagagccggtccaaggccatggcacttgtcgccagagccgacggggtcagctcgatggggatcgtcggcgacggcaaggaccggctggaggtggtcggcgtggacgtcgacaccgtctgcctggtcacgtgcctgcgcaagaagctcggccacgctgacatcctgctggtggatgaagtcaaggacaagaaggcggaggagaagaagcagccggagaaacccaaggtcgtggaactgccgccgtattactgcccctgttattacggttactactgccactaccaccaccactga

SEQ ID NO: 892 - protein, 111 aa, Sorghum bicolor
  misc_feature: Ceres Annot ID no. 8701404
  misc_feature: Bit score of 193.4 for HMM based on sequences of Figure 19
  misc_feature: Functional Homolog Of SEQ ID NO. 878
MKQKIVIKVSMSSEKSRSKAMALVARADGVSSMGIVGDGKDRLEVVGVDVDTVCLVTCLRKKLGHADILLVDEVKDKKAEEKKQPEKPKVVELPPYYCPCYYGYYCHYHHH

SEQ ID NO: 893 - protein, 118 aa, Oryza sativa subsp. japonica
  misc_feature: Public GI ID no. 115458830
  misc_feature: Bit score of 289.7 for HMM based on sequences of Figure 19
  misc_feature: Functional Homolog Of SEQ ID NO. 878
MQQKIVIKVSMPCEKSRSKAMALVARASGVNSMEVTGDGKDRLQVVGDGVDPVCLVACLRRKIGYAEIVQVEEVKDKKPEEKQPEPPKPVPCYYPAPPCYYPPATVVCSDEPSPCSIM

SEQ ID NO: 894 - DNA, 465 bp, Sorghum bicolor
  misc_feature: Ceres Annot ID no. 8701387
  misc_feature: Encodes the peptide sequence at SEQ ID NO. 895
atggccgaactgcatgctcgctccactgcaggtccgagtgtcaagttttggatctccagtgacccgtaccaccactcaaagctgcaaaagatggtgatcaaggtgagcatgccgtgcgagaggagccggtccaaagccatgacgcttgccgccagagcagatggggtgatatcgatggcgatcaccggcgacgcgagggagaagctggaggtggtcggcgacggcgtcgacccggtcaggctggtcagctgcctgcgcaggaaggtcggccacgccgagatcctgcaggtggaggaagtgaaggacaagaagcccgaggagaagaagaagccggaggagcccaagccgccgcagcccgtggccgtgcacccgccgccgcattgctatcccggaggctaccactactaccgccacccgccgccgatggtcgtctgcgaggagccgagcggttgccccatcatgtaa

SEQ ID NO: 895 - protein, 154 aa, Sorghum bicolor
  misc_feature: Ceres Annot ID no. 8701387
  misc_feature: Bit score of 211.0 for HMM based on sequences of Figure 19
  misc_feature: Functional Homolog Of SEQ ID NO. 878
MAELHARSTAGPSVKFWISSDPYHHSKLQKMVIKVSMPCERSRSKAMTLAARADGVISMAITGDAREKLEVVGDGVDPVRLVSCLRRKVGHAEILQVEEVKDKKPEEKKKPEEPKPPQPVAVHPPPHCYPGGYHYYRHPPPMVVCEEPSGCPIM

SEQ ID NO: 896 - protein, 132 aa, Oryza sativa subsp. indica
  misc_feature: Public GI ID no. 116310418
  misc_feature: Bit score of 230.3 for HMM based on sequences of Figure 19
  misc_feature: Functional Homolog Of SEQ ID NO. 878
MKQKMVIKVSMPCGKCRSKAMALVAGATGVSSVEVTGDGKDRLQVVGDGVDPVCVVNRLRKKIGHAEIVQVEEVKEKKPDLPKKPDPPKPEPPKPPVVCYPPTPYYHHHYGGPPPPVVFCDQPSPNGTCSIM

SEQ ID NO: 897 - protein, 117 aa, Oryza sativa subsp. japonica
  misc_feature: Public GI ID no. 46806258
  misc_feature: Bit score of 200.4 for HMM based on sequences of Figure 19
  misc_feature: Functional Homolog Of SEQ ID NO. 878
MAKQKIVIKVNMASDKCRSKAMALVASTSGVDSVALAGDGKDQVVVVGDGVDSIKLTTALRKKVGHATLMTVGEVKKEEKKPEHAVVEYPWSYHPYTFAPPAQHVVYQYPASSWSIF

SEQ ID NO: 898 - DNA, 384 bp, Sorghum bicolor
  misc_feature: Ceres Annot ID no. 8679943
  misc_feature: Encodes the peptide sequence at SEQ ID NO. 899
atggccaagcaaaagatcgtgatcaaggtgccgatgtcgagcgacaagtcgcggtccaaggccatggcgctggtggcggcggcgggcggggtacactcggtggccatcgccggcgacggcaaggaccaggtcgtcgtcgtcggcgagggcgtcgactccatcaagctcaccaccgacctgcgcaagaagatgggcgacgcgcagctcgtcgaggtcggagaggacaagaagaaggaggagaagacgaagcccgaccccgtcgccgacgctgtggcagcctactacaacagccagtactactaccactacccgccgccgccgccggcggtcgccgtcgcctacgacccctactcgcggccgggcagcacctgctccataatgtag

SEQ ID NO: 899 - protein, 127 aa, Sorghum bicolor
  misc_feature: Ceres Annot ID no. 8679943
  misc_feature: Bit score of 245.3 for HMM based on sequences of Figure 19
  misc_feature: Functional Homolog Of SEQ ID NO. 878
MAKQKIVIKVPMSSDKSRSKAMALVAAAGGVHSVAIAGDGKDQVVVVGEGVDSIKLTTDLRKKMGDAQLVEVGEDKKKEEKTKPDPVADAVAAYYNSQYYYHYPPPPPAVAVAYDPYSRPGSTCSIM

SEQ ID NO: 900 - DNA, 402 bp, Sorghum bicolor
  misc_feature: Ceres Annot ID no. 8701391
  misc_feature: Encodes the peptide sequence at SEQ ID NO. 901
atgaagcaaaagacggtgatcaaggtgagcatgccgtgcgataggagccggtccaaagccctgacgctggccgcccgagcagacggggtaatctccgtggagatcaccggcggcgacaaggacaagctggaggtggtcggcgacggcgtcgacacggtctgcttggtcagctgcctgcgcaggaagctcggccacgccgacatcctgcaggtggaggaagtgaagcccgatgacccgacgaacaaggagtcgccggacgggccgacgccgccgcccgagccagtaccgccgccgccgcatccagactacacctacacggattgctgctgctgctgccaccaccaccacccgccaccgccaatggtcatctgcgaggaaccaagcaattgcgccgtcatgtaa

SEQ ID NO: 901 - protein, 133 aa, Sorghum bicolor
  misc_feature: Ceres Annot ID no. 8701391
  misc_feature: Bit score of 187.3 for HMM based on sequences of Figure 19
  misc_feature: Functional Homolog Of SEQ ID NO. 878
MKQKTVIKVSMPCDRSRSKALTLAARADGVISVEITGGDKDKLEVVGDGVDTVCLVSCLRRKLGHADILQVEEVKPDDPTNKESPDGPTPPPEPVPPPPHPDYTYTDCCCCCHHHHPPPPMVICEEPSNCAVM

SEQ ID NO: 902 - protein, 119 aa, Oryza sativa subsp. japonica
  misc_feature: Public GI ID no. 46806257
  misc_feature: Bit score of 201.1 for HMM based on sequences of Figure 19
  misc_feature: Functional Homolog Of SEQ ID NO. 878
MAKQKIVIKMNMASDKCRSKAMALVASTTGVDSVALAGDGKDQLVVVGDGVDSIELTTALRKKVGHATLMTVGEDKKEEKKPEPAVVEYPYPWNCYPYGYAPPPQHVVYQYPASSSWWW

SEQ ID NO: 903 - protein, 118 aa, Oryza sativa subsp. indica
  misc_feature: Public GI ID no. 125540058
  misc_feature: Bit score of 193.3 for HMM based on sequences of Figure 19
  misc_feature: Functional Homolog Of SEQ ID NO. 878
MAKQKIVIKVNMASDKCRSKAMALVASTSGVDSVALAGDSKDQVVVVGDGVDSIKLTTALRKKVGHATLMTVGEVKKEEKKPEPAAVVEYPWSYHPYTFAPPAQHVVYQYPASSWSIF

SEQ ID NO: 904 - DNA, 628 bp, Triticum aestivum
  misc_feature: Ceres Clone ID no. 1018979
  misc_feature: Encodes the peptide sequence at SEQ ID NO. 905
acaaaaccatcacaagctagtactasacaccgagacagcccttggaagatcgatcagtagctaccaaaaccaatttcgattttagcctcgcttgaacgcggacattttccgagtttctatttctcattgatagggagcatcygccaaaccagcagcacgcaaaatgaagcaaagattgtcatccaattgagcatgtcgtgcgacaaacgccggtcgaaagcactgacgctggcctccagagcagccggggtgacgtcgatgggcataaccggcgacgccagggaccagctggaggtggtcggtgacggcgtcgacccggtgtgcctcgtcagctgcctccgcaagaaactcggccacgcccacatcatcaaggtagaggaagtgaagaagccggaggagaagaagaagccggtgaaccccccgcagtactactactcgccggcgccggccggctactaccaccaccaatacccgccgcacatggtcgtctgcgaggaacagcctagcaactgccggaccatgtaactgccagagaacgattttgacgtagtactttaattttgtcagcaactatagttgcatacatgtacttgtaaattaattggaggaagaaataaaaaggagaaag

SEQ ID NO: 905 - protein, 110 aa, Triticum aestivum
  misc_feature: Ceres Clone ID no. 1018979
  misc_feature: Bit score of 172.1 for HMM based on sequences of Figure 19
  misc_feature: Functional Homolog Of SEQ ID NO. 878
MSCDKRRSKALTLASRAAGVTSMGITGDARDQLEVVGDGVDPVCLVSCLRKKLGHAHIIKVEEVKKPEEKKKPVNPPQYYYSPAPAGYYHHQYPPHMVVCEEQPSNCRTM

SEQ ID NO: 906 - DNA, 959 bp, Panicum virgatum
  misc_feature: Ceres Clone ID no. 1725423
  misc_feature: Encodes the peptide sequence at SEQ ID NO. 907
agctagtagccagctccttctcaagttacacgaagactcggtgtagtatcgtaggcagagttataagtcaaacagtgctcgatcagttatttcctcagcttctgatcagtatagtcgtcgttcgtgaaccaaatattttgaagcggttcggtagtcagcgatggcaaagcagaagatcgtgatcaagatgaccatgcccaccgccaagagccgtgctcgggccatggcgctggccgccagggcgagcggggtggggtcgatagggatcaccggcgacctcaaggatcggctggaggtggtcggcgagggcatcgacatcacctgcctcgtccactgcctgcgcaagaaggtctgctgccacgccgagatcctgcaggtggaggaggtcaaggacaagaagcccgagaagaagaagcccgaggaggagaagaagccctgcccgtgcccagggccgtgccggtgcgccgccgtcggctactgccacgcgccgatgccgatggttctctgcgaggacccgccggagggcatctgccgcgtcatgtgaagctagcagtaagatgatggatctcgccatgcatttgtatttgtgatttgacttctcaactcgatcttgctgccacaacacacagcttcttcatacgtgtgtgtcagtgtgtgtgtgtgtgtgtgtgtgtgtgtgtgtgtgtgtgtgtgtgtgtgtgtgtgtgtgtgtgtgtgtgtgtgtgtgtgtgtgtgtgtgtgtgtgtgtgtgtgtgtgtgtgtgtgtgtgtgtgtgtgtgtgtgcaaacgaggttctggtttcctttcgctaagcttccgccaaccatgcatcgacagtgtaactagctagatcactacaagctagcgtgtatgttatatgtgtgcatgtacttgttgagttggtcacgttgtatccatccagttgtgaacttgatgcaaagattgttattatatttaat

SEQ ID NO: 907 - protein, 127 aa, Panicum virgatum
  misc_feature: Ceres Clone ID no. 1725423
  misc_feature: Bit score of 174.3 for HMM based on sequences of Figure 19
  misc_feature: Functional Homolog Of SEQ ID NO. 878
MAKQKIVIKMTMPTAKSRARAMALAARASGVGSIGITGDLKDRLEVVGEGIDITCLVHCLRKKVCCHAEILQVEEVKDKKPEKKKPEEEKKPCPCPGPCRCAAVGYCHAPMPMVLCEDPPEGICRVM

SEQ ID NO: 908 - protein, 121 aa, Oryza sativa subsp. japonica
  misc_feature: Public GI ID no. 115446965
  misc_feature: Bit score of 210.5 for HMM based on sequences of Figure 19
  misc_feature: Functional Homolog Of SEQ ID NO. 878
MAKQKIVIKVEMSCDKCRSKAMALVAATGGVDSVALAGDGKDQVVVVGDGVDSIKLTAALRKKVGHATLVTVGEVKKEEKKPEPAAAAVEYPWSYHPAYTYAPPAQHVFYQQYPASSPWWC

SEQ ID NO: 909 - protein, 121 aa, Oryza sativa subsp. indica
  misc_feature: Public GI ID no. 125540059
  misc_feature: Bit score of 207.4 for HMM based on sequences of Figure 19
  misc_feature: Functional Homolog Of SEQ ID NO. 878
MAKQKIVIKVEMSCDKCRSKAMALVAATGGVDSVALAGDGKDQVVVVGDGVDSIKLTAALRKKVGHATLVTVGEVKKEEKKPEPATAAVVEYSWSYHPYAYAPPAQHVVYQQYPASSPWWC

SEQ ID NO: 910 - protein, 150 aa, Oryza sativa subsp. japonica
  misc_feature: Public GI ID no. 115458886
  misc_feature: Bit score of 174.1 for HMM based on sequences of Figure 19
  misc_feature: Functional Homolog Of SEQ ID NO. 878
MKQKMVIKVSMPCGKCRSKAMALVAGATGVSSVEVTGDGKDRLQVVGDGVDPVCVVNRLRKKIGHAEIVQVEEVKEKKPDLPKKPDPPKPEPPKPPVRRGFPGPHEPEKIHRASLLLSGQEAGRLQQLQLWLRIVSAALFMSAVAQLRRQ

SEQ ID NO: 911 - DNA, 767 bp, Panicum virgatum
  misc_feature: Ceres Clone ID no. 1955791
  misc_feature: Encodes the peptide sequence at SEQ ID NO. 912
accacagcaaagcgagcagttgcgagacacgggcctctcctctccactccggctctatctccataccaacgatctctcgacagccgcgaggcgtttgagctttcctttccaatccaagcttggagcaccgcgcgggcacgagagttcaggcatggcgaagcaaaagatcgtgatcaaggtgcagatggcgagcgaccggtgccggtcccgggcgatggcgctggtggcggccacgggcggggtggactccgtggcgctcgccggcgacggcaaggaccaggtcgtcgtggtgggcgagggcgtcgactccatcaagctcaccaccgcgctgcgcaagaagttgggcggcgcggagctgctgcaggtcggcgaggacaaggaggaggagaagaagccggcgccggcccccgcccccgccgcggtggctgcggcggccgagtactactcccagttgtactaccaccactacccgccgccgcacctggccggcgccgtccacgaccaccgcgccgtcgggtacgggggctactcgcgggcggacacctgctccataatgtaaacagaggggtttggattgccgttcaaagtttgtgttgtagttcaggatgcaagtttcattgggtcaacccaactacccattatccaatttaccaaaaaatagtgtaattaccttatagagtcaacccactaaattttggtgctagtttgggtttaccctgtgggtaattgggtaacccaaaatttatcgaatcttttgttgagggtcc

SEQ ID NO: 912 - protein, 135 aa, Panicum virgatum
  misc_feature: Ceres Clone ID no. 1955791
  misc_feature: Bit score of 192.1 for HMM based on sequences of Figure 19
  misc_feature: Functional Homolog Of SEQ ID NO. 878
MAKQKIVIKVQMASDRCRSRAMALVAATGGVDSVALAGDGKDQVVVVGEGVDSIKLTTALRKKLGGAELLQVGEDKEEEKKPAPAPAPAAVAAAAEYYSQLYYHHYPPPHLAGAVHDHRAVGYGGYSRADTCSIM

SEQ ID NO: 913 - DNA, 579 bp, Panicum virgatum
  misc_feature: Ceres Clone ID no. 2032166
  misc_feature: Encodes the peptide sequence at SEQ ID NO. 914
acaccacagcagagcaagcagttgcgagacacgggcctctcctctcctctccactccggctctatccccataccaacgatctcgactctcgagttctcgacagccgcgcggccccgagagttcaggcatggcgaagcaaaagatcgtgatcaaggtgcagatggcgagcgaccggtgccgggcccgggcgatggcgctggtggcggccacgggcggggtggactccgtggtgctcgccggcgacggcaaggaccaggtcgtcgtcgtcggggagggcgtcgactccatcaagctcaccagcgcgctgcgcaagaaggtgggcggcgcggagctgctgcaggtcggcgaggacaagaaggaggagaagaagccggcgccggtgccggaccccgccgccgccgccgcggcagcggccgagtactacagccagctgtactaccaccactacccgccgccgcacccggccggcgccgtctacgaccaccgcgccgccgggtacggctactactcgcgggcggacacctgctccataatgtaatcggatgggcttgggattgccggtgaagtttgtgttctagt

SEQ ID NO: 914 - protein, 136 aa, Panicum virgatum
  misc_feature: Ceres Clone ID no. 2032166
  misc_feature: Bit score of 190.2 for HMM based on sequences of Figure 19
  misc_feature: Functional Homolog Of SEQ ID NO. 878
MAKQKIVIKVQMASDRCRARAMALVAATGGVDSVVLAGDGKDQVVVVGEGVDSIKLTSALRKKVGGAELLQVGEDKKEEKKPAPVPDPAAAAAAAAEYYSQLYYHHYPPPHPAGAVYDHRAAGYGYYSRADTCSIM

SEQ ID NO: 915 - protein, 109 aa, Oryza sativa subsp. indica
  misc_feature: Public GI ID no. 125540060
  misc_feature: Bit score of 151.9 for HMM based on sequences of Figure 19
  misc_feature: Functional Homolog Of SEQ ID NO. 878
MAQKIVIKVHMGSDKCRRKAMALVAATGGVVSVELAGDDRSKVVVVGEVDSVKLTSLLRRKVGPAELVEVGDAKPAKKEEKKEEKKPETVPPYYYYYPYHHYSPYGYIM

SEQ ID NO: 916 - protein, 109 aa, Oryza sativa subsp. japonica
  misc_feature: Public GI ID no. 46806261
  misc_feature: Bit score of 150.1 for HMM based on sequences of Figure 19
  misc_feature: Functional Homolog Of SEQ ID NO. 878
MAQKIVIKVHMGSDKCRRKAMSLVAATGGVVSVELAGDDRSKVVVVGEVDSVKLTSLLRRKVGPAELVEVGDAKPAKKEEKKEEKKPETVPPYYYYYPYHHYSPYGYIM

SEQ ID NO: 917 - protein, 131 aa, Oryza sativa subsp. japonica
  misc_feature: Public GI ID no. 115458884
  misc_feature: Bit score of 192.8 for HMM based on sequences of Figure 19
  misc_feature: Functional Homolog Of SEQ ID NO. 878
MKQKIVIKACMPCDGCRVKALGVAAKADGVISMAITGDDRDRLEVVGDGVDVTCLVTCLRKKVRFADVLQVEEVKDKKPEEEKKKPEEEKKPPECPCQATLPVPWCPPPPCYYPPPSMVYCEEQPSPCSIM

SEQ ID NO: 918 - DNA, 526 bp, Panicum virgatum
  misc_feature: Ceres Clone ID no. 100178733
  misc_feature: Encodes the peptide sequence at SEQ ID NO. 919
gaggtggccaaactcgagtctacacaatgaaaaagattgtaatcaagattagtatgatcagcgatcggagcagagctaaggctatggagttactcgccaaggctaacggagtgtcatcgattgggatagttggggacgggagggacaggctggaggtggtcggcgacggcatggacgccttctgccttgtaaaatgcctgcgcaaggagctgggccacgcggaactcctgatgatgggggatgtcaaggacaaagaggcacggccggagccggtggtggtggtgaacaccgaagaggcgcgtcctgcagacgacaagccggccagcaggcggcggcgtttccgggaaaattttaccaaattattacccaaattcgtgtggtcgcgcactcgcacaagtatttctcctccagcactatcgccggctgcatcccatctcttcccggatgtgttgccgtcctccacagccgtcgtcagcacggcctcgccgccctccagggcggtggatccactgctcccgcccgtgag

SEQ ID NO: 919 - protein, 166 aa, Panicum virgatum
  misc_feature: Ceres Clone ID no. 100178733
  misc_feature: Bit score of 115.2 for HMM based on sequences of Figure 19
  misc_feature: Functional Homolog Of SEQ ID NO. 878
MKKIVIKISMISDRSRAKAMELLAKANGVSSIGIVGDGRDRLEVVGDGMDAFCLVKCLRKELGHAELLMMGDVKDKEARPEPVVVVNTEEARPADDKPASRRRRFRENFTKLLPKFVWSRTRTSISPPALSPAASHLFPDVLPSSTAVVSTASPPSRAVDPLLPPV

SEQ ID NO: 920 - DNA, 689 bp, Zea mays
  misc_feature: Ceres Clone ID no. 351547
  misc_feature: Encodes the peptide sequence at SEQ ID NO. 921
aagccgtacccctaccctcacatcacggagtgctcagttagcaatagagcaagccatccaattcacagaggacagagcaagccatccaattcacagaggacagagcaagccatccaattcacagaggacagagcaagccatcaccgcgcgggaagcaatgaagcaaaagatcgtgatcaaggtgagcatgccgtgccagaggagccggaccaaagccatgacgctggccgccggagcaaacggggtgatatcggtggcgatcgccggggagaagctggaggtggtcggcgacgacgtcgacccggtcaggctggccagctgcctgcgcaggaaggtcggccacgccgacatcctgcacgtggaggaagtcaaggacaagaagccgcccgaggaccccaagccgccgccgccgccggcgccgccggcgccgcagcccgtggtcgtgcacccgccgccgccgcactggccgcactgctaccccggaggctaccaccaccaccacccgccgccgccgccggtggtcgtctgtgacgagcccagcggctgccacatcatgtaattagaacggctgacatgaatagctgaggtcgattttttttgtcatgtaggtacagttcttttcagcaacttgaggttaattgagggagctatgaactatttgtgcaaataaagtttactttttttgcggc

SEQ ID NO: 921 - protein, 133 aa, Zea mays
  misc_feature: Ceres Clone ID no. 351547
  misc_feature: Bit score of 162.0 for HMM based on sequences of Figure 19
  misc_feature: Functional Homolog Of SEQ ID NO. 878
MKQKIVIKVSMPCQRSRTKAMTLAAGANGVISVAIAGEKLEVVGDDVDPVRLASCLRRKVGHADILHVEEVKDKKPPEDPKPPPPPAPPAPQPVVVHPPPPHWPHCYPGGYHHHHPPPPPVVVCDEPSGCHIM

SEQ ID NO: 922 - DNA, 1723 bp, Panicum virgatum
  misc_feature: Ceres Clone ID no. 1906874
  misc_feature: Encodes the peptide sequence at SEQ ID NO. 923
gagcgcggccgcaaggtcctaggaggagctagctatactactcatcaagcagcttgcattgcgtgcgtggttgctgctgcaccggccggcaggagaacattacgtacgatcggcgattcagcgtcgtagagcgagagctagctatccacgcccccacccccagtcagatcaatcagttacttatttattcttcagcttaattctcgatcagtgtcgtcgtcggagaaccatcaacgatggccaagcacaagattgtgatcaaggtgaccatgccgaacgccaagagccgcgccggggccatggtgctggccgccaaaacgaacggggtgatctcgatagcaatcgccggcgacctcaaggaccggctggaggtggtcggcgagggcatcgacatcacctgcctcgtccactgcctgcgcaagaaggtctgccgccacgccgagatcctcaaggtggaggaggtcaaggacaagaagcccgaggaggagaagaagaagaagccggagccctgcgggtgcccggcgccgtgcctgtgcgcggcggcttatcaccagacgccgctgcaggttttcagctgcgaggagtcgccggcattcggttgcaacatcttgtgaagctagctcaaggttcaccttaccgacggtaaagcgattttcgccaactagcggtatcggtaaaccggcggtaaatcgccggaaaccgctagaaaccgctcgaaatgacaattcaaattcaaaaaaccggtaaccgatgtttaccgaccggtaaccgatgtttaccgaccggtaaccgtcgtttttaaccggtaaacaccgtatgactttggaaaattaaaaattttggcagcatttcaccgtaattttgtaaatatcattactgatggtatatatcaaacaattatataacatttacacatacatagaatagaagttcatatccataaaaatagaaattcacatccatagtccatatagatcatcacaacaatagtcaatgcaaatcatcacaaccatagtcctcacaaaccatcatcgtcaatatatataatacatagtagtggtttccggtccaaatgaacaaatgaacaaatgaaaatatatgtacatatttgaaatatgaacacacatatatacatatagctaaaatgaacaaattaacatccaactaccatgaacaaatggatccatatagctaatatgaacacatgtttttgaatatagctacacaacaaacatctaaaaatcaatgtaaaatcaagaaatactcacaatgcagtggtttccggtccaaatgcgccgatttccgctcggaaaacgcagaataccgctcgggattagaggataccgctcgggattaccggtccgaaagtatttttatttttttgagtgcccaaacagtcaaatatttgaacatgttctatattagaatgatgtatgtcatctctactttcttaccatattttttcttttttatttcaaatatttttgaaaattttaaattcgggcgaaattttttgaaatttaccgccggtatgggttgccgcctagtagcggtatcggtaaaaatcggcggtaaccgcccgttaccgatcggtaaggaaaacactgagctagctactagtaagttaattgaactcggtcacgcgtgcatctagcatctgtcgtcagcttcttcgtgcatgcgtcaagtgtaccatggttctatatatggtttgctttcgctt

SEQ ID NO: 923 - protein, 125 aa, Panicum virgatum
  misc_feature: Ceres Clone ID no. 1906874
  misc_feature: Bit score of 159.5 for HMM based on sequences of Figure 19
  misc_feature: Functional Homolog Of SEQ ID NO. 878
MAKHKIVIKVTMPNAKSRAGAMVLAAKTNGVISIAIAGDLKDRLEVVGEGIDITCLVHCLRKKVCRHAEILKVEEVKDKKPEEEKKKKPEPCGCPAPCLCAAAYHQTPLQVFSCEESPAFGCNIL

SEQ ID NO: 924 - DNA, 711 bp, Panicum virgatum
  misc_feature: Ceres Clone ID no. 1885857
  misc_feature: Encodes the peptide sequence at SEQ ID NO. 925
gtgctccagccaccaccacggcaacccagcaaggcgagctcctctggttcataactttcttcttcaccgacctcggcacacctccaccgagaacaagcaagttttcaagctctcgagcacaaaacctgtcgtggccgcagctggttggcaaccaacggtttcagaaatgaagcaaaagatcgtgatcaaggtgcagatgagctgcaacaagtgccgggcgaaggcgatggcgctggtggcggcggccggcggcgtggactccgtggcgatcgccggcgccgacagggaccaggtcgtcgtcgtgggcgagggcgtcgactccatccacctcaccgccgcgctgcgcaggaaggtcgggcccgcgcacatcctgcaggtcggcgaggacaagaaggacgacaagaagaagccgccgccggcgccgcccgtgcccgactactacccgtggtgctacccgccgccgccgtcgcagccggccggcttcctctccgacccctacggctacgggtacgcctaccagacgcggcaagagagcagcggctgctccataatgtagattgtacatttgtatctgtacttgtagagagaaggcaacaatccacacatacgtacgtatgtacgggctagtatatgtacttgtagagagaaggcaacaatccacacatatacttctttttttttttgaagggaatccacacatatacctgatac

SEQ ID NO: 925 - protein, 129 aa, Panicum virgatum
  misc_feature: Ceres Clone ID no. 1885857
  misc_feature: Bit score of 164.9 for HMM based on sequences of Figure 19
  misc_feature: Functional Homolog Of SEQ ID NO. 878
MKQKIVIKVQMSCNKCRAKAMALVAAAGGVDSVAIAGADRDQVVVVGEGVDSIHLTAALRRKVGPAHILQVGEDKKDDKKKPPPAPPVPDYYPWCYPPPPSQPAGFLSDPYGYGYAYQTRQESSGCSIM

SEQ ID NO: 926 - protein, 132 aa, Oryza sativa subsp. japonica
  misc_feature: Public GI ID no. 38606532
  misc_feature: Bit score of 147.3 for HMM based on sequences of Figure 19
  misc_feature: Functional Homolog Of SEQ ID NO. 878
MKQKIVIKVCAPCEGCRAKALEVAARAADGVISLAITGDDRDKLEVVGVGVDVTRLVICLRKKVCYAEILLVEEEKEEEEKKEPECKPCYWPPYWCPPPEDPTCKPCYPRYSYAPPPPAVVVCDEPSACSIM

SEQ ID NO: 927 - DNA, 916 bp, Panicum virgatum
  misc_feature: Ceres Clone ID no. 1771513
  misc_feature: Encodes the peptide sequence at SEQ ID NO. 928
accacagcaaagcgagcagttgcgagacacgggcctctcctctccactccggctctatctccataccaacgatctctcgacagccgcgaggcgtttgagctttcctttccaatccaagcttggagcaccgcgcgggcacgagagttcaggcatggcgaaggtaataaccaccgacaccatctccgatcctcctggtcatctggagcagctagcttcttcctgcttctctgcgctctgctccggctgacctccgtccactggaagcctgaaacaaaagcgtcttcgttcacttgcagcaaaagatcgtgatcaaggtgcagatggcgagcgaccggtgccggtcccgggcgatggcgctggtggcggccacgggcggggtggactccgtggcgctcgccggcgacggcaaggaccaggtcgtcgtggtgggcgagggcgtcgactccatcaagctcaccaccgcgctgcgcaagaagttgggcggcgcggagctgctgcaggtcggcgaggacaagaaggaggagaagaagccggcgccggcccccgcccccgccgcggtggctgcggcggccgagtactactcccagttgtactaccaccactacccgccgccgcacctggccggcgccgtccacgaccaccgcgccgtcgggtacgggggctactcgcgggcggacacctgctccataatgtaaacagaggggtttggattgccgttcaaagtgtgtgttgtagttcaggatgcaagtttcattgggtcaacccaactacccattatccaatttaccaaaaaatagtgtaattaccttatagagtcaaccctactaaattttggtgctagtttgggtttaccctgtgggtaattgggtaaccctaaaatttatggaatcttttgttgagggtccacgtttccatc

SEQ ID NO: 928 - protein, 124 aa, Panicum virgatum
  misc_feature: Ceres Clone ID no. 1771513
  misc_feature: Bit score of 145.3 for HMM based on sequences of Figure 19
  misc_feature: Functional Homolog Of SEQ ID NO. 878
MASDRCRSRAMALVAATGGVDSVALAGDGKDQVVVVGEGVDSIKLTTALRKKLGGAELLQVGEDKKEEKKPAPAPAPAAVAAAAEYYSQLYYHHYPPPHLAGAVHDHRAVGYGGYSRADTCSIM

SEQ ID NO: 929 - DNA, 674 bp, Panicum virgatum
  misc_feature: Ceres Clone ID no. 1950928
  misc_feature: Encodes the peptide sequence at SEQ ID NO. 930
agcgcggccgcaaggtcctagtaggcgaagctagcagcttgcattgcgtgcgtgtggttgctgcaccggccggcaggaaaagatcacgatcggcgaacggcgattcagcgtcgtagagagtcagctagccacgcccaatcagatcatccagtggctttagcttgagaggctcgctcagttattagttattccctcagcttctcgatcagtgtcgtcgtcggagaatcaacgatggccaagcacaagattgtgatcaaggtgaccatgccgagcgccaagagccgcgcccggaccatggtgctggccgccaaaacgaacggggtgatctcgatagcaatcgccggcgacctcaaggaccggctggaggtggtcggcgagggcatcgacatcacctgcctcgtccaccgcctgcgcaagaaggtctgctgccacgccgatatcctgaaagtggagggggtcaaggacaagaagccgcccgaggagaagaagaagccgccggagccctgcgggtgcccggcgccgtgcctgtgcgcggcggcttatcaccacacgccgctgcaggttttcagctgcgaggagccgccggcattcggttgcaccatcttgtgaagctaagctactggcagtaagttaattggactcggtcatgcatgcggcttttctgacctttttgc

SEQ ID NO: 930 - protein, 125 aa, Panicum virgatum
  misc_feature: Ceres Clone ID no. 1950928
  misc_feature: Bit score of 154.4 for HMM based on sequences of Figure 19
  misc_feature: Functional Homolog Of SEQ ID NO. 878
MAKHKIVIKVTMPSAKSRARTMVLAAKTNGVISIAIAGDLKDRLEVVGEGIDITCLVHRLRKKVCCHADILKVEGVKDKKPPEEKKKPPEPCGCPAPCLCAAAYHHTPLQVFSCEEPPAFGCTIL

SEQ ID NO: 931 - DNA, 766 bp, Zea mays
  misc_feature: Ceres Clone ID no. 273420
  misc_feature: Encodes the peptide sequence at SEQ ID NO. 932
aagcgggcaggcggcagcgcaaaacattaaaaccatcatttgcagcggcggctgctgccggcgacgcgatgtccaagcaaaagtccgtgatcaggctgggcgtaccgaacgacaagaaccggtctaaggccatgcagatggcatccaagtttgtgggagtgaactcggtggggatcgccggcgacgccaaggaccggctggaggtggtgggggagagcgtcgacatcacctgcatgatcaacctgctgcgcaagaaggtctgccgcgccgacatcgtcgtggtggaggaggtcaaggacaagaagaaggaggaggaggagaagaagaagaaggaggaggaagagaaaaagaagaaggcggaggaggaagccaagaagaagaaggaggaggaagagctcaagaagaagctctgcccgtacccgtacccgccgccgccgtgctccggtgcctgttgccgcgggccgtcgccgccgatgtttctgtgcgagccggaacagccagcgggctgccacatcatgtgacgatgaagtgaagctccttagtgctcaagatggatcctgcctgcctgggctcaacaatatgcatgcttgtgattttggtttgccacacatcatcgaccggtcagtttcactccgtgaataatcgtcccgtccgaacttgtgcacatgcgtggttgtggttttgctttggcatctgaattacaatcctaagtgatcatggaatttagatcactactatatatatatatatataagtatttttttgg

SEQ ID NO: 932 - protein, 150 aa, Zea mays
  misc_feature: Ceres Clone ID no. 273420
  misc_feature: Bit score of 113.1 for HMM based on sequences of Figure 19
  misc_feature: Functional Homolog Of SEQ ID NO. 878
MSKQKSVIRLGVPNDKNRSKAMQMASKFVGVNSVGIAGDAKDRLEVVGESVDITCMINLLRKKVCRADIVVVEEVKDKKKEEEEKKKKEEEEKKKKAEEEAKKKKEEEELKKKLCPYPYPPPPCSGACCRGPSPPMFLCEPEQPAGCHIM

SEQ ID NO: 933 - DNA, 465 bp, Sorghum bicolor
  misc_feature: Ceres Annot ID no. 8701399
  misc_feature: Encodes the peptide sequence at SEQ ID NO. 934
atgtccaagcaaaagactgtgatcaggctgggcgtacccaacgccaagaaccggtctaaagccatgcagctcgcatccaaagctgtcggagtgaactcggtggccatcgccggcgaagccaaggaccagctggaggtggtaggagaaagcgtcgacatcacctgtctgatcaatcacctgcgcaagaaggtctgccgcgccgacatcgtcgtggtggaggaagtgaaggacaagaagaaggaggaggaggagaagaagaagaaggaggaagaagccaagaagaagaaggcggaggaagataagaagaaggcggaggaagcaaggaagaaggcggaagaagagttcaagaagctctgggcggcgtgcccgccgccgccgtacaacggtggttattatagttaccccgggccgccggcgacgtttgtatgcgaggaacagccagcagcaggctgccacatcatgtga

SEQ ID NO: 934 - protein, 154 aa, Sorghum bicolor
  misc_feature: Ceres Annot ID no. 8701399
  misc_feature: Bit score of 138.9 for HMM based on sequences of Figure 19
  misc_feature: Functional Homolog Of SEQ ID NO. 878
MSKQKTVIRLGVPNAKNRSKAMQLASKAVGVNSVAIAGEAKDQLEVVGESVDITCLINHLRKKVCRADIVVVEEVKDKKKEEEEKKKKEEEAKKKKAEEDKKKAEEARKKAEEEFKKLWAACPPPPYNGGYYSYPGPPATFVCEEQPAAGCHIM

SEQ ID NO: 935 - protein, 150 aa, Zea mays
  misc_feature: Public GI ID no. 194700536
  misc_feature: Bit score of 116.1 for HMM based on sequences of Figure 19
  misc_feature: Functional Homolog Of SEQ ID NO. 878
MSKQKSVIRLGVPNDKNRSKAMQMASKFVGVNSVGIAGDAKDRLEVVGESVDITCMINLLRKKVCRADIVVVEEVKDKKKEEEEKKKKEEEEKKKKAEEEAKKKKEEEELKKKLCPYLYPPPPCSGACCRGPSPPMFLCEPEQPAGCHIM

SEQ ID NO: 936 - protein, 130 aa, Oryza sativa subsp. indica
  misc_feature: Public GI ID no. 125540061
  misc_feature: Bit score of 147.5 for HMM based on sequences of Figure 19
  misc_feature: Functional Homolog Of SEQ ID NO. 878
MVQKIVIKVHMSSDKCRRKAMALAASTGGVVSVELAGDDRSKVVVVGDVDSIGLTNALRRKVDGSAELVEVSDASKKKEEEAKKKEELVYYHHGYGYYHPGGVYHHHPGYGPHGCPCSCNPSPDSTCSIM

SEQ ID NO: 937 - protein, 133 aa, Oryza sativa subsp. japonica
  misc_feature: Public GI ID no. 115446971
  misc_feature: Bit score of 141.4 for HMM based on sequences of Figure 19
  misc_feature: Functional Homolog Of SEQ ID NO. 878
MVQKIVIKVHMSSDKCRRKAMALAASTGGVVSVELAGDDRSKVVVVGDVDSIGLTNALRRKVDGSAELVEVSDASKKKEEEAKKKEEKEELVYYHHGYGYYHPGGVYHHHPGYGPHGCPCGCNPSPDSTCSIM

SEQ ID NO: 938 - DNA, 792 bp, Panicum virgatum
  misc_feature: Ceres Clone ID no. 1802499
  misc_feature: Encodes the peptide sequence at SEQ ID NO. 939
tgctccagccaccaccacggcaacccagcaaggcgagctcctctggttcataactttcttcttcaccgacctcggcacacctccaccgagaacaagcaagttttcaagctctcgagcacaaaacctgtcgtggccgcagctggttggcaaccaacggtttcagaaatgaaggtggcactgtgcagcaaaagatcgtgatcaaggtgcagatgagctgcgacaagtgccgggccaaggcgatggcgctggtggcggcggccggcggcgtggactccgtggcgatcgccggcgccgacagggaccaggtcgtcgtcgtgggcgagggcgtcgactccatccacctcaccgccgcgctgcgcaggaaggtcgggcccgcgcacatcctgcaggtcggcgaggacaagaaggacgacaagaagaagccgccgccggcgccgcccgtgcccgactactacccgtggtgctacccgccgccgccgtcgcagccggccggcttcctctccgacccctacggctacgggtacgcctaccagacgcggcaagagagcagcggctgctccataatgtagattgtacatttgtatctgtacttgtagagagaaggcaacaatccacacatacgtacgtatgtacgggctagtatatgtacttgtagagagaaggcaacaatccacacatatacttctttttttttcaagggaatccatacatatacctgatacaaagattgtagttttcttttcttttctagcggtactctaatttgtgaatgaaactcttggattttcttgc

SEQ ID NO: 939 - protein, 119 aa, Panicum virgatum
  misc_feature: Ceres Clone ID no. 1802499
  misc_feature: Bit score of 120.7 for HMM based on sequences of Figure 19
  misc_feature: Functional Homolog Of SEQ ID NO. 878
MSCDKCRAKAMALVAAAGGVDSVAIAGADRDQVVVVGEGVDSIHLTAALRRKVGPAHILQVGEDKKDDKKKPPPAPPVPDYYPWCYPPPPSQPAGFLSDPYGYGYAYQTRQESSGCSIM

SEQ ID NO: 940 - DNA, 667 bp, Gossypium hirsutum
  misc_feature: Ceres Clone ID no. 1839543
  misc_feature: Encodes the peptide sequence at SEQ ID NO. 941
aaaacagcacaagtagttcctctctcgatattttccacatttctgccactctctttaggaaaactaaaacagctctgttcttgacaccatgaagcaaacgatggtagtgaaggtgactatgagcgacgagaaatcccgctccaaggccttgaaggtagtagtcggtttctcaggggtggagtcagcttcattgaaaggagatgacaagagccaaatagaggtaacaggagatggggtggacgcagttcagctaacaagtcggctaaggaagagcgtggggcatgcggagctagtgagcgttagtgctgtcggcggtgaaaagaaggaagaggccaaggagccccccgccgcctatgtatggccttataatcagcctttatatgtgtatcaagagttgccatatgctcatcaacaagacccttgctccatcatgtgaggtattttattacaagggaaacccataaaaccaatcccacacctccatccgtggcctttaattgatcccacaactgatgagctgggagaaatttattactttttatctttgcagttcatgatatatatatatatacgtgaggaagggcttccatgtgttgtacaattatagccggttaatttctttagtgagttctcatgttctcgtctgtatttcatcctatgttttctc

SEQ ID NO: 941 - protein, 115 aa, Gossypium hirsutum
  misc_feature: Ceres Clone ID no. 1839543
  misc_feature: Bit score of 151.3 for HMM based on sequences of Figure 19
  misc_feature: Functional Homolog Of SEQ ID NO. 878
MKQTMVVKVTMSDEKSRSKALKVVVGFSGVESASLKGDDKSQIEVTGDGVDAVQLTSRLRKSVGHAELVSVSAVGGEKKEEAKEPPAAYVWPYNQPLYVYQELPYAHQQDPCSIM

SEQ ID NO: 942 - DNA, 659 bp, Gossypium hirsutum
  misc_feature: Ceres Clone ID no. 1850157
  misc_feature: Encodes the peptide sequence at SEQ ID NO. 943
gtcccatacaaaacacgtaacttcttcttcttccaaacatctttttgtcttcttctttcaaaaggtaacagataatcgccaccatgaagcaaaagatggtattgaaggtttccatgaatggcgacaaatcccgctccaaggcattgaaagttgcagttggtctctcaggggtggagtcggcttcgttgaaaggcgatgacaagagccaaatagaggtgacaggggatggtgtggatgcagttaagctagcaagtcagttaaggaagagcgtggggttcgccgagctggttagcgtcagtgccgccggtggcgaaaagaaggaagagaagaaagacgatcctaagccagagccaccgttctgctatgtgtcgccgccgtttaatccatcataccattattatccttcgtacgaatatgtcgacaactatggcccctcccccccttgctccatcatgtaatcacagacgcggaattttacacttcacagccgacaacaataaatgagacaaatatattacttggcttgagttcctcaaattttgtagctcataatcatgtcaaatttagagctcaaatcattgtgtttcatatgcaattctttttttgtttggttttcatttttttaaatatatatatttgaagaaagcttgtgttatagc

SEQ ID NO: 943 - protein, 124 aa, Gossypium hirsutum
  misc_feature: Ceres Clone ID no. 1850157
  misc_feature: Bit score of 165.2 for HMM based on sequences of Figure 19
  misc_feature: Functional Homolog Of SEQ ID NO. 878
MKQKMVLKVSMNGDKSRSKALKVAVGLSGVESASLKGDDKSQIEVTGDGVDAVKLASQLRKSVGFAELVSVSAAGGEKKEEKKDDPKPEPPFCYVSPPFNPSYHYYPSYEYVDNYGPSPPCSIM

SEQ ID NO: 944 - DNA, 973 bp, Zea mays
  misc_feature: Ceres Clone ID no. 1471240
  misc_feature: Encodes the peptide sequence at SEQ ID NO. 945
ttcctcacaactgcggcttattagtaggccgcgcgcgctagctctcttggtctagctgtagttgcaccatcagcgcgcgaacggcggatcgatcagcttcgtctttcaattcttctccacatcatcatttgcgccacgtacgtaaatcggctgctgcgggagagacgaccggccgccggcgacgccgccatgaccaagcaaaaggcagtgatcaggcttggcgtaacgaacgaccagaaccggtctaaggccatgcagctggcgtcccgatttcacggagtgaccttggtgtcgatcaccggcgcaggcaaggaccagctggaggtggtaggagaagacatcgacatcccctgcctcgtcaattcgctgcgcaagaaggtctgccgctccgccggcatcgtcgtggtggaggaagtcaaggacaaggcgaaggtggaggaggagaagaagaagaaggaagaggaagagaagaagaagaaggccaaggagttgcaagaagcgctccagaagctctgcgcgtcgtcgccgtgcccgccgccgccgttctacggcggcccgacgtttctctgcgaggaacagccaacaggctgccacatcatgtgaagctgatggattctggcccggcctttatatatacgaatatatgcgtgtgcttttggttctgaacttttgccacaccgccggcccacctagtctccgtgaagcgtgtgcggagcggggcgtggcaaattctgaacatatattggtgctgtttttgaatttgcttgaaccatatcctgctggccagctttttttataagaactttttttgtattttcctataaacattaccgaatttaggatggtttgactccgaataaactcagaaatagttacatttatggaaggactggctacatgtatgtctacaagctagtatcgtcttactatctactacaactatcctataatataagaaattttgagtttcccc

SEQ ID NO: 945 - protein, 137 aa, Zea mays
  misc_feature: Ceres Clone ID no. 1471240
  misc_feature: Bit score of 115.3 for HMM based on sequences of Figure 19
  misc_feature: Functional Homolog Of SEQ ID NO. 878
MTKQKAVIRLGVTNDQNRSKAMQLASRFHGVTLVSITGAGKDQLEVVGEDIDIPCLVNSLRKKVCRSAGIVVVEEVKDKAKVEEEKKKKEEEEKKKKAKELQEALQKLCASSPCPPPPFYGGPTFLCEEQPTGCHIM

SEQ ID NO: 946 - DNA, 1531 bp, Panicum virgatum
  misc_feature: Ceres Clone ID no. 1790811
  misc_feature: Encodes the peptide sequence at SEQ ID NO. 947
aatcacaaggtcgctctagctcagacctcagagagagagagagagagagagagagagatgctgaagcaggcggaggtggtggtggtggacacggcgctggtgccgccaagcaaggagacgccggggcagccgctgtggctgtccaacctcgatctggccgtgccgaggacgcacacgccgctcgtctactactacccggcgcccgcgcaaggcgccgccgcggcgggcacgggctccttcgcgccggaccggctcacggccgcgctggccggggctctggtgccgttctacccgctcgcggggcgactcggtcccggcccggacgggcggccgcagatcaactgcaccggcgagggcgcgctcttcgtcgtcgccagggcggacctcaccggcgacgacatctttgaggacttcgagccgtcgccagagatccggagagcttttgtgccgtcaccgcggcctggcgacgcgtcctgccccttggccgtgttccagttgactttcctcaagtgtggcggcgtggtgctgggcaccggcatccaccacgcggtgctggacggcgtgggcgcgttccagttcatccagacgtgggcggggctcgcccgcggcctcgacgccgccgaggcgtgcgggccggtgccgttccacgaccggaccctcctccgcgcgcggtgcccgccgtgcccaaccttcgaccacttcgtctactccccggccttcctcagcggccgcccgcgccccttcgtcacccggttctacgccgtctcccccaagctcctcgccgacctcaagtcccggtgcggcgccggcgtgtccacgtactgcgccgtcaccgcgcacctctggcgctgcgtgtgcgtcgtgcacgggatggcgccgggcgcggacacccgcctcgggctgccggccaacatccgccaccgcctgagcccgccgctcccacgcagcttcttcgggaacgccgtcgtgcgcgacctcgtcacggcgcgggtcggcgacctgctgggcagcccgctcgggtccgtggcggagacgatcaagaaggcggtggacggcgtgggcgacgcgttcgtgcggtccgtgctggactacctggagctggagcaggcgaagaagcgaggcggcgacgacgacagcgcccagggcgagcagatggtgccggcgaccgacctgtgggcggtgagctggctggggatgcccatgtacagcgccgacttcggctcgggcgcgccgcggttcgtcgcgccggcgcagatgttcggcgtcggcacggcgtacatgaccccctgcgccaacaaggacgacggcatcaccgtcatcttctcgatggaggccgagcacattgagtgcttcgagaaggtcttctacggggaatgaattgaaacagctcgagataacagtactacgttttgtgctttttaatttattttaatttttccatgtaaaagaagcattttatcagggtaaatcctcataaatcgccctaagccttgtatacgatctcttgcttacggggaaatgcttatctatc

SEQ ID NO: 947 - protein, 439 aa, Panicum virgatum
  misc_feature (5)..(439): Pfam Name: Transferase Pfam Description: Transferase family
  misc_feature: Ceres Clone ID no. 1790811
  misc_feature: Bit score of 1103.7 for HMM based on sequences of Figure 31
  misc_feature: Functional Homolog Of SEQ ID NO. 947
  misc_feature: in Figure 31
MLKQAEVVVVDTALVPPSKETPGQPLWLSNLDLAVPRTHTPLVYYYPAPAQGAAAAGTGSFAPDRLTAALAGALVPFYPLAGRLGPGPDGRPQINCTGEGALFVVARADLTGDDIFEDFEPSPEIRRAFVPSPRPGDASCPLAVFQLTFLKCGGVVLGTGIHHAVLDGVGAFQFIQTWAGLARGLDAAEACGPVPFHDRTLLRARCPPCPTFDHFVYSPAFLSGRPRPFVTRFYAVSPKLLADLKSRCGAGVSTYCAVTAHLWRCVCVVHGMAPGADTRLGLPANIRHRLSPPLPRSFFGNAVVRDLVTARVGDLLGSPLGSVAETIKKAVDGVGDAFVRSVLDYLELEQAKKRGGDDDSAQGEQMVPATDLWAVSWLGMPMYSADFGSGAPRFVAPAQMFGVGTAYMTPCANKDDGITVIFSMEAEHIECFEKVFYGE

SEQ ID NO: 948 - DNA, 1341 bp, Sorghum bicolor
  misc_feature: Ceres Annot ID no. 8713285
  misc_feature: Encodes the peptide sequence at SEQ ID NO. 949
atgacgaagcaagtggtggtggtggacaccgcgctggtggcgccaagcgaggagacgccgcggcagcctctgtggctgtccaacctcgacctggccgtgccgcggacgcacacgccgctcgtctactactacccggcaccggcgcagggcggcgccgccctgggcacgggctccttcgcgcccgaccggctgagggccgcgctggccgtcgctctggtgccattctacccactcgccggccggctcggtgttggcccggacggccggctgcagatcgagtgcaacagcaacggcgcgctcttcgtcgtcgccaacgcggacctcaccggcgccgacgtctttgacgactacgagccgtcggcggaggtcaggaacacttttgtgccggtagcggactccggcgatgcgaccagcagccccatggccatgttccaggtgacgttcctcaagtgcggcggcgtggtgctcggcacggccatccaccacgcggccatggacggcgtcggcgcgttccagttcatgcagacgtggtccggggtggcacgcggcctccaagtcgcggaggcgtgcgggccgcaggcgccgttccacgaccggaccctgctgcgggcgcggtgcccgccgtgcccgacctcggaccacttcgtctactccccggggttcctcagcgggcggccccgggcctacgtgacccgcgtgtacgccgtctcgccgaagctcctcgccgacgtcaagtcccgctgcgcgcccggcgtgtccacctactgcgccctcaccgcgcacctgtggcgctgcgtgtgcgtcgcgcgcgggctggcgcccggggccgacaccctgctcggcctgccagccaacgtccggcaccgcctgcggcccccgctaccgcgcaccttcttcgggaacgccgtcgtgcgcgacctcgtcaccgcccccgtcagcaccgtcctcgacagctcgctcgggtccgtggcggagaccatcaagaaggcggtggaccgcgtcgacgacgccttcgcgcggtcggtgctggactacctggagctgcagcagaataatgcaggcggcggcggccagcaggcccaggcggcgcaggcgcccagcagggagcagctcgtgccggcgacggatctgtgggcggtgagctggctggggatggccatgtacgacgccgacttcggcacgggcgcgccccggttcgtcgcgccggcgcagatgttcggcgtcggcacggcgtatatgacgccgcgcggtccggacagggacgacggcatcgccgtgctcatctcgctggagcccgagtacttgccgagctttgagaaggtcttcttctataacgagtga

SEQ ID NO: 949 - protein, 446 aa, Sorghum bicolor
  misc_feature (3)..(445): Pfam Name: Transferase Pfam Description: Transferase family
  misc_feature: Ceres Annot ID no. 8713285
  misc_feature: Bit score of 1088.9 for HMM based on sequences of Figure 31
  misc_feature: Functional Homolog Of SEQ ID NO. 947
  misc_feature: in Figure 31
MTKQVVVVDTALVAPSEETPRQPLWLSNLDLAVPRTHTPLVYYYPAPAQGGAALGTGSFAPDRLRAALAVALVPFYPLAGRLGVGPDGRLQIECNSNGALFVVANADLTGADVFDDYEPSAEVRNTFVPVADSGDATSSPMAMFQVTFLKCGGVVLGTAIHHAAMDGVGAFQFMQTWSGVARGLQVAEACGPQAPFHDRTLLRARCPPCPTSDHFVYSPGFLSGRPRAYVTRVYAVSPKLLADVKSRCAPGVSTYCALTAHLWRCVCVARGLAPGADTLLGLPANVRHRLRPPLPRTFFGNAVVRDLVTAPVSTVLDSSLGSVAETIKKAVDRVDDAFARSVLDYLELQQNNAGGGGQQAQAAQAPSREQLVPATDLWAVSWLGMAMYDADFGTGAPRFVAPAQMFGVGTAYMTPRGPDRDDGIAVLISLEPEYLPSFEKVFFYNE

SEQ ID NO: 950 - protein, 431 aa, Zea mays
  misc_feature (1)..(431): Pfam Name: Transferase Pfam Description: Transferase family
  misc_feature: Public GI ID no. 194706702
  misc_feature: Bit score of 1123.9 for HMM based on sequences of Figure 31
  misc_feature: Functional Homolog Of SEQ ID NO. 947
  misc_feature: in Figure 31
MKVDVVGTTLVAPSEDTPHPELWLSNLDLAVPKTHTPLVYYYPAPAAGGDTDGEAAFFAPERLEAALAKALVPFYPLAGRLGVGEGGRLQIDCTGEGALFVVARADFAGEDVFSDYEPSPEVRRLFVPFAASGDSPCVMSMFQVTFLKCGGVVLGTGIHHVTMDGMGAFHFIQTWTGVARGLDTAEACGPLPFHDRTLLRARSPPAPAFDHPVYSPALLNGVPRPFVTRVYAVSPKLLAGIKSRCAPGVSTYCAVTAHLWRCMCVARGLAPGSDTRLRVPANVRHRLRPPLPRSYFGNAIVRDLVTTRVEDVLERPLGFVAQAIKDAVDRVNDAYVRSVVDYLEVESEKGSQAARGQLMPESDLWVVSWLGMPMYDADFGWGTPRFVAPAQMFGSGTAYVTQRANRDDGLAVLFGLEPEYLQCFEKVFYGE

SEQ ID NO: 951 - DNA, 1599 bp, Triticum aestivum
  misc_feature: Ceres Clone ID no. 569098
  misc_feature: Encodes the peptide sequence at SEQ ID NO. 952
acacacgcgcgcgcgcacacgcaagaaccgcccaagccgaacacacaagcaaagggagggacagcgcgcgagatcgagatgaaggtggaggtggtggacacgacgctggtgacgccgagcgagccgacgccgcggcacacgctgtggctctccaacctcgacctcgccgtgcccaagacgcacacgccgctcgtctactactacccggcgccccccgccggcgacggcggcgagaagcaggaagagttcttcgcgccggagaggctgcgggaggcgctggcgagggcgctggtgccgttctacccgctggcagggcggatggcgacgggccccgagggccggctcgagatcgactgcaacggcgagggcgcgctgttcgtcgtcgcgcgggccgacttcaccggcgacgagatgttccgggacttcgagccctccccggaggcgcgccgcctgctcgtccccttcgccgcctccggcgacccgccctgcctcctcgccatggtccaggtgacgttcctcaagtgcggcggcgtggccgtgggcacgggcatgcaccacgtgaccatggacggcgcgggcgcgatccagttcatccggacgtggacgaccctggcgcgcggcctggacgccgcgtccgtgcacccgtccccgccggtgcacgaccgcacggtgctgcgcgcgcgctctcccccgcatgccaccttcgagcacccggtctactccccgagcaacctcaacggcctgccccgccccttcgtcacccgcgtctacgccgtgtcccccaagctcctcgccggcatcaagtccagctgcgcgcccggcgtgtccacctactgcgcgctcaccgcgcacctgtggcgcgccatgtgcgtggcccgcgggctggcccccgacgccgagtcgcggctgcgcgtgccggccaacatccggcagcgcctgcgcccgcagctgccggccaactacttcggcaacgccatcgtgcgggacctggtgacggtgcgcgtcggcgacgtgctgtcgcagccgctggggttcgtggcggagcggatcaagcgcgcggtggcgcgggtggacgacgccttcgtgcgctccgtcatcgactacctggaggtggagtcggagaagggcagccaggcggcgcgcgggcagttcatgccggagacggacctgtgggtggtgagctggctgggcatgcccatccacgacgccgacttcggctggggctgccccaagttcgtggcgccggcgcagatgttcggcagcggcacggcctacgtcacgcaggcgcccgacaaggacgacggcgtgtccgtgctgttcgcgctcgagccagagtacctgcagtgcttcgagaaggccttctacggggagtgaccgaccaaagccttctacggtgatgcgcctttcaaagagccacttgggagttgggatctcgagtccgtcgatagtgtggagtgctgtatcataacgcaacagatactgcggaagtgtcgaggttgctgcttgtttctcgcgcctttcttcactgctactatgtgacattgtgggctaactattatctatacaaagtctaaatgaaaatggcctcaggtttagctc

SEQ ID NO: 952 - protein, 431 aa, Triticum aestivum
  misc_feature (1)..(431): Pfam Name: Transferase Pfam Description: Transferase family
  misc_feature: Ceres Clone ID no. 569098
  misc_feature: Bit score of 1104.3 for HMM based on sequences of Figure 31
  misc_feature: Functional Homolog Of SEQ ID NO. 947
  misc_feature: in Figure 31
MKVEVVDTTLVTPSEPTPRHTLWLSNLDLAVPKTHTPLVYYYPAPPAGDGGEKQEEFFAPERLREALARALVPFYPLAGRMATGPEGRLEIDCNGEGALFVVARADFTGDEMFRDFEPSPEARRLLVPFAASGDPPCLLAMVQVTFLKCGGVAVGTGMHHVTMDGAGAIQFIRTWTTLARGLDAASVHPSPPVHDRTVLRARSPPHATFEHPVYSPSNLNGLPRPFVTRVYAVSPKLLAGIKSSCAPGVSTYCALTAHLWRAMCVARGLAPDAESRLRVPANIRQRLRPQLPANYFGNAIVRDLVTVRVGDVLSQPLGFVAERIKRAVARVDDAFVRSVIDYLEVESEKGSQAARGQFMPETDLWVVSWLGMPIHDADFGWGCPKFVAPAQMFGSGTAYVTQAPDKDDGVSVLFALEPEYLQCFEKAFYGE

SEQ ID NO: 953 - protein, 440 aa, Oryza sativa subsp. japonica
  misc_feature (1)..(439): Pfam Name: Transferase Pfam Description: Transferase family
  misc_feature: Public GI ID no. 115479225
  misc_feature: Bit score of 1078.7 for HMM based on sequences of Figure 31
  misc_feature: Functional Homolog Of SEQ ID NO. 947
  misc_feature: in Figure 31
MKVEVVETTLVAPSEATPQHALWLSNLDLAVPKTHTPLVYYYPAPSPPPADAGAEAEAEGFFAPERLREALARALVPFYPLAGRLAAGPGGRLEIDCNGEGALFVVARADFTGDEMFTDFEPSPEARRLLVPFAASGEPPCVLAMVQVTFLKCGGVAVGTGMHHVTMDGAGAFQFIRTWTGLSRGLDAAAASPSPPSHDRTLLRARSPPHVPFEHPVYSPSYLNGLPRPFVTRVYSVPPKLLADIKAACAPGVSTYGAVTAHLWRAMCVARGLPHDAESRLRVPANIRQRVRPPLPSPYFGNAIVRDLVTVPVRDILSQPLGFVAERIKHAVARVDDAFVRSVIDFLELESEKGNQAARGQFMPETDLWVVSWLGMPIYDADFGWGRPAFVAPAQMFGSGTAYVTQAPDKDDGSGGGVSVLFALEPEYIQCFEKAFYGTE

SEQ ID NO: 954 - DNA, 1597 bp, Zea mays
  misc_feature: Ceres Clone ID no. 298496
  misc_feature: Encodes the peptide sequence at SEQ ID NO. 955
gatgcaaacagcaccattcggtcgctccagcttttgtgcacgtccactgtgtccctcctcgctacccccgctttttgtgcgcggtggcaacgtgcgacagccgagaggcagaatgacgaagcaagtggtggtggtggacacagctctggtggcgccgagcgaggagacgccgcggcagccgctgtggctgtccaaccttgacctggccgtgccgaggacgcacacgccgctggtctactactacccggcgccgggcacgggctccttcgcgccggaccggctgagggccgcattgggcgccgctctggtgccattctacccacttgccgggcgcctcggcgttggcccggacggccggctgcagatcgagtgcaacagcaagggcgcgctcttcgtcgtcgccaacgcagacctcaccggcgcggacgtcttcgacgactacgagccgtcgtcggagatcaggaacacttttgtgccgttaggggagtccggcgaggcgaacaacagccccatatccatgttccaggtgacttttctcaagtgcggcggcgtggtgctaggaaccgccatccaccacgcggccatggacggcgtgggcgcgttccagtttatgcagacgtggtccggggtggcacgcggcctggacgtggcggaggcgtgcgggccgcagccgttccacgaccggacgctcctgcacgcgcggcgcccgccgtgcccgacatccgaccacttcgtctactccccggcgttcctcagcggccgcccccggccctacgtcacccgcatctactccgtctcgccgaagctcctcgccgacgtcaagtcgcgctgcgcgccaggcgtgtccacctactgcgccgtcaccgcgcacctctggcgctgcgtgtgcgtcgcgcgcgggctagcgccgggcgcggacacccgcctcagcctgccggccaacgtccgccaccgcctgcgccccccgctcccgcgcaccttcttcggcaacgccgtcgtgcgcgaccacgtcaccgcccccgtcagcaccgtcctcggcgcccctctcgggtccgtggcggagaccatcaagaaggcggtggaccgcgtggacgacgccttcgcgcggtcggtgctggactacctggagctgcagaatgcaggcggcaagcagctgagcggccaggctcaggcccaggcgcccagggagcagctcgtaccggcgacggacctgtgggcggtgagctggctggggatggccatgtacgacgccgacttcggctcaggcgcgccgcggttcgtcgcgccggcgcagatgttcggcatcggcacggcgtatatgacgccgcgcggtccggacagggacgacggcatcgccgtgctcatctctctggagcccgagtacctgtcgtgctttgagaaggtcttcttctataacgagtgatgtctcaggtctggagttcaaggatgtgaacgtgtgaatctccgttcgagtagtaagctatttttcctttccctttttttttgtacgtctgagcggtcccaccgagtattctaggtattccttgaaatacttattgttttggtcaaataaataaatatctgccttgcgttattg

SEQ ID NO: 955 - protein, 473 aa, Zea mays
  misc_feature (40)..(472): Pfam Name: Transferase Pfam Description: Transferase family
  misc_feature: Ceres Clone ID no. 298496
  misc_feature: Bit score of 1028.2 for HMM based on sequences of Figure 31
  misc_feature: Functional Homolog Of SEQ ID NO. 947
MQTAPFGRSSFCARPLCPSSLPPLFVRGGNVRQPRGRMTKQVVVVDTALVAPSEETPRQPLWLSNLDLAVPRTHTPLVYYYPAPGTGSFAPDRLRAALGAALVPFYPLAGRLGVGPDGRLQIECNSKGALFVVANADLTGADVFDDYEPSSEIRNTFVPLGESGEANNSPISMFQVTFLKCGGVVLGTAIHHAAMDGVGAFQFMQTWSGVARGLDVAEACGPQPFHDRTLLHARRPPCPTSDHFVYSPAFLSGRPRPYVTRIYSVSPKLLADVKSRCAPGVSTYCAVTAHLWRCVCVARGLAPGADTRLSLPANVRHRLRPPLPRTFFGNAVVRDHVTAPVSTVLGAPLGSVAETIKKAVDRVDDAFARSVLDYLELQNAGGKQLSGQAQAQAPREQLVPATDLWAVSWLGMAMYDADFGSGAPRFVAPAQMFGIGTAYMTPRGPDRDDGIAVLISLEPEYLSCFEKVFFYNE

SEQ ID NO: 956 - DNA, 1653 bp, Zea mays
  misc_feature: Ceres Clone ID no. 1534877
  misc_feature: Encodes the peptide sequence at SEQ ID NO. 957
cacagagctacctactgtaaacattcaacactcaagagccaagagggagagacgatgaaggttgatgtggtggggacgacgcttgtggcgccgagcgaggacacgccgcacccggagctgtggctgtcgaacctggacctggcagtccccaagacgcacacgccgctcgtgtactactacccggcgccggcggccggaggcgacaccgacggagaagcggccttcttcgcgccggagcggctcgaggcggcgctggccaaggcgctggtgccgttctacccgctggcggggaggctgggcgtgggcgagggcgggcgcctgcagatcgactgcaccggcgagggcgcgctcttcgtcgtcgccagggccgacttcgccggcgaggacgtgttcagtgactacgagccgtcgccggaggtcaggcggctgttcgtgccgttcgcggcgtccggagacccgccctgcgtcatgtccatgttccaggtgacgttcctcaagtgcggcggcgtggtgctgggcacgggcatccaccacgtgaccatggacggcatgggcgcgttccacttcatccagacctggaccggcgtggcgcggggcctcgacacggccgaggcgtgcggcccgctgccgttccacgaccggacgctcctccgcgcgcgctctccgccggccccggccttcgaccacccggtctactcgccggctctgctcaacggcgtgccccggcccttcgtcacccgcgtctacgccgtctccccgaagcttctcgctggcatcaagtcccgctgcgcgccgggcgtgtccacctactgcgccgtcaccgcgcacctctggcgttgcatgtgcgtcgcgcgcgggctcgccccgggctcggacacgcggctccgcgtgccggccaacgtccgccaccgcctgcgcccgccgctcccgcggagctacttcggcaacgccatcgtgcgcgacctcgtgaccacccgggtggaggacgtcctggaacgcccgctcgggttcgtggcgcaggcgatcaaggacgcggtggaccgcgtcaatgacgcctacgtgcgctccgtggtcgactacctggaggtggagtcggagaagggcagccaggcggcgcgcgggcagctcatgccggagtccgacctgtgggtggtcagctggctcgggatgcccatgtacgacgccgacttcgggtggggcacgccgcggttcgtcgcgccggcgcagatgttcggcagcggcacggcctacgtcacgcagcgcgccaacagggacgacggcctcgccgtgctcttcgggctggagcccgagtatctgcagtgcttcgaaaaggtgttctatggagagtgagtcgtgagattactagtgtcatccgcgtttcgtcgtgagcaccgagtgcgattactgtagcttggaacctgatgctgtggatgtgggctttgcaaattactccggtttctgtgttttttttcctagtattctcatgtggtttttaggtgctcagtcgagacttgagagagaacatagctgcgttgactttagcatggtttaatttcaactctatgggtctctatctattgtcacattagctatccaccgtactatcgattctattgtcggccgttgtcaaccatatctatagcatggtcgtac

SEQ ID NO: 957 - protein, 431 aa, Zea mays
  misc_feature (1)..(431): Pfam Name: Transferase Pfam Description: Transferase family
  misc_feature: Ceres Clone ID no. 1534877
  misc_feature: Bit score of 1123.7 for HMM based on sequences of Figure 31
  misc_feature: Functional Homolog Of SEQ ID NO. 947
MKVDVVGTTLVAPSEDTPHPELWLSNLDLAVPKTHTPLVYYYPAPAAGGDTDGEAAFFAPERLEAALAKALVPFYPLAGRLGVGEGGRLQIDCTGEGALFVVARADFAGEDVFSDYEPSPEVRRLFVPFAASGDPPCVMSMFQVTFLKCGGVVLGTGIHHVTMDGMGAFHFIQTWTGVARGLDTAEACGPLPFHDRTLLRARSPPAPAFDHPVYSPALLNGVPRPFVTRVYAVSPKLLAGIKSRCAPGVSTYCAVTAHLWRCMCVARGLAPGSDTRLRVPANVRHRLRPPLPRSYFGNAIVRDLVTTRVEDVLERPLGFVAQAIKDAVDRVNDAYVRSVVDYLEVESEKGSQAARGQLMPESDLWVVSWLGMPMYDADFGWGTPRFVAPAQMFGSGTAYVTQRANRDDGLAVLFGLEPEYLQCFEKVFYGE

SEQ ID NO: 958 - DNA, 1332 bp, Sorghum bicolor
  misc_feature: Ceres Annot ID no. 8713281
  misc_feature: Encodes the peptide sequence at SEQ ID NO. 959
atgaaggtcgacgtggtggggacgacgctggtggcgccgagcgaggacacgccgcgccgggagctgtggctgtccaacctggacctggccgtgcccaagacgcacacgccgctcgtgtactactacccggcgccggcgccggcggccgccacgggcacggacgacggaggagaccgggcggccttcttcgcgccggagcggctggaggcggcgctggccagggcgctggtgccgttctacccgctggcggggaggctgggcgtcggcgtgggcgagggcggacgcctgcgcatcgactgcaacgcccagggcgcgctcttcgtcgtcgccagggccgacttcgccggcgaggacgtgttcggcgacaccgacggcggctacgagccgtcgccggaggtcaggcggatgttcgtgccgttcgtgccgtccggcgacccgccctgcgtcatgtccatgttccaggtgacgttcctcaagtgcggcggcgtggtgctaggcacgggcatccaccacgtgaccatggacggcatgggcgcgttccacttcatgcagacctggaccggcgtggcgcggggcctcgacgtcgccgaggcgtgcggcccgctgccgccgttccacgaccggacgctcctccgcgcgcgctccccgccgacgccggccttcgaccacccggtctactcgccgtccctgctcaacggccggccccgccccttcgtcacccgcgtgtacgccgtctcgccgaagctcctcgccgacgtcaagtcccgctgcgcgccgggcgtgtccacctactgcgccgtcaccgcgcacctgtggcgctgcatgtgcgtggcgcgcgggctggcgccgtgctccgacacgcggctccgcgtcccggccaacgtccgccaccgcctccgcccggcgctcccgcggagctacttcggcaacgccatcgtgcgcgacctcgtcgtcgcccgggtggaggacgtcctggaccgcccgctcgggttcgtggcgcaggccatcaaggacgccgtggaccgcgtcgacgacgcctacgtgcgctccgtggtggactacctggaggtggagtcggagaagggcagccaggcggcgcgcgggcagctcatgccggagtccgacctgtgggtggtcagctggctcgggatgcccatgtacgacgccgacttcggctggggcacgccgcggttcgtcgcgccggcgcagatgttcggcagcggcacggcgtacgtgacgcagcgcgccaacaaggacgacggcatcgccgtgctctttgggctggagccccagtatctgcagtgcttcgagaaggtgttctatggggagtga

SEQ ID NO: 959 - protein, 443 aa, Sorghum bicolor
  misc_feature (1)..(443): Pfam Name: Transferase Pfam Description: Transferase family
  misc_feature: Ceres Annot ID no. 8713281
  misc_feature: Bit score of 1060.1 for HMM based on sequences of Figure 31
  misc_feature: Functional Homolog Of SEQ ID NO. 947
MKVDVVGTTLVAPSEDTPRRELWLSNLDLAVPKTHTPLVYYYPAPAPAAATGTDDGGDRAAFFAPERLEAALARALVPFYPLAGRLGVGVGEGGRLRIDCNAQGALFVVARADFAGEDVFGDTDGGYEPSPEVRRMFVPFVPSGDPPCVMSMFQVTFLKCGGVVLGTGIHHVTMDGMGAFHFMQTWTGVARGLDVAEACGPLPPFHDRTLLRARSPPTPAFDHPVYSPSLLNGRPRPFVTRVYAVSPKLLADVKSRCAPGVSTYCAVTAHLWRCMCVARGLAPCSDTRLRVPANVRHRLRPALPRSYFGNAIVRDLVVARVEDVLDRPLGFVAQAIKDAVDRVDDAYVRSVVDYLEVESEKGSQAARGQLMPESDLWVVSWLGMPMYDADFGWGTPRFVAPAQMFGSGTAYVTQRANKDDGIAVLFGLEPQYLQCFEKVFYGE

SEQ ID NO: 960 - protein, 442 aa, Oryza sativa subsp. indica
  misc_feature (1)..(441): Pfam Name: Transferase Pfam Description: Transferase family
  misc_feature: Public GI ID no. 125563758
  misc_feature: Bit score of 1067.3 for HMM based on sequences of Figure 31
  misc_feature: Functional Homolog Of SEQ ID NO. 947
MKVEVVETTLVAPSEATPQHALWLSNLDLAVPKTHTPLVYYYPAPSPPPADAGAEAEAEAEGFFAPERLREALARALVPFYPLAGRLAAGPGGRLEIDCNGEGALFVVARADFTGDEMFTDFEPSPEARRLLVPFAASGEPPCVLAMVQVTFLKCGGVAVGTGMHHVTMDGAGAFQFIRTWTGLSRGLDAAAASPSLPSHDRTLLRARSPPHVPFEHPVYSPSYLNGLPRPFVTRVYSVPPKLLADIKGDCAPGVFTYGAVTAHLWRAMCVARGLPHDAESRLRVPANIRQRVRPPLPSPYFGNAIVRDLVTVPVRDILSQPLGFVAERIKHAVARVDDAFVRSVIDFLELESEKGNQAARGQFMPETDLWVVSWLGMPIYDADFGWGRPAFVAPAQMFGSGTAYVTQAPDKDDGSGGGVSVLFALEPEYIQCFEKAFYGTE

SEQ ID NO: 961 - DNA, 1623 bp, Zea mays
  misc_feature: Ceres Clone ID no. 333204
  misc_feature: Encodes the peptide sequence at SEQ ID NO. 962
aagctcaccgctcactcacaagcacgctgcgaaacacagacgcagagacccgcgcacagatcgaagcggaggatgaaggtggaggtggtggagacgacgctggtgccgccgagcgaggcgacgccgcggcacgcgctgtggctgtccaacctggacctggcggtgcccaagacccacaccccgctcgtctactactacccgaggcccgccggcgccggcgccggggaggagggaaagggagagggagaagggtcgttcttcgacccggcgcgcctgcgggaggcgctgtccagggcgctggtgcccttctacccgctggcggggcggctggcggccggcccgggcggccggctcgagatcgactgcaccggcgagggcgcgctgttctgcgtcgcgcgggccgacttcaccggcgacgagatgttcgccgacttcgagccctcccccgaggcgcgccgcctgctcgtgccattcgccgcgtccggcgacccgccctgcgtgctcgccatggtccaggtgaccttcctcaagtgcggcggcgtggccgtgggcacgggcatgcaccacgtgacgatggacggcgccggcgcgatccagttcatccgggcgtggacggcgctggcgcgcggggaggcccccgcgtggacgccgtcgcacgaccggacgctcctgcgcgcgcgctccccgccgcacgtccccgcctgcgagcacccggtctactccccggcctacctcaacggggcgccgcggcccttcgtgacgcgcgtctacgccgtgccgcccaagctgctggcgggcatccggtcgcgctgcgcgccgggcgcgtccacgtactgcgcggtgacggcgcacctgtggcgcgccatgtgcgtcgcccggggcctcccggcgggcagcgacacgcggctgcgcgtcccggccaacgtccggcagcgcctgcgcccgccgctcccggcgtcctacttcggcaacgccatcgtgcgggacctggtcaccgtgcgggtggccgacgtgctgtcgcagccgctgggcttcgtggcggagcggatcaagcgcgcggtggcccgcgtcgacgacgcccgcgtgcgctccgtcgtcgactacctggagcttgagtcggacaagggcaaccaggcggcgcgcggccagttcatgcccgagtccgacctgtgggtcgtcagcttgctcggcatgcccatccacgacgccgacttcggctggggccgccccgggttcgtggcccccgcgcagatgttcggcagcggcacggcgtacgtcacgcagggacgcgacaaggacgaccccatcaacgtgctcttcgcgctcgagccagagtacctgaacaccttcgagaaggccttctacggggagtgaccgtgacgcgaccacgaccagccatggcgaggagtccgatgacgatggaatgggactgtgatgccattgtgatgccatgccgttgtggcatctcccgtggtgtgcactgtaataccatatcatattgcatgtttcggaatgcaagtcaatgcttactgggtgtgtgataaggtgcttcattccagctttgtactagtgtcaccaagcacgtaaataattgaatgagaaactggaacgtgcacggctggg

SEQ ID NO: 962 - protein, 433 aa, Zea mays
  misc_feature (1)..(433): Pfam Name: Transferase Pfam Description: Transferase family
  misc_feature: Ceres Clone ID no. 333204
  misc_feature: Bit score of 982.5 for HMM based on sequences of Figure 31
  misc_feature: Functional Homolog Of SEQ ID NO. 947
MKVEVVETTLVPPSEATPRHALWLSNLDLAVPKTHTPLVYYYPRPAGAGAGEEGKGEGEGSFFDPARLREALSRALVPFYPLAGRLAAGPGGRLEIDCTGEGALFCVARADFTGDEMFADFEPSPEARRLLVPFAASGDPPCVLAMVQVTFLKCGGVAVGTGMHHVTMDGAGAIQFIRAWTALARGEAPAWTPSHDRTLLRARSPPHVPACEHPVYSPAYLNGAPRPFVTRVYAVPPKLLAGIRSRCAPGASTYCAVTAHLWRAMCVARGLPAGSDTRLRVPANVRQRLRPPLPASYFGNAIVRDLVTVRVADVLSQPLGFVAERIKRAVARVDDARVRSVVDYLELESDKGNQAARGQFMPESDLWVVSLLGMPIHDADFGWGRPGFVAPAQMFGSGTAYVTQGRDKDDPINVLFALEPEYLNTFEKAFYGE

SEQ ID NO: 963 - DNA, 1302 bp, Sorghum bicolor
  misc_feature: Ceres Annot ID no. 8654155
  misc_feature: Encodes the peptide sequence at SEQ ID NO. 964
atgaaggtggaggtggtggagacgacgctggtgccgccgagcgaggcgacgccgcggcacgcgctgtggctgtccaacctggacctggcggtgcccaagacccacacgccgctcgtctactactacccgaggccgcccgaccccgaccccgagcccgacgccgacgcgcccgccggggaggggtcgttcttcgacccggcgcgcctgcgggaggcgctcgccagcgcgctggtggcgttctacccgctggcggggcggctcgtggtcggccagggcgggcggatcgagatcgactgcaccggcgagggcgcgctgttcgtcgtcgcgcgcgccgacttcaccggggacgacatgttcagggacttcgagccgtcccccgaggcgcgccgcctgctcgtgcccttcgccgaatccggcgacccgccctgcgtgctcgccatggtccaggtgaccttcctcaagtgcggcggcgtggccgtgggcacgggcatgcaccacgtcacgatggacggcgcgggcgcgatccagttcatccgggcgtggacggcgctggcgcgcggggagtcccccacgtgggcgccgtcccacgaccggacgctcctccgcgcgcgctccccgccgcacgtgcccttcgagcacccggtctactcgccggcctacctcaacgggtccccgcgtcccttcgtgacgcgcgtctacaccgtcccgcccaagctcctggcgggcatccggtcgcggtgcgcgccgggggcgtccacgtactgcgcggtgaccgcgcacctgtggcgcgccatgtgcgtggcgcgtgcgctccccgccgacggcgagacgcggctccgcgtgcccgccaacgtccggcagcggctccggccgccgctcccggccacctacttcggcaacgccatcgtgcgggacctggtgaccgtgaaggtgggcgacgtgctgtcgcagccgctcgggttcgtggcggaccggatcaagcgcgccgtgtcccgcgtcgacgacgccttggtgcgctccgtcgtcgactacctggagctggaggccgagaagggcaaccaggcggcgcgcgggcagttcatgccggagtccgacctctgggtcgtcagctggctcggcatgcccatccacgacgccgacttcggctggggccgccccgggttcgtggcgcccgcgcagatgttcggcagcggcacggcctatgtgacgcagggctacgacaaggacgaccccatcaacgtcctcttcgcgctcgagcctgagtacctgcagaccttcgagaaggcattctacggggagtga

SEQ ID NO: 964 - protein, 433 aa, Sorghum bicolor
  misc_feature (1)..(433): Pfam Name: Transferase Pfam Description: Transferase family
  misc_feature: Ceres Annot ID no. 8654155
  misc_feature: Bit score of 980.7 for HMM based on sequences of Figure 31
  misc_feature: Functional Homolog Of SEQ ID NO. 947
MKVEVVETTLVPPSEATPRHALWLSNLDLAVPKTHTPLVYYYPRPPDPDPEPDADAPAGEGSFFDPARLREALASALVAFYPLAGRLVVGQGGRIEIDCTGEGALFVVARADFTGDDMFRDFEPSPEARRLLVPFAESGDPPCVLAMVQVTFLKCGGVAVGTGMHHVTMDGAGAIQFIRAWTALARGESPTWAPSHDRTLLRARSPPHVPFEHPVYSPAYLNGSPRPFVTRVYTVPPKLLAGIRSRCAPGASTYCAVTAHLWRAMCVARALPADGETRLRVPANVRQRLRPPLPATYFGNAIVRDLVTVKVGDVLSQPLGFVADRIKRAVSRVDDALVRSVVDYLELEAEKGNQAARGQFMPESDLWVVSWLGMPIHDADFGWGRPGFVAPAQMFGSGTAYVTQGYDKDDPINVLFALEPEYLQTFEKAFYGE

SEQ ID NO: 965 - protein, 443 aa, Oryza sativa subsp. indica
  misc_feature (1)..(440): Pfam Name: Transferase Pfam Description: Transferase family
  misc_feature: Public GI ID no. 125554333
  misc_feature: Bit score of 483.3 for HMM based on sequences of Figure 31
  misc_feature: Functional Homolog Of SEQ ID NO. 947
MAVEMVESSMVTAGEATPEHRIWLSNLDLLVARSHTPTVYVYRRTGSDSDAAFFSPDVLKAALSKVLVPFYPLAGRLAQDSAGRPEISCTGEGVLFVTARSDATIDDLGDLAPSDELRRMLVPAADVAAAGILAMFQVTFFMCGGVCLGAAIHHTAADGLAALDFVNTWAAIARDVAGDGEAAAAVQRPWIDRTLLRARSPPAVRFDHAEYSRRRGGGSKLPFDSAILTLSKNQLNALKGAGAGAGKRLSTFTAVVAHVWRCACKARGLAVAGTEAATRLYMTADARSRLHPPLPRGYLGNAIFRASAVAKVSDIVAAGPLGAVAEKVSAATARLDDGYVRSLLDYLEQTAAASGGAAGLRKGEWVMPESDLWVISWQGLPLYDADFGWGRPAFMGRACLQFSGLVYLVPGHGGGDGRLDVVVSMELESLAKFKDVFYEELKC

SEQ ID NO: 966 - DNA, 1296 bp, Sorghum bicolor
  misc_feature: Ceres Annot ID no. 8658834
  misc_feature: Encodes the peptide sequence at SEQ ID NO. 967
atggattccgaggtagtgcaggtggtagagtcgtcgtttgtagtgccgaacgagccgacgccgcgtgaggggctctggctctctcccctggacctcattctcgccaacagaggccacaccccaacggtctacttgtacagctccagcaacgttgccgccggcgacgatggcttcttcgacgtggccaggctcaaggaggctatggccaaggccttggtcgccttctaccccctcgctggccgcctcggcgtcgacaaccatggcagggcagagatcacttgcaacggtgagggtgcactctttgttgtcgctcgggctgacctcactgttgatgacatcaaggacgacttcaagccgtcaccggagctgaggaggctgtttgttccacggattgagccagcatcagtcatattggcaatacaggtgactttcctgaagtgtggaggtgtagtgttagggacggctctccaccatgccgccatcgacgcctcaagcgcgttccacttcttccagacttggtcggccatctctaagcatggcgacggcgctaccgtggagctcccgtgccatgaccgcacactcctccgtgcacggtccccgcctaccgtccacccggacgccctttcaagattttacccaaagctcaccttctccgacccgtccggacctcttgccgtcgaattcttcgccatttccaaggaccaagtcgcctccctgaagcgcctctgcggcggcacaagcaccttctgcgccatgagcgccctcgtgtggcagtgcgcgctcattgcacgccggcttccgcctgattctgagacacgcctcaccttcccggctaacatccggcgtagggtgaggccgcctctcccggaccgctacttcggcaacgcgttggtcaggctgggtgtcactggtgcagtgcgggatgttgcctccgaggatttggcatccgtcgccgggcgcatcaaaggcgccatcgatcggatggacgatgagctcgtgcgctctgcagtcgactactgggagatgaccgagctggacagccggcctgcgaagggcaccttgctagagacggacctgcagattatcagctggctcggtatgccaatgtacgatgcagatttcggatgggggaagccaggggtgatgtcgcgggcggagtccatccgtggcggatttgtgtacctgatgagcgacgggccagcagacgacgccggggccggaggcgtccgcgtgctcatgtgcatggaagctgcaaatatcaacgagctggagcggctgctttacgaaaaactttag

SEQ ID NO: 967 - protein, 431 aa, Sorghum bicolor
  misc_feature (4)..(430): Pfam Name: Transferase Pfam Description: Transferase family
  misc_feature: Ceres Annot ID no. 8658834
  misc_feature: Bit score of 500.7 for HMM based on sequences of Figure 31
  misc_feature: Functional Homolog Of SEQ ID NO. 947
MDSEVVQVVESSFVVPNEPTPREGLWLSPLDLILANRGHTPTVYLYSSSNVAAGDDGFFDVARLKEAMAKALVAFYPLAGRLGVDNHGRAEITCNGEGALFVVARADLTVDDIKDDFKPSPELRRLFVPRIEPASVILAIQVTFLKCGGVVLGTALHHAAIDASSAFHFFQTWSAISKHGDGATVELPCHDRTLLRARSPPTVHPDALSRFYPKLTFSDPSGPLAVEFFAISKDQVASLKRLCGGTSTFCAMSALVWQCALIARRLPPDSETRLTFPANIRRRVRPPLPDRYFGNALVRLGVTGAVRDVASEDLASVAGRIKGAIDRMDDELVRSAVDYWEMTELDSRPAKGTLLETDLQIISWLGMPMYDADFGWGKPGVMSRAESIRGGFVYLMSDGPADDAGAGGVRVLMCMEAANINELERLLYEKL

SEQ ID NO: 968 - protein, 445 aa, Oryza sativa subsp. japonica
  misc_feature (1)..(442): Pfam Name: Transferase Pfam Description: Transferase family
  misc_feature: Public GI ID no. 115466798
  misc_feature: Bit score of 481.4 for HMM based on sequences of Figure 31
  misc_feature: Functional Homolog Of SEQ ID NO. 947
MAVEIVKSSMVTAGEATPEHRIWLSNLDLLVARSHTPTVYVYRRTGPDSDAAFFSPDVLKAALSKVLVPFYPLAGRLAQDSAGRPEISCTGEGVLFVTARSGATIDDLGDLAPSDELRRMLVPAADVAAASILAMFQVTFFRCGGVCLGAAIHHTAADGLAALDFVNTWAAIARDVAGDGEAAAAAVQRPWLDRTLLRARSPPAVRFDHAEYSRRRGGGSKLPFDSAILPMSKNQLNALKGAGAGAGKRLSTFTAVVAHVWRCACKARGLAVAGTEAATRLYMTADARTRLHPPLPRGYLGNAIFRASAVSKVSDIVAAGPLGAVAEKVSAATARLDDGYVRSLLDHLEQTAAAASGGAAGLRKGEWVMPESDLWVISWQGLPLYDADFGWGRPAFMGRACLQFSGLVYLVPGRDDGDGRLDVVVAMDPESLAKFKDVFYEELKC

SEQ ID NO: 969 - DNA, 1538 bp, Panicum virgatum
  misc_feature: Ceres Clone ID no. 1788581
  misc_feature: Encodes the peptide sequence at SEQ ID NO. 970
actgatcaagcggcagacttagcctctcagcccatcgatccgccacctagctagctctcctagcagaaatggcggtggagatcctcgagtcctgcatggtgacgcccggcgaggcggcgacgcccaagcatggcgtgtggctctccaacctcgacctcctcgtggccaggagccacacgcccaccgtctacgtctaccggcccagccccggcccggccttcttctcgccggacgtcctcaaggccgccctgtccaaggcgctcgtccccttctaccccctcgccggccggctcgctcgggacggcgctggccgcccggagatccactgcaccggcgacggcgcgctcttcgtcaccgcgcgcgccgacgctacgctccaagatctcggcggcttcgtcccgtcggacgagctgcgccggatgcttgtcccctcggtcgacggcggcgacgaccgcgccggcattctggccatgttccaggtgacgttctttaagtgcggcggcgtgtgcgtcggcgcggcgatccaccacacggcggcggacggcctcgcggcgctggacttcgtgaacacctgggccgccatcgcgcgaggcgtcggcgaggcggcgccgcgcccgtggctggaccgcacgctcctccgcgcccgctcccctcccgccgtgcggttcgagcacgccgagtactcccggcgcggcggaggcggttcgaaggcgggcaaggtccagttcgactccgccatcctgcccgtgtccaaggcccagatcgacgcgctcaaggccggcaagaagcagtcgacgttcaaggccgtggtcgcctacgtgtggcggtgcgcgtgcaaggcgcgggggctcgcggcgacggaggacacccgcctgtacatgaccgccgacgcgcgctcccgcgtccgcccgccgctgccggccggctacctcggcaacgccatcttccgcgcgtcgacggtggccaaggtgggcgatgtggtctcggagcctctggacgccgccgcggacaggatctccggcgccaccgcccggctggacgacgagtacatccggtcgctggtggactacctggaccaggtggtgagcgacgcggcggggctgcgcaagggggagtgggtgatgccggagaccgacctgtgggtgataagctggcaggggctgccgatctacgacgcggacttcggctggggccggccggcgttcatgagccgggcgtgcctccaattcagcggcctcgtgtacctcgtccccggccccgacggcgacggacggctcgacgttgtcgtggccatggagcccaagagcttatcccggttcaaggagctgctctacgaggagctcaagtagcactgtagcagactctcgagatgcagcgctccctccgcgctcgcctggaggagcctgcttgcccctgtcgtgctctcgtatctgctggaccaggccttttccttgcattgcatttctgtattgtattttgtactgctagtttgtagagaaaattccctgaatgccaataaaaatgcaactattctttgc

SEQ ID NO: 970 - protein, 426 aa, Panicum virgatum
  misc_feature (1)..(424): Pfam Name: Transferase Pfam Description: Transferase family
  misc_feature: Ceres Clone ID no. 1788581
  misc_feature: Bit score of 478.4 for HMM based on sequences of Figure 31
  misc_feature: Functional Homolog Of SEQ ID NO. 947
MAVEILESCMVTPGEAATPKHGVWLSNLDLLVARSHTPTVYVYRPSPGPAFFSPDVLKAALSKALVPFYPLAGRLARDGAGRPEIHCTGDGALFVTARADATLQDLGGFVPSDELRRMLVPSVDGGDDRAGILAMFQVTFFKCGGVCVGAAIHHTAADGLAALDFVNTWAAIARGVGEAAPRPWLDRTLLRARSPPAVRFEHAEYSRRGGGGSKAGKVQFDSAILPVSKAQIDALKAGKKQSTFKAVVAYVWRCACKARGLAATEDTRLYMTADARSRVRPPLPAGYLGNAIFRASTVAKVGDVVSEPLDAAADRISGATARLDDEYIRSLVDYLDQVVSDAAGLRKGEWVMPETDLWVISWQGLPIYDADFGWGRPAFMSRACLQFSGLVYLVPGPDGDGRLDVVVAMEPKSLSRFKELLYEELK

SEQ ID NO: 971 - DNA, 1645 bp, Zea mays
  misc_feature: Ceres Clone ID no. 245537
  misc_feature: Encodes the peptide sequence at SEQ ID NO. 972
atcgcgggctcacatagcaccgcacagctgaggtgcagtttctactagcagcaatatcatggattctgaggtagtgcatgtggtagagtcgtcgtttgtagtgccgagcgagccgacaccgtcggaggggctctcgctctctccgctggacctcgttctgcccagcagaggccacaccccaacagtctacctgtacagccccagcgatgttgccgccgccgatggtttcttcgacgtggccaggctcaaggaggctatggccaagaccttggtggccttctaccccctcgctggccgcctcggcgtcaacaacgatggcagggtagagatcacctgcaccggcgagggcgcactctttgtggtcgctcatgctgacctcagtgttggtgacatcgaggacgacttcaggccgtcgccgkagctgaggaggctgtttgttccatgcattgagccagcatccatcatattggccatacaggtgactttcctcaagttcggaggtgtggtgctagggacggctctccaccatgccgccagcgatgcctcaagcgcgttccacttcttccagacgtggtcagccttgtgcaagtatggcgaccgcgcgaccgtggagctcccgtgccacgaccgcacactcctccgtgcacggtccccgcctaccgtccacccggacgccctctcgaggttctacccaaagctcaccttctccgacgacccgttaggattaggaccccttgctgttgaagtctttgccatttccaaggaccaggtcgcctccttaaagcgcctctgtggcggcacaagcaccttctgcgccattggcgccctcgtgtggcagtgcgcactcgttgtgcgccggcttccgcccgactccgaagcacgcctcaccttcccagccaacgtccggcgcagggtgaggccacctctcccgagccgctacttcggcaatgcgttggtcaggctgggcgccactggcgcagttcgggatgtcacttcggaggctctggcgtccgtggccggccgcatcaaagacgccgtcgatcgggtggacgacgagctcgtgcggtctgcggtcgactactatgagatgaccgagatggacagccggcctgtgaagggcaccttggcagagacggacctgcagattgttagctggctgggcatgccaatgtacgacgtggatttcggatgggggaagccagcggtgatgtcgcgggcggagtccgtccgtggaggcttggtgtacctaacgagcgacgggccaacaggcagcggcggcgtccgcgtgctcatatgcatggaagctgcaaatatgaaggagctggagcggctgctttacgcaaaactcgatacagcatatgaaaacagaccacattcatattctatcatatattatgcacccatccgaaccccaggctggcagttcatcagtatttgtactccgatatgacacatcatacatctagtagcatgcatttcgccctagtggctagtactagtacgcttcctgctgagaatctgaaataaaaacgagttgtacttcatcattcatccagtatactgtagttgctgccagcaacacccagaaattagtcccaaatggaacaaggatgaatcaatgatacattgatcacaattcacgggc

SEQ ID NO: 972 - protein, 463 aa, Zea mays
  misc_feature (4)..(429): Pfam Name: Transferase Pfam Description: Transferase family
  misc_feature: Ceres Clone ID no. 245537
  misc_feature: Bit score of 472.5 for HMM based on sequences of Figure 31
  misc_feature: Functional Homolog Of SEQ ID NO. 947
  misc_feature (121)..(121): Xaa is any aa, unknown, or other
MDSEVVHVVESSFVVPSEPTPSEGLSLSPLDLVLPSRGHTPTVYLYSPSDVAAADGFFDVARLKEAMAKTLVAFYPLAGRLGVNNDGRVEITCTGEGALFVVAHADLSVGDIEDDFRPSPXLRRLFVPCIEPASIILAIQVTFLKFGGVVLGTALHHAASDASSAFHFFQTWSALCKYGDRATVELPCHDRTLLRARSPPTVHPDALSRFYPKLTFSDDPLGLGPLAVEVFAISKDQVASLKRLCGGTSTFCAIGALVWQCALVVRRLPPDSEARLTFPANVRRRVRPPLPSRYFGNALVRLGATGAVRDVTSEALASVAGRIKDAVDRVDDELVRSAVDYYEMTEMDSRPVKGTLAETDLQIVSWLGMPMYDVDFGWGKPAVMSRAESVRGGLVYLTSDGPTGSGGVRVLICMEAANMKELERLLYAKLDTAYENRPHSYSIIYYAPIRTPGWQFISICTPI

SEQ ID NO: 973 - DNA, 1356 bp, Sorghum bicolor
  misc_feature: Ceres Annot ID no. 8682006
  misc_feature: Encodes the peptide sequence at SEQ ID NO. 974
atggcggtggagatcctcgagtcctgcatggtgaaacccagcgacgacgcggggacgacgacgacacccatgcacgtggtctggctctccaacctcgacctgctcgtggccaggagccacacgcccaccatctacgtgtaccggcggcccgccagccctgacgtcccgggcttcttctcgccggacgtcctcaaggccgccctgtccaaggcgctcgtccccttctaccccctcgccggccggctcgcgcaggacggcgctggtcgcccggagatccactgtaccggcgacggcgcgctcttcgtcaccgcgcgcgccgacgttaccctccaggacctcgccaccgccggcgggctcgccccgtcggatgagctgcggcagatgcttgtcccctccgcagccgacgacggcgaagaccgcgccggcatcttggccatgttccaggtgacgtccttcaagtgcggcggggtgtgcgtgggcgcggcgatccaccacacggcggcggacggcctcgcggcgctcgacttcgtcaacacgtgggccgccatcgccagcaagggcgtcgacgaggccgcgccgcgcccgtggctggaccgcacgctcctccgcgcgcgctcccctcccgacgtgcgcttcgaccacagcgagtactcccggcgcggcggcggcgatccaaaggcggcgagggtcccgttcgactccgccatcctgcccatgtctaaggcccagctggacgcgctcaagggcggcggcggcgaaggcagcaagaaggtgtccacgttcaaggccgtggtcgcccacgtgtggcggtgcgcgtgcacggcgcgcgggctggcgcaagacgaggacacgcgtctgtacatgaccgccgacgcgcggtcccgcgtccggccgccgctcccggaaggctacctcggcaacgccatcttccgcgcgtcgacggtggccaaggcgggggacgtcgtctcggagccgctcgacgccgtcgcgggcagggtgtccggcgccaccgcgcggctggacgacgagtacgtgcggtcgctggtggactgcctggagcaggtggtgagcgacgcggcggggctgcgcaagggggagtgggtcatgccggagaccgacctgtgggtgataagctggcaggggctgcccatctacgacgccgacttcggctggggccgcccggcgttcatgggccgggcgtgcctccagttcagcggcctcgtgtacctcgtccccggccccgacggcgacggccgcctcgacgtcgtcgtggccatggagcccaagagcctggccaggttcaaggagctgttctatgagctcgagggtgcagctgttccgtgcatggccaactga

SEQ ID NO: 974 - protein, 451 aa, Sorghum bicolor
  misc_feature (1)..(441): Pfam Name: Transferase Pfam Description: Transferase family
  misc_feature: Ceres Annot ID no. 8682006
  misc_feature: Bit score of 463.5 for HMM based on sequences of Figure 31
  misc_feature: Functional Homolog Of SEQ ID NO. 947
MAVEILESCMVKPSDDAGTTTTPMHVVWLSNLDLLVARSHTPTIYVYRRPASPDVPGFFSPDVLKAALSKALVPFYPLAGRLAQDGAGRPEIHCTGDGALFVTARADVTLQDLATAGGLAPSDELRQMLVPSAADDGEDRAGILAMFQVTSFKCGGVCVGAAIHHTAADGLAALDFVNTWAAIASKGVDEAAPRPWLDRTLLRARSPPDVRFDHSEYSRRGGGDPKAARVPFDSAILPMSKAQLDALKGGGGEGSKKVSTFKAVVAHVWRCACTARGLAQDEDTRLYMTADARSRVRPPLPEGYLGNAIFRASTVAKAGDVVSEPLDAVAGRVSGATARLDDEYVRSLVDCLEQVVSDAAGLRKGEWVMPETDLWVISWQGLPIYDADFGWGRPAFMGRACLQFSGLVYLVPGPDGDGRLDVVVAMEPKSLARFKELFYELEGAAVPCMAN

SEQ ID NO: 975 - DNA, 1424 bp, Triticum aestivum
  misc_feature: Ceres Clone ID no. 1032064
  misc_feature: Encodes the peptide sequence at SEQ ID NO. 976
aacccaacacctgagtctcttcctcttctcactcgacccgggcgcataaggaaaatggatgtacatcgggaggtggaggtggtggagtcgtgtatggtgacgcccagcaaggacacgcctagccatggcctctggctctcaccactcgacctcaacatggtcaatagaggccacacccctaccgtctacttctacagctccagctccggcgtcgtcgacgacttcttcgacgtgaccaggctgaaggtggcgttggccaaggctctcgtggccttctaccctctcgccggccgcctcagcgtggacggcgacggtcgggcggagatcaactgcgccggccagggcgtgctcttcgtcgtcgcacgctcggacctcaccgtcaacagcttcgtcgacttccagccgtctcccgagctgaggaggctctttgtcccccgcgtcgaggacccgccgtccatcatgtgcgccattcaggtgaccttcatgagatgcggcggggtgaccatggggacggcgctgcaccacaccgccatcgacgctgtaagcgcagcccacttcttccagacgtggtccgccttctccagagacggtgatggagccagcggggtggcgttcgagctcccgtgccacgaccgcaccctcctccgcgcgcgctcaccgcccgtcgtccaccccgacgctctcaccgtgctatgcccgaagctaagccaatccgagcggtcggcccccgcggtcaacgagatcttcctcgtctcgagcgaccaggtggccgctctgaagcgcgcctgcgccggcagcggcgatggtggcggtggccgcgtgagcacgttctgcgcggtgggcgcccacgtgtggcggtccatgtgcgccgcccgccggctgccgccggacgccacgactcggctcaccttcccggcaaatatccggcgcgccctgaggccgcctctgccggcgcgctacttcgggaacgggaccatcagcctgggcaccgccggcaaggtgcgtgacatcgggtcggaagagctgggctccgtcgccgcgcggatcagtggcgccgtccgccggatggacgacgagctggtgcgttccgcgattgactacctggagatgaacggcggccggcagccgggccgtggcgccctgccggagacagagctgagggtggtgagctggctgggcatgccgatgtacgacgcggatttcgggtgggggaagccgctcgcgatgcaccgcgcggtgcagcagcgtggcgggagcgtctgcctcatggacggccccagcggcggcgtgcgcatcctcgtgtctgcagaggctgctgttctcgtcgacttccggcgcctgttgtatgccatcttctagttacttcagccgccgttcgtttggagtctactcggggcaagtggctcattatgcatacatgttac

SEQ ID NO: 976 - protein, 434 aa, Triticum aestivum
  misc_feature (5)..(433): Pfam Name: Transferase Pfam Description: Transferase family
  misc_feature: Ceres Clone ID no. 1032064
  misc_feature: Bit score of 463.9 for HMM based on sequences of Figure 31
  misc_feature: Functional Homolog Of SEQ ID NO. 947
MDVHREVEVVESCMVTPSKDTPSHGLWLSPLDLNMVNRGHTPTVYFYSSSSGVVDDFFDVTRLKVALAKALVAFYPLAGRLSVDGDGRAEINCAGQGVLFVVARSDLTVNSFVDFQPSPELRRLFVPRVEDPPSIMCAIQVTFMRCGGVTMGTALHHTAIDAVSAAHFFQTWSAFSRDGDGASGVAFELPCHDRTLLRARSPPVVHPDALTVLCPKLSQSERSAPAVNEIFLVSSDQVAALKRACAGSGDGGGGRVSTFCAVGAHVWRSMCAARRLPPDATTRLTFPANIRRALRPPLPARYFGNGTISLGTAGKVRDIGSEELGSVAARISGAVRRMDDELVRSAIDYLEMNGGRQPGRGALPETELRVVSWLGMPMYDADFGWGKPLAMHRAVQQRGGSVCLMDGPSGGVRILVSAEAAVLVDFRRLLYAIF

SEQ ID NO: 977 - DNA, 1394 bp, Triticum aestivum
  misc_feature: Ceres Clone ID no. 725011
  misc_feature: Encodes the peptide sequence at SEQ ID NO. 978
agaacgaaacaacaccaatatgtactcgggatcggcactacgggtggtagagtcttgcctcgtcacgcccagcgatgagacgccgcgggaagggctctggctctccgcgctggacctggtgctggctaacagaggccacacccctctcgtccacgtctacagcgccagcgacgacgccgccgccgacggcttcttcaacgtggccaagctcaagaagtccatggccaaggcgctggtgcccttctaccctctcgccggccgcctcggtgcggatcgtgacggccgcatccagatcgactgcaacggggagggcgcgctcttcgtggtagcccgttctgatcgcaccgtcgaggacttcagcggccccacgccgtcgtcggagctgacgaagctgttctgtcctcgcgttcagccgtcgtccatcatgttggccgcgcaggtcaccttcttgaagtgcggcggtgtggtcttagggacagcggtgcaccacgccgccgtggacggctccagcgcgttccatttcattgggacgtgggcaaggtactgcagggacggccagggcgccgtgatcgagctcccgtgccacgaccgcgccctcctccgcgcgcgctccccgcccgccatccaccccgaaaccgtctccatgttctgcagcaagctaagcatgcacgagcacgagtcgtccgtcctcgcgaccaaggtcatcaccatctccggtgaccagctatacgccctcaagcgccactgcggcggcgctagcacattctgcgccgtgagcgccctcgtgtggcagtgcgtatgcatcgcccgccagctggacccggatgccacaacgcgcatgaacttcccggtggacatcaggcatcgcctgaagccgcgcctccctggtcgctacttcggcaacggggtcgtgaacgtgttcgccaccgccgcggtgaaggacgtcgtatcggagacgctggcctccgtcgcgagcagggtgaaggccacgacggagcagctcgacgacgagctactgaggtcggctgtggactacttcgagacggaggcggcgaagggcgggcggccggaggacaggggaaacctgccggagacggagctgcggatgaacagttggttccatctgcccatatatgacgcgaacttcgggtgggggaagccgcgggtgatgacgcgggcggagactgcgcgcggcggctgggtgtacgtgatggctggctgcggcgatggcagcgcgcgcgtacttatctccttggaggcagcgactctcaagaggttcgagcgtgcgcttgctgtatgccgagttcaaaccggcatcgtacatacgaggctgtgatcatatattcatatatgcttgcacgtgattaaatcaatcaattgtcttcgtcgattcc

SEQ ID NO: 978 - protein, 438 aa, Triticum aestivum
  misc_feature (5)..(427): Pfam Name: Transferase Pfam Description: Transferase family
  misc_feature: Ceres Clone ID no. 725011
  misc_feature: Bit score of 436.9 for HMM based on sequences of Figure 31
  misc_feature: Functional Homolog Of SEQ ID NO. 947
MYSGSALRVVESCLVTPSDETPREGLWLSALDLVLANRGHTPLVHVYSASDDAAADGFFNVAKLKKSMAKALVPFYPLAGRLGADRDGRIQIDCNGEGALFVVARSDRTVEDFSGPTPSSELTKLFCPRVQPSSIMLAAQVTFLKCGGVVLGTAVHHAAVDGSSAFHFIGTWARYCRDGQGAVIELPCHDRALLRARSPPAIHPETVSMFCSKLSMHEHESSVLATKVITISGDQLYALKRHCGGASTFCAVSALVWQCVCIARQLDPDATTRMNFPVDIRHRLKPRLPGRYFGNGVVNVFATAAVKDVVSETLASVASRVKATTEQLDDELLRSAVDYFETEAAKGGRPEDRGNLPETELRMNSWFHLPIYDANFGWGKPRVMTRAETARGGWVYVMAGCGDGSARVLISLEAATLKRFERALAVCRVQTGIVHTRL

SEQ ID NO: 979 - DNA, 1362 bp, Sorghum bicolor
  misc_feature: Ceres Annot ID no. 8654153
  misc_feature: Encodes the peptide sequence at SEQ ID NO. 980
atggccgttgaggtcgtcacctccgagctggtggcgccgagcgagaccacgccgcggcgcgcgctctggctgtccaacctcgacctcgccgcgcggaacggctacaccccgacggtctacttcttccgccgccgctgtccccagccccaggacggcagcggcggcgacgacgacgaccgggctcctcagcagccgagcccggacttcttctcggccgacgtgctgcgtgcggcgctggccgccgcgctggtccagttctacccgtttgccggccgcctacgcgcgggccgcgacgacgacgggcgcgccgagatcgactgcaacgccgcgggcgcgctcttcgtcgtcgcgcgttccgccgccgcgctcgaggacttcgacggcttcgcgccgtccaaggccatgaacgacacgttcgtgccgaaatacgactccacggccggccccgacgcaccgttgctcctgcttcaggtcaccttcttcaggtgcggcggcgtgacgctcggcacggccatgcaccccttcgtcatcgacggccgcagcgccttccacttcatccggacgtgggccagcatcgcccgtggagacaccgccgccgccgccgtgcccccgtcgcttgaccgcacgcccctccgggcgcgcccactgccgacggtcctcttcgaccacacctacgagtacggcggccgcacctccaggccaccgacgacaggaggcaacaacaaggcggcggagtacgccagcgcgatcctccgcgtgaccggcgcgcaggccgccgcgctccgtgcccgcgcgggcgcggtgtccaccttccgcgcgctggtggcgcacgtctggcggtgcgcgtgcgcggcgcgcgcgctggctcccgacgccgagtcccggctctacacgatggtggacatgcgcgcccgcctgtcgccgccgctgccggacgccttcttcggcaacgcggtggcgcgcacctccgtgtccgccgtcgtcggcgacctcctggccaacccgctgggtttcggcgcgcgtcggctccgcgcggcgacggggcacggggacgagtacgcgcggtcgctgctggactacctggagacggccgacctggcggcgctgccgcgcggtggactcgccggcacggacctgcgcgtgatcagctggctggggatgccgtcctacgacgcggacttcgggtggggagagccggcgctgctggcgccggcgctcatgtactacccggggttcgtgtacctgttgaactgccccggcaacggcaagggcggcggtgtcgcggtggccgtcgcgctggagcccgaacgcatggagcggttcaaggagctcttcttcgaggagctggccgcgctggagtga

SEQ ID NO: 980 - protein, 453 aa, Sorghum bicolor
  misc_feature (1)..(449): Pfam Name: Transferase Pfam Description: Transferase family
  misc_feature: Ceres Annot ID no. 8654153
  misc_feature: Bit score of 426.9 for HMM based on sequences of Figure 31
  misc_feature: Functional Homolog Of SEQ ID NO. 947
MAVEVVTSELVAPSETTPRRALWLSNLDLAARNGYTPTVYFFRRRCPQPQDGSGGDDDDRAPQQPSPDFFSADVLRAALAAALVQFYPFAGRLRAGRDDDGRAEIDCNAAGALFVVARSAAALEDFDGFAPSKAMNDTFVPKYDSTAGPDAPLLLLQVTFFRCGGVTLGTAMHPFVIDGRSAFHFIRTWASIARGDTAAAAVPPSLDRTPLRARPLPTVLFDHTYEYGGRTSRPPTTGGNNKAAEYASAILRVTGAQAAALRARAGAVSTFRALVAHVWRCACAARALAPDAESRLYTMVDMRARLSPPLPDAFFGNAVARTSVSAVVGDLLANPLGFGARRLRAATGHGDEYARSLLDYLETADLAALPRGGLAGTDLRVISWLGMPSYDADFGWGEPALLAPALMYYPGFVYLLNCPGNGKGGGVAVAVALEPERMERFKELFFEELAALE

SEQ ID NO: 981 - protein, 442 aa, Oryza sativa subsp. japonica
  misc_feature (18)..(439): Pfam Name: Transferase Pfam Description: Transferase family
  misc_feature: Public GI ID no. 115477609
  misc_feature: Bit score of 457.0 for HMM based on sequences of Figure 31
  misc_feature: Functional Homolog Of SEQ ID NO. 947
MESCFVTPHEDTPETIEEEVKEMESCFVTPHEDTPRQGLWLSPLDIVMVSRGHTPTVYFYQRDTATVAADFFEVGRLKEAMAKALVAFYPLAGRLSVDGDGRPEIDCNAEGALFVVAQSKLTVDAFSDLKPSPELRRLFAPRIEPASIMLGVQVTFLSCGGVALGTVLHHVAIDALSAFHFFQTWSSFCRDGEAAMLELPCHERTLLRTRSPPIVHPDVHSMFSLKLNFCEPSDPISTKIFVISKNQLDALKQICGGLSTFCAMSALVWQCMCIARQLPLDAETRVIFPVNIRRRVKPPLPDRYFGNALVDLKVASTVRDIVLGTLDVTAAQIKNALGRLDDEMLQSAIDYNEMAGMPNKHTKGNLPDTELRMVSWLGMPVYDADFGWGKPEMMSRAESVRGGFVYMMDGIDNDGGGVRVLMCMEARKMEEFERLFYAKFAQ

SEQ ID NO: 982 - DNA, 1617 bp, Panicum virgatum
  misc_feature: Ceres Clone ID no. 1903575
  misc_feature: Encodes the peptide sequence at SEQ ID NO. 983
gatgcgtgtgcgagtgagggagcagtggaagcagctagccagcccaagcccagagctactaacaccatggtgatgtattctgacgacgtgcaggtggaggtggtggagagcagcctcgtatccccgagccaggggacgccgggaggacaactctggctctcccccctcgacctcctgctcgtcaacaggggtcacaccccgaccgtctacttctaccgccccgccgccgccgacttcttcgacgtggcacggctcaaggagtccatggccagagccctggtggacttctacccgctcgccgggcgcctcggcgtcgacgccgacggccgcttcgtcatcgactgcaacgccgcgggcgcgctcctcgccgtggctcgctccgaccacctcacggtcgacgacttccgcgacgtcagcccgtcgcccgagttgaaggagctcttcgttccccgcgtcgagccgtcctccatcatgctcgccgtacaggtcaccttcctcaagtgcggcggggtggccttcgggacggcgctgcaccacgccgccgccgacgccatcggctccttccgtttcttccacgcgtggtcggccctgtgcggcgggcgcgacggcggcggcgccatggcggaaacggagctcccgtgccacgaccgcggcctcctccgcgcgcggtcgccgcctttcgtcaacccggacgccttcgccgtgttctgccctaagctaaccctgacggagccctcggggcccgtcgccagcaaggtcctcaccgtctccaaggaccacgtcgccgctctcaagcaggcctgcggcggcgtcagcaccttctgcgcgctcagcgcccacgcgtggcggtgcctgtgctccgcgaggggcctgccggcggacgccaccacccgcctcaccctcccggccaacgtccggcgccgcaccaagccgccgctccccgacagctacttcggcaacgcgctcatctgggtgggcacgtccggcgtggtgcgcgacgtcacctcggaggcgctggccgataccgccgcccggatcaggggcgccgtccgccggatggacgacgacgtggtgcggtcggccatcgactacttcgagctcgcggagaagaacgcccggccgattccgggcagcctgccggagacggagctgagggtgatcagctggctgggcatgcccgtgtacgacgcggactacgggtgggggaagccgcagctcatggtgcgcgccgagtcggagcgctcgggcttcgtgtacctgatgaacgacgacggcggcggcgtgcaggtggtggtgtgcgcggaggccgcaagcctcaaggaattcgagaagctgctgattgcaaagacgatgtgcccatgaaaaatgcgcggcacggcggccaaaccatttgacctcttctctctcggagcgagcattatattcttcaaaacttttaatttaagatgcatgcgtgttctttatggtagccggcctctcgaatctcgatgtagtagcttggaaacgccccttagggcacccgcaacagttatagagcagctctctataatattatccacgtcagagagtacgtcagctatagagagtaatatagatgattcacccagcagattgtct

SEQ ID NO: 983 - protein, 431 aa, Panicum virgatum
  misc_feature (8)..(427): Pfam Name: Transferase Pfam Description: Transferase family
  misc_feature: Ceres Clone ID no. 1903575
  misc_feature: Bit score of 447.1 for HMM based on sequences of Figure 31
  misc_feature: Functional Homolog Of SEQ ID NO. 947
MVMYSDDVQVEVVESSLVSPSQGTPGGQLWLSPLDLLLVNRGHTPTVYFYRPAAADFFDVARLKESMARALVDFYPLAGRLGVDADGRFVIDCNAAGALLAVARSDHLTVDDFRDVSPSPELKELFVPRVEPSSIMLAVQVTFLKCGGVAFGTALHHAAADAIGSFRFFHAWSALCGGRDGGGAMAETELPCHDRGLLRARSPPFVNPDAFAVFCPKLTLTEPSGPVASKVLTVSKDHVAALKQACGGVSTFCALSAHAWRCLCSARGLPADATTRLTLPANVRRRTKPPLPDSYFGNALIWVGTSGVVRDVTSEALADTAARIRGAVRRMDDDVVRSAIDYFELAEKNARPIPGSLPETELRVISWLGMPVYDADYGWGKPQLMVRAESERSGFVYLMNDDGGGVQVVVCAEAASLKEFEKLLIAKTMCP

SEQ ID NO: 984 - DNA, 1781 bp, Zea mays
  misc_feature: Ceres Clone ID no. 221247
  misc_feature: Encodes the peptide sequence at SEQ ID NO. 985
acgcgaatccgcatctccagactccaaccagcgctcgtccctccccgttctttcctcctcccttcagccatcgcagtcgcagcgcaggttcttggctggttgctggtgtcgacagcaaagtccgcaactccaatcctgcctgcgctcctcccgtcctcactcagcacccgcgcacgccgcctgcctgtcgattgagatctctttcacgcccctttctgccatcgcacaactgaggtacggttctttgcttattgcagagtatagtatggatgcccgcagtgagtcgtcgtgtcgtgccttcagtaggagccgcagctagtaacatccattttgctggtcaataagtcgtgggaggaagaagatggattatttgaaggtgcaggtggtagagtcatcatttgtagtgccgagcgagccgacgccaacgaaggcgctctggctctcttgcttggacatggttcagtccaacaaagcccacaccccaacgatccacttgtacagctccaacgatgctgcggcggctgattttttcgacctgggcagactcaagaaggctacggccaaagccttggtggccttctaccccctcgccggacgcctcgtcgacagcgacgatggtaggaaggagatcagctgcaacggcgaaggtgcactctttgttgtcgctcgcgcggatggtgatctcactatcgatgaagtcaagaaattcaagccatcaccagagttgaggaggctgtttattccactcatcgagccatcgtccatcataatggccatacaggtgactttcttgaagtgtggaggtgtggtgttaggaacagctatccaccacgccgccacagacgtttcaagcgcgttccacttttttcagacatggtcggcgttctgcaagcatggtgacagtgctgccgtggagctcccgtgccacgaccgcaccctactccgcgcacggtccccgcccacagtccaccccgacgcgctctccacattgcagcctcggctcgtcctcactgaacccgaggggcctcttgccatcgaaatcttcaccatttccagggatcatgtcgcctccctgaagcagctctgcggtggcacgagcaccttttgcgccgtcagcgctctcatctggcagtgcgcgtgcgttgcacgacggatcccaccggactctcaggtgcgcgtgatgttcccggccgacgtccgccgccggatgaggccgcccctcccgacccactacttcggcaacgcagtgatcaggctatacgccgctggcccggcaggggacattggcacggcggcgttggcatccgtcgctgcccgcatcaagggcgccgtcgagcggatggatgacgagctggtgcggtccgcgattgactactacgagatggccgagacgaacaagagacggactgggacaggcatcttaccaccgacggacctgaatattaccagctggttgggtaggccacagcacgacgcagattttggctggggaaagccgcaatccatgtcgcgggcggagtctgtccgcggcggctctatgcacttgatgaacgacgacggtggtaccggcaacgtccgcgtgctcgtgtgcttggaggctgaaaatataaaggagctaggacggctgctttatgcaaagctctagcaagctgctagtgctatgcactaaaaataatattaataataataaggtttgttactttgcttaaggggaaccatactttttccctcgcgatttattattattaattatggcagtttgaataatgaaaaccatttgc

SEQ ID NO: 985 - protein, 427 aa, Zea mays
  misc_feature (4)..(423): Pfam Name: Transferase Pfam Description: Transferase family
  misc_feature: Ceres Clone ID no. 221247
  misc_feature: Bit score of 444.3 for HMM based on sequences of Figure 31
  misc_feature: Functional Homolog Of SEQ ID NO. 947
MDYLKVQVVESSFVVPSEPTPTKALWLSCLDMVQSNKAHTPTIHLYSSNDAAAADFFDLGRLKKATAKALVAFYPLAGRLVDSDDGRKEISCNGEGALFVVARADGDLTIDEVKKFKPSPELRRLFIPLIEPSSIIMAIQVTFLKCGGVVLGTAIHHAATDVSSAFHFFQTWSAFCKHGDSAAVELPCHDRTLLRARSPPTVHPDALSTLQPRLVLTEPEGPLAIEIFTISRDHVASLKQLCGGTSTFCAVSALIWQCACVARRIPPDSQVRVMFPADVRRRMRPPLPTHYFGNAVIRLYAAGPAGDIGTAALASVAARIKGAVERMDDELVRSAIDYYEMAETNKRRTGTGILPPTDLNITSWLGRPQHDADFGWGKPQSMSRAESVRGGSMHLMNDDGGTGNVRVLVCLEAENIKELGRLLYAKL

SEQ ID NO: 986 - protein, 427 aa, Zea mays
  misc_feature (4)..(423): Pfam Name: Transferase Pfam Description: Transferase family
  misc_feature: Public GI ID no. 194701434
  misc_feature: Bit score of 445.0 for HMM based on sequences of Figure 31
  misc_feature: Functional Homolog Of SEQ ID NO. 947
MDYLKVQVVESSFVVPSEPTPTKALWLSCLDMVQSNKAHTPTIHLYSSNDAAAADFFDLGRLKKATAKALVAFYPLAGRLVDSDDGRKEISCNGEGALFVVARADGDLTIDEVKKFKPSPELRRLFIPLIEPSSIIMAIQVTFLKCGGVVLGTAIHHAATDVSSAFHFFQTWSAFCKHGDSAAVELPCHDRTLLRARSPPTVHPDALSTLQPRLVLTEPEGPLAIEIFTISRDHVASLKQLCGGTSTFCAVSALIWQCACVARRIPPDSQVRVMFPADVRRRMRPPLPTHYFGNAVIRLYAAGPAGDIGTAALASVAARIKGAVERMDDELVRSAIDYYEMAETNKRRTGTGILPRTDLNITSWLGRPQHDADFGWGKPQSMSRAESVRGGSMHLMNDDGGTGDVRVLVCLEAENIKELGRLLYAKL

SEQ ID NO: 987 - protein, 440 aa, Oryza sativa subsp. indica
  misc_feature (10)..(437): Pfam Name: Transferase Pfam Description: Transferase family
  misc_feature: Public GI ID no. 125562404
  misc_feature: Bit score of 451.0 for HMM based on sequences of Figure 31
  misc_feature: Functional Homolog Of SEQ ID NO. 947
MDKALKSEIEGVEEIESCFIAPSEDTPRQGLWLSPLDIVLANRGHTPNVYFYRRDVVAASGNTDFFEVGRIKEAMARALVAFYPLAGRLHVDGGSRPKIECNAEGALFVVARSELTVDDFSELKPSPELRRLFVPRIEPASIVLGIQVTLQVTFLSCGGVALGTVLHHAAIDALSACHFLQTWSSFCRDGEAAVVDLPCHDRTLLRARSPPVVHSDVHSMFSLKLNLCEPSGPISTKIFTISVHQLVALKRICCGMSTFCAVSALVWQCMCVARQLPLDAETRVTFPVNIRRRVTPPLPDRYFGNALVIMKVASTVRDVVSGTLAASAGQIKSTLGRLDGEMLQSVIDYNEIAGMSNKPAKGNLPDTELRMIGWLGMPVYDVDFGWGKPEVMSRAESVRSGFVYMMDGTDNDGGGVRVLMCMEARRMEEFERLLYAKFVQ

SEQ ID NO: 988 - DNA, 1311 bp, Sorghum bicolor
  misc_feature: Ceres Annot ID no. 8754033
  misc_feature: Encodes the peptide sequence at SEQ ID NO. 989
atggatttcgaggtgcaggtgatagagtcgtcgtttgtaacgcccagcgagccggcaccgagaaaggtgctctggctgtcctccttggacctctcgctggccaaccaaggccacactccgacgatctatctgtatagcagctccaacaatgctgctgcggctgatcctttcttcgacgtggctaggctcaaggaggctatggccagagccttggtggccttctaccccctcgccggccgcctcggcgtcaacgatgctgacggcaggatggagatcagctgtaatggcgaaggtgcactctttattgtcgctcaagctgatgatttcactgccaatgacgtaaagaaattcaagccgtcgccagagcttaggaggctgtttgttccactcattgagccattgtcgatcattttggccgtacaggtgactttcttgaagtgtggtggggtggtgttagggacagctctccaccatgccgtcgtcgacgccttaagcgcgtttcacttcttccagacatggtcgaccttctccaagcatggtgactgcgctactgtggagctcccatgccatgatcgtgacctactccgtgcacggtctccgcccacaatccaccccgatgcactcttgacgttctaccctaagcacaccttcttcgacctgtcaggacctcttgccattgaagtcttcactatttccagggaccaggtcgccttcttaaagcacctttgcggtggtggcacgagcaccttctgtgccgtgagcgctctcgtgtggcagtgcacatgcgttgcacgtcggctctcacccgattctgaagcacgcctcacattcccagccaacctccggcaaaggatgaggccgcccctcccgagctgctacatcggcaatgcgatgttttatctaggcatcaccagtgtagtgcgagatattgccacggaggtgttgggatccgtcgctggtcgcatcagaggcgtcatcgaccagatggatgacgagctagtgcactccgctatcgattactttgagatggctgagatggacaaccggcctccaaggggcaccttgccgcagacggtcctgcatatcaccagctggttgggcctgccacaatatgatgcggattttgggtgggggaagccagagttgatgtcacgagcacagagccactgtggggggtttgtgaacttgatgaatgatgacgatggtgctggcagcggtggcgtccgtttgctcatgtgcatggaggctgtaaatataaaggagatagagcgactgctttatgcaaagctagctctagcagcttgctcctag

SEQ ID NO: 989 - protein, 436 aa, Sorghum bicolor
  misc_feature (3)..(429): Pfam Name: Transferase Pfam Description: Transferase family
  misc_feature: Ceres Annot ID no. 8754033
  misc_feature: Bit score of 448.8 for HMM based on sequences of Figure 31
  misc_feature: Functional Homolog Of SEQ ID NO. 947
MDFEVQVIESSFVTPSEPAPRKVLWLSSLDLSLANQGHTPTIYLYSSSNNAAAADPFFDVARLKEAMARALVAFYPLAGRLGVNDADGRMEISCNGEGALFIVAQADDFTANDVKKFKPSPELRRLFVPLIEPLSIILAVQVTFLKCGGVVLGTALHHAVVDALSAFHFFQTWSTFSKHGDCATVELPCHDRDLLRARSPPTIHPDALLTFYPKHTFFDLSGPLAIEVFTISRDQVAFLKHLCGGGTSTFCAVSALVWQCTCVARRLSPDSEARLTFPANLRQRMRPPLPSCYIGNAMFYLGITSVVRDIATEVLGSVAGRIRGVIDQMDDELVHSAIDYFEMAEMDNRPPRGTLPQTVLHITSWLGLPQYDADFGWGKPELMSRAQSHCGGFVNLMNDDDGAGSGGVRLLMCMEAVNIKEIERLLYAKLALAACS

SEQ ID NO: 990 - DNA, 1302 bp, Sorghum bicolor
  misc_feature: Ceres Annot ID no. 8658583
  misc_feature: Encodes the peptide sequence at SEQ ID NO. 991
atggatttcgaggtgcaggtgatagagtcgtcgtttgtaacgcccagcgagccggcaccgaggaaggagctctggctgtcctccttggacctctggctggccaaccaaggccacactccgacgatctatctctacagcagctccaaggatgctgctgcggctgatcatttcttcgacgtggctaggctcaaggaggctatggccagagccttggtggccttctaccccctcgccggccgcctcggcgtcaacgacgccgacggcaggatggagatcagctgtaatggcgaaggtgcactctttgttgtcgctcaagctgatgatctcactgccgatgacgtcaagaaattcaagccgtcgccagagctgaggcggctgtttgttccactcgttgagccatcgtccatcatgttggccgtacaggtgactttcttgaagtgtggaggggtggcgttagggaccgctctccaccacatcgccgttgatgctttaagcgcgttccacttcttccagacatggtcggccttctccaagcatggtgaccacgctaccgtggagctcccttgccatgaccgtacccgactatgtgcacggtccccgcccacagtccatcccgatgcactcttgacgttctaccctaagcatgccttctccgaccctttggcgttgggacctcttgccatccaagtcctcaccatttccaaggaccagatcgcctccttgaagctcctctgcggcggtggcacgacgagcaccttctgcgccgtgagcgctctcatgtggcagtgcacatgcattgcacgccagctcccacctaattctcaagcgcgcctcgcgttcccggctgacctccggcgtagaatgagaccgcccctccagagccactactttggcaacgcggtgttcaggctatgcgtcactggcgtggcatgggatattgccacagagaagttgggatccgtcgctggccgtatcagaggcgccatcgatcgaatggatgatgagctagtgcgctctgcgatcgactactttgagatggacgagaaggacaaccggcctccgaggggtaccttgccgctgacggacctgcatatttcaagttggttgggtaggccacagtacgatgcagatttcggatgggggaagccagagttgatgtcgctggcagagaaccaccgtggggggtttgtgtttttgatgaacaatgacgatggtgctggcagcggcggcgtccgtctgctcatgtgcatggaggctgtaaatataaaggagctagtgcggctgctttatgcaaagctctag

SEQ ID NO: 991 - protein, 433 aa, Sorghum bicolor
  misc_feature (3)..(432): Pfam Name: Transferase Pfam Description: Transferase family
  misc_feature: Ceres Annot ID no. 8658583
  misc_feature: Bit score of 440.2 for HMM based on sequences of Figure 31
  misc_feature: Functional Homolog Of SEQ ID NO. 947
MDFEVQVIESSFVTPSEPAPRKELWLSSLDLWLANQGHTPTIYLYSSSKDAAAADHFFDVARLKEAMARALVAFYPLAGRLGVNDADGRMEISCNGEGALFVVAQADDLTADDVKKFKPSPELRRLFVPLVEPSSIMLAVQVTFLKCGGVALGTALHHIAVDALSAFHFFQTWSAFSKHGDHATVELPCHDRTRLCARSPPTVHPDALLTFYPKHAFSDPLALGPLAIQVLTISKDQIASLKLLCGGGTTSTFCAVSALMWQCTCIARQLPPNSQARLAFPADLRRRMRPPLQSHYFGNAVFRLCVTGVAWDIATEKLGSVAGRIRGAIDRMDDELVRSAIDYFEMDEKDNRPPRGTLPLTDLHISSWLGRPQYDADFGWGKPELMSLAENHRGGFVFLMNNDDGAGSGGVRLLMCMEAVNIKELVRLLYAKL

SEQ ID NO: 992 - DNA, 1299 bp, Sorghum bicolor
  misc_feature: Ceres Annot ID no. 8658570
  misc_feature: Encodes the peptide sequence at SEQ ID NO. 993
atggatttcaaggtgcaggtggtagagtcgtcatttgtaacgccgaccgagccggcaccgaggaaggggctttggctttcttctttagacctcgtgcaggccaacaaaggccacactccaacgatctacctgtacagctccaacgatgttggtgctgctgatttcttcaacgtggccaggctcaaggaggctatggccagagccttggtggccttctaccccctcgccggccgcctcggcgtcagcaacgacgacggtaggatggagatcagctgtaacggcgaaggtgcactctttgttatcgctcacgcggatgatctcagtatcgaggacgtcaaggaattcaagccatcgccggagctgaggagactgtttgttccacgtattgagccatcgtccattatactggccatacaggtgactttcttgaagtgtggaggggtggcgttaggaacagctctccaccacgtcgccatagatgcttcaagtgcgttccactttttccaaacatgggcagccttctccaagcatggtgaccgtgctgccgtggagttcccgtgccatgaccgcaccctactccgtgcacggtctccgcccacggtccaccccgacgcactcttgacattgcaccctaagctcatcttctctaaccctgagggacctcttgccttcgaagtcttcaccatttctagggatcaggtcgcctccttgaagcacctctgctgtggcatgagcaccttttgcaccctgagtgctctcatctggcagtgcacgtgcgttgtgcgccagcttccgccggaatctgaagtgcgcatcgtgtttccagccgacctccggcgccggatgaggccgcccctcccagaccactacttcggcaacgcagtgttcaggctatgcgccactggcgcggcaggggaaattggcacggtggcgttgggatccgttgctgcccgcatcaagggcgccatcgagcggatggatgacgagctagtgcggtccgcgattgactacttcgagatggccgagatggacaagagaccagctttgagagggaccttgccaccgacagatatgcatattactagttggttcggtaggccacagtacgatgcagattttgggtggggaaagccgcaattcatgtcgagggcggagtccgtccgtggtggctatgtgcacttgatgaacgatgaggggacaacggatgatggtggtggcagcggcgatgtccgcatgctcgtgtgcatggaggctgtaaatataaaggagctagggcggctgctttatgcaaagctctag

SEQ ID NO: 993 - protein, 432 aa, Sorghum bicolor
  misc_feature (3)..(428): Pfam Name: Transferase Pfam Description: Transferase family
  misc_feature: Ceres Annot ID no. 8658570
  misc_feature: Bit score of 441.5 for HMM based on sequences of Figure 31
  misc_feature: Functional Homolog Of SEQ ID NO. 947
MDFKVQVVESSFVTPTEPAPRKGLWLSSLDLVQANKGHTPTIYLYSSNDVGAADFFNVARLKEAMARALVAFYPLAGRLGVSNDDGRMEISCNGEGALFVIAHADDLSIEDVKEFKPSPELRRLFVPRIEPSSIILAIQVTFLKCGGVALGTALHHVAIDASSAFHFFQTWAAFSKHGDRAAVEFPCHDRTLLRARSPPTVHPDALLTLHPKLIFSNPEGPLAFEVFTISRDQVASLKHLCCGMSTFCTLSALIWQCTCVVRQLPPESEVRIVFPADLRRRMRPPLPDHYFGNAVFRLCATGAAGEIGTVALGSVAARIKGAIERMDDELVRSAIDYFEMAEMDKRPALRGTLPPTDMHITSWFGRPQYDADFGWGKPQFMSRAESVRGGYVHLMNDEGTTDDGGGSGDVRMLVCMEAVNIKELGRLLYAKL

SEQ ID NO: 994 - DNA, 1311 bp, Sorghum bicolor
  misc_feature: Ceres Annot ID no. 8658589
  misc_feature: Encodes the peptide sequence at SEQ ID NO. 995
atggatttcgaggtgcaggtggtagaatcgtcgattgtaacgcccagcgagccagcaccgaggaagggactctggctctcttccttggacctctggcaggccaaccatggccacactccaacgatctacctgtacagaagctccagcgatgttgctgcggctgatcatttctttgacgtggccaagctcaaggaggctatggccagagccttggtggccttctaccccctcgccggccgcctcggcatcaacgataacgacggtaggatggagatcagctgtaacggtgaaggtgcactctttgttgtcgctcaggctcatgatctcactgtcgaagacgtcaagaaattcaagccgtcgccagagcttaggaggctgtttgttccactcattgagccattgtccatcattttggccgtacaggtgactttcttgaagtgtggtggggtggtgttagggacagctctccaccatgccgccgtcgacgccttaagcgcgttccacttcttccagacatggtcggccttctccaagcatggcgaccacgctactgtggagctcccatgccatgaccgtgacctactccgtgcacggtccccgcccacaatccatcccgatgcactcttgatgttctaccctaagcacaccttctccgacctgtcaggacctcttgccattgaagtcttaactatttccagagaccaggtcgcctccttaaagcacctttgcggtggcggcacgagcaccttttgtgccgtgagcgctctcatgtggcagtgcacgtgcattgcacgtcggctctcacctgattctgaagcacgcctcactttcccggccgacctccggcaaaggatgaggccgtccctcccgagctgctacatcggcaatgcgatgttttggctaggcatcaccagcgtagtgggagatattgccacagaggtgttaggatccgttgctggccgcatcagaggcgccatcgatcagatggatgacgagctagtgcgctccgctatcgattactttgagatggccgagatggacaaccagcctccaaggggcaccttgccgcagacggtcctgcatattaccagctggttgggcaggccacaatacgatgcagattttgggtgggggaagccagagttgatgtcacgggcggagagccactgcggggggtttgtgaacttgatgaacaatgatgatggtgctggtagcggtggcgtccgtttgctcatgtgcatggaggctgtaaatataaaggagatagagcgactgctttatgcaaagctagctctagcagcttgctactag

SEQ ID NO: 995 - protein, 436 aa, Sorghum bicolor
  misc_feature (3)..(429): Pfam Name: Transferase Pfam Description: Transferase family
  misc_feature: Ceres Annot ID no. 8658589
  misc_feature: Bit score of 444.2 for HMM based on sequences of Figure 31
  misc_feature: Functional Homolog Of SEQ ID NO. 947
MDFEVQVVESSIVTPSEPAPRKGLWLSSLDLWQANHGHTPTIYLYRSSSDVAAADHFFDVAKLKEAMARALVAFYPLAGRLGINDNDGRMEISCNGEGALFVVAQAHDLTVEDVKKFKPSPELRRLFVPLIEPLSIILAVQVTFLKCGGVVLGTALHHAAVDALSAFHFFQTWSAFSKHGDHATVELPCHDRDLLRARSPPTIHPDALLMFYPKHTFSDLSGPLAIEVLTISRDQVASLKHLCGGGTSTFCAVSALMWQCTCIARRLSPDSEARLTFPADLRQRMRPSLPSCYIGNAMFWLGITSVVGDIATEVLGSVAGRIRGAIDQMDDELVRSAIDYFEMAEMDNQPPRGTLPQTVLHITSWLGRPQYDADFGWGKPELMSRAESHCGGFVNLMNNDDGAGSGGVRLLMCMEAVNIKEIERLLYAKLALAACY

SEQ ID NO: 996 - DNA, 1371 bp, Sorghum bicolor
  misc_feature: Ceres Annot ID no. 8658592
  misc_feature: Encodes the peptide sequence at SEQ ID NO. 997
atggcctccggctgcaaatctggtaggtcgaacggttcgtgtgagaagaaaatgaaatcaatggattctgagctgcagctgcaggtgctagagtcatcatttgtaacgccgagcgagtcgacaccgagtcaggggctgtggctctcttccttggacctcatgcatgccaacagaggccacacctcaacaatctacttgtacagctcctccagtgatgctgccgcgggcgccgctgatttcttcgacgtggccaggctcaaggaggctatggccagagccttggtggccttctaccccctcgccggccgcctcggcgtcaacgacgatgacggtaggatggagatcagctgtaacggcgaaggtgcgctctttgttgtcgctcatgctgatgatctcactgtccatgacgtcaaggaattcaagccatcgcctgaacagaggaggctgtttgttccacgcattgagccatcgtccatcatgttggctgtacaggtgactttcttgaagtgtggaggggtggcattaggggcagctctccaccatgtcgccgttgacgccttaagtgcattccacttctttcaaacatggtcggccttctccaagcatggcgaccacgctaccctggagctcccttgccatgaccgtaccctactccgcgcgcggtcaccccccacggtccatccggatgcactcttgacattctaccctaagcacaccttgtccaacccatcaggacctcttgccatccaaatcatcaccatttccaaggaccagatcacctccttgaagcacctctgtggtggcacaagcaccttctgcgccgtaagcgctctcgtgtggcagtgcgcgtgcgttgcacgccggcccccaccagagtccgaagcgcgcctcacgttcccggttgacatccggcgaagagcgaggccgcccctcccaagctgctatttcggcaatgcggtgttttggctaggtgtcaccggcgcggcacgagatattgccacggaggcgttggcatccgttgctggtcgcatcaagagtactattgatcggatggacgatgagctggtgcgctctgcgatcgactactttgagatggccgagatggacagccagcctccacgaggcaccttgccacaaaccgacctgcatattaccagctggttcgggaggccacagtacgatgcagatttcggatggggaaagccagagttgatgtcgctggcggagaacagccgtggggggtttgtctacttgatgaacgatgaggggaaagcggacgatggtgctggcagcggcgacgtccgtgtgctcatgtgcatggaggctgtaaatataagggaactagagcagctactttacacaaagctctag

SEQ ID NO: 997 - protein, 456 aa, Sorghum bicolor
  misc_feature (25)..(455): Pfam Name: Transferase Pfam Description: Transferase family
  misc_feature: Ceres Annot ID no. 8658592
  misc_feature: Bit score of 439.2 for HMM based on sequences of Figure 31
  misc_feature: Functional Homolog Of SEQ ID NO. 947
MASGCKSGRSNGSCEKKMKSMDSELQLQVLESSFVTPSESTPSQGLWLSSLDLMHANRGHTSTIYLYSSSSDAAAGAADFFDVARLKEAMARALVAFYPLAGRLGVNDDDGRMEISCNGEGALFVVAHADDLTVHDVKEFKPSPEQRRLFVPRIEPSSIMLAVQVTFLKCGGVALGAALHHVAVDALSAFHFFQTWSAFSKHGDHATLELPCHDRTLLRARSPPTVHPDALLTFYPKHTLSNPSGPLAIQIITISKDQITSLKHLCGGTSTFCAVSALVWQCACVARRPPPESEARLTFPVDIRRRARPPLPSCYFGNAVFWLGVTGAARDIATEALASVAGRIKSTIDRMDDELVRSAIDYFEMAEMDSQPPRGTLPQTDLHITSWFGRPQYDADFGWGKPELMSLAENSRGGFVYLMNDEGKADDGAGSGDVRVLMCMEAVNIRELEQLLYTKL

SEQ ID NO: 998 - protein, 431 aa, Oryza sativa subsp. indica
  misc_feature (2)..(426): Pfam Name: Transferase Pfam Description: Transferase family
  misc_feature: Public GI ID no. 125554336
  misc_feature: Bit score of 386.5 for HMM based on sequences of Figure 31
  misc_feature: Functional Homolog Of SEQ ID NO. 947
MATVDVLTSEVVVPAGETPAGAVWLSNLDLAARRGYTPTVFFYRHNGEPGFFAADAMRDSLARALVAFYPVAGRLGLDGDGRVQVDCTGEGAVFATARSGHYALDDLMGEFVPCDEMRDLFVPPAPAAASCPRGGALLLVQVTYLRCGGVVLGMALHHSIADGRSAAHFVETWASIARGAPAADAPVPPCFDHRLLAARAPARTVLYDHPEYKPEPAARAATASTYASAIITLTKQQVGALRAACAGASTFRAVVALVWQCACRARALPPEAETRLHSMIDTRQRLSPPLPPGYFGNAVIRTSTAATAGEVVSSPVGHAARRARAATSQGEDYARSVVDYLEGVDAMNLPRSGVSRADLRAISWLGMSLADADFGWGSPAFMGPAIMYYSGFVYVMNAPGKDGAVALALSLEPESMPEFRKVFADEVARLA

SEQ ID NO: 999 - DNA, 1350 bp, Sorghum bicolor
  misc_feature: Ceres Annot ID no. 8658566
  misc_feature: Encodes the peptide sequence at SEQ ID NO. 1000
atgggtttcgaggtgcaggtgatagagtcgtcgtttgtaacgcccagcgagccggcaccgaggaaggggctctggctgtcctccttggacctctggctggccaaccaaggccacactccgacgatctatctgtatagcagctccaacgatgctgctgcggctgatcatttcttcgacgtggctaggctcaaggaggctatggccagagccttggtggccttctaccccctcgccggccgcctcggcgtcaacgacgccgacggcaggatagagatcagctgtaatggcgaaggtgcactctttgttgtcgctcgagctgatgatttcactgccaatgacgtaaagaaattcaagccgtcgccagagcttaggaggctgtttgttccactcattgagccattgtccatcattttggccgtacaggtgacattcttgaagtgtggtggggtggtgttagggacagctctccaccatgccgctgttgacgccttaagtgcgttccacttctttcagacatggtcggccttctccaagcatggcgaccgagctactttggagctcccatgccatgaccgtgacctactccgtgcacggtctccgcccacagtccaccccgatgcactcttgacgttctaccctaagcacaccttcttcgacctgtcaggacctcttgccattaaagtctttactatttccagggaccaggtcgcctccttaaagtacctttgcggtggcggcacgagcaccttctgtgccgtgagtgctctcgtgtggcagtgcacgtgcattgcacgtcggctctcacctgattctgaagcacgtctcacgttcccggctgacctccgacaaaggatgaggccgcccctcccaagcagctacatcggcaatgcggtattttatctaggcatcaccagcacagggcaagatattgccacggaggtgttgggatccgtcgctggccgcatcagaggcgccatcgatcagatggatgacgagctagtgcgctccgctatcgattactttgagatggccgagatggatagccgacctccaaggggcaccttgtcgcagacggtcctgcatattttcagctggttgggcagaccacaatacgatgcagattttgggtgggggaagccagagttgatgtcactggcggagagccaatgcgggggatttgtgaacttgatgaacgatgacgatggtgctggcaacggtggcgtccgtttgcacatgtgcatggaggctgtaaatataaaggagatggagcaactactttatgcaaagctagctctagcagcttttgctactaggaaaggtacttcatacgatgattacctgtctcgataa

SEQ ID NO: 1000 - protein, 449 aa, Sorghum bicolor
  misc_feature (3)..(426): Pfam Name: Transferase Pfam Description: Transferase family
  misc_feature: Ceres Annot ID no. 8658566
  misc_feature: Bit score of 437.7 for HMM based on sequences of Figure 31
  misc_feature: Functional Homolog Of SEQ ID NO. 947
MGFEVQVIESSFVTPSEPAPRKGLWLSSLDLWLANQGHTPTIYLYSSSNDAAAADHFFDVARLKEAMARALVAFYPLAGRLGVNDADGRIEISCNGEGALFVVARADDFTANDVKKFKPSPELRRLFVPLIEPLSIILAVQVTFLKCGGVVLGTALHHAAVDALSAFHFFQTWSAFSKHGDRATLELPCHDRDLLRARSPPTVHPDALLTFYPKHTFFDLSGPLAIKVFTISRDQVASLKYLCGGGTSTFCAVSALVWQCTCIARRLSPDSEARLTFPADLRQRMRPPLPSSYIGNAVFYLGITSTGQDIATEVLGSVAGRIRGAIDQMDDELVRSAIDYFEMAEMDSRPPRGTLSQTVLHIFSWLGRPQYDADFGWGKPELMSLAESQCGGFVNLMNDDDGAGNGGVRLHMCMEAVNIKEMEQLLYAKLALAAFATRKGTSYDDYLSR

SEQ ID NO: 1001 - DNA, 1308 bp, Sorghum bicolor
  misc_feature: Ceres Annot ID no. 8653415
  misc_feature: Encodes the peptide sequence at SEQ ID NO. 1002
atggagtctgatgacaaagttgaagtgctggagtcatgcttcgtggcgccgagagaggcaacgccgacgaaggggctccggctctctcccttcgacctcgcgctggccaacagaggccacactcctcttgtctacgtctaccgttccggcgccgcctttttcgacgtggtcaggctcaaatcggcgatggccaaggccttggtagccttctacccactcgccggccgccttggcgccggcgatgatggcagggtacagatatactgcaacggcgagggccctctctttgttgtcgctcgctcttttgtcacagctaacagcatcaacttctccaaaccgtcgccggagctgaggaggatgtttgttcctcgcattgagccgccgtccctgatcctggcagtgcaggtgactttcctgaagtgtggagcggtggcgttaggagtggccgtgcaccacgccgccgtggacgccatgagcttattccacttcatgcagacatggtcggccatcaccagggacgacggtgacggcgctgccgtggagctcgagctcccctgccacgaccgcacccttctccgcgcacggtcgccaccgtcggtgcacccctcagcgctgtcggtgttgtgccccagagtcgtcttctccgagacgtcggaaccaaccgccaccgaggcgtttaccatctccgccgacgagctcgccacgctaaagcggctctgtggtggggcaagcaccttctgctccgtgagcgccctggtgtggcggtgccggtgcgcaagcatcgcacggcggctccctccggacgccgaggcacgactcagcttcccggccaacgtccggcgccacgtgacgccgccgctgccagaccgctacttcggcaacgccctggtatggctgggcgcgaccgcggcggcgcgggacgtcgcgtcggagccgctggcgtccgtcgccgagcgcgtcggcggcgccgtcgccaggatggacgacgagctggtgcggtccgcggtcgactacctcgagctcgccgacgaggtggacagccggccgctgaggggcagcatgccggagacggagctccgggtcatcagctggcttgggatgcccgcgtatgaggcggatttcggcggcgggagtccgcaggtgatgtcacgggccgagtccgtccgcggcgggtttgtgtacgtcatgaacgacgggaggcctgcagacagcagcggcgtccgcgtggtcatgtgcaccaaggctgcggacatgaaggagttcgaacggctgctttatgcaaacattgcaaagccatcaaagctctag

SEQ ID NO: 1002 - protein, 435 aa, Sorghum bicolor
  misc_feature (5)..(428): Pfam Name: Transferase Pfam Description: Transferase family
  misc_feature: Ceres Annot ID no. 8653415
  misc_feature: Bit score of 426.9 for HMM based on sequences of Figure 31
  misc_feature: Functional Homolog Of SEQ ID NO. 947
MESDDKVEVLESCFVAPREATPTKGLRLSPFDLALANRGHTPLVYVYRSGAAFFDVVRLKSAMAKALVAFYPLAGRLGAGDDGRVQIYCNGEGPLFVVARSFVTANSINFSKPSPELRRMFVPRIEPPSLILAVQVTFLKCGAVALGVAVHHAAVDAMSLFHFMQTWSAITRDDGDGAAVELELPCHDRTLLRARSPPSVHPSALSVLCPRVVFSETSEPTATEAFTISADELATLKRLCGGASTFCSVSALVWRCRCASIARRLPPDAEARLSFPANVRRHVTPPLPDRYFGNALVWLGATAAARDVASEPLASVAERVGGAVARMDDELVRSAVDYLELADEVDSRPLRGSMPETELRVISWLGMPAYEADFGGGSPQVMSRAESVRGGFVYVMNDGRPADSSGVRVVMCTKAADMKEFERLLYANIAKPSKL

SEQ ID NO: 1003 - protein, 433 aa, Oryza sativa subsp. indica
  misc_feature (2)..(427): Pfam Name: Transferase Pfam Description: Transferase family
  misc_feature: Public GI ID no. 125554335
  misc_feature: Bit score of 404.5 for HMM based on sequences of Figure 31
  misc_feature: Functional Homolog Of SEQ ID NO. 947
MATVEVLTSEVVVPAEETPAGAVWLSNLDLAARRGYTPTVYFYRRNGDDEAAFFAADAVRDGLARALVPFYPLAGRLGLAGGGEDGRVQIDCTGEGAVFVTARSGHYALDDLMNEFVPCDEMRDLFVPPTPAPNPPCALLLVQVTHLRCGGVVLGMALHHSVVDARSAAHFAETWASIVRGAPAGDAPVPPCFDHKLLAARPARAVLYDHPEYKPEPPAHAATASTYASAIITLTKQQVGALKAACAGASTFRAVVALVWQCACRARALPPEAETRLYSMIDMRQRLSPPLPPGYFGNAVIRTSTSATVGEVVSNPVGHAARRARAVTSQGDDYARSLVDYLEGVDAMNLPRSGISRAHLRAISWLGMSLADADFGWGSPAFMGPAIMYYSGFVYVMNAPGKDGAVALALSLEPESMPEFRKVFAEEVARLGL

SEQ ID NO: 1004 - DNA, 1314 bp, Sorghum bicolor
  misc_feature: Ceres Annot ID no. 8735477
  misc_feature: Encodes the peptide sequence at SEQ ID NO. 1005
atggcgccgacggtggaggtgctgacgtcggaggtggtcgtcccggccgaggagactccggcgggcagtatctggctttccaacctggacctcgccgcgcgccgcgggtacacgcccacggtctacttcttccggcccaacggtgacccggggttcttcgcggcggacgtcgtcaagggcagcctcgccagggcgctggtcccgttctacccgctcgcggggcggctcggggccgacggcgccaccgggcgcgtccaggtggactgcaccggcgagggcgcggtgttcgtgacggcgcggtgcgactacgcgctggacgacctgatgcgcgagttcgtgccgtgccgcgccatgcgggacctgctggtgcccccgacgcccgcgccgaacccgccgtgcgcgctcctgttcgtgcaggtcacgtacctgcgctgcggcggcgtcgtgctcgcgctgtccatgcaccactccctgtgcgacgcccgtggcgccgcgcacttcctcgagacgtgggcgagcatcgcgcgcggggacgacgccgccgcgaacgctcccgtgccgccgtgcttcggctacgggctgctcgccgcgcgcccgggcccggcgcgcgcggtgctgtacgaccacccggagtacaagccggagcctgtgttggacgccgtcgccgccgccgcgtccgacgacgactacgcgagcgccatcatcgtcatgaccaaggcgcaggtgggcgcgctgagggcgcggtgcccgggggcgtccacgttccgcgccgtggtggcgctggtgtggcagtgcgtgtgccgcgcgcgcgcgctgccgcccggcgccgagacgcggctctactccatgatcgacatgcggtcgcgcctggacccgccgctgccgccggggtacttcggtaacgcggtggtgcgcacgtcggtgtccgccacggcgggggaggtggtgggcaaccccgtggggtacgcggcgcggcgcgcgctggcggcgacgagccagggggacgactacgcgcggtcgctggtggactacctggaaggcgtggacgccatgaacctgccccggagcggcatctcgcgggcgcacctccgcgccatcagctgggtgggcatgtcgctgtacaaggcggacttcgggtggggagcgccggcgttcatggggccggcgctcatgtactacagcggcttcgtgtacgtcatgaacgcggccgggaaggaaggtgccctcgcgctcgtgctgtcgctggaaccggagaccatgccggagttcaggaaggtgttcgccgaggagctcgccgggctggaggtgctgtag

SEQ ID NO: 1005 - protein, 437 aa, Sorghum bicolor
  misc_feature (3)..(431): Pfam Name: Transferase Pfam Description: Transferase family
  misc_feature: Ceres Annot ID no. 8735477
  misc_feature: Bit score of 396.2 for HMM based on sequences of Figure 31
  misc_feature: Functional Homolog Of SEQ ID NO. 947
MAPTVEVLTSEVVVPAEETPAGSIWLSNLDLAARRGYTPTVYFFRPNGDPGFFAADVVKGSLARALVPFYPLAGRLGADGATGRVQVDCTGEGAVFVTARCDYALDDLMREFVPCRAMRDLLVPPTPAPNPPCALLFVQVTYLRCGGVVLALSMHHSLCDARGAAHFLETWASIARGDDAAANAPVPPCFGYGLLAARPGPARAVLYDHPEYKPEPVLDAVAAAASDDDYASAIIVMTKAQVGALRARCPGASTFRAVVALVWQCVCRARALPPGAETRLYSMIDMRSRLDPPLPPGYFGNAVVRTSVSATAGEVVGNPVGYAARRALAATSQGDDYARSLVDYLEGVDAMNLPRSGISRAHLRAISWVGMSLYKADFGWGAPAFMGPALMYYSGFVYVMNAAGKEGALALVLSLEPETMPEFRKVFAEELAGLEVL

SEQ ID NO: 1006 - DNA, 1573 bp, Panicum virgatum
  misc_feature: Ceres Clone ID no. 1995174
  misc_feature: Encodes the peptide sequence at SEQ ID NO. 1007
atcgccagctgctcctcagcaccacgaggatcggatcgatcggaggcaatggcgacggtggaggtgttgacgtcggaggtggtcgtgccagccgaggagacgccgtcgggcggcctctggctgtccaacctggacctcgccgcgcgccgcgggtacacgcccacggtgtacttcttccggtccaacggtgagccggggttcttcgccgcggacaccgtcaagggcagcctcgccagtgcgctggtcgcgttctacccgcttgccgggcgtctcggcgtcgacggcgccgggcgcgtccaggtcgactgcaccggcgagggcgcggtgttcgtgaccgcgcggtcggggtacgcgctggacgacctgatgcgcgagttcgtgccgtgccgcacgatgcgggacctgctcgtgcccgcgacgcccacgccggacccgccgtgcgcgctgctgttcgtgcaggtcacgtacctgcgctgcggcggcgtcgtgctggggcaggcgatgcaccactcggtgtgcgacgcgcggggcgccgcgcatttcttcgagacgtgggcgagcatcgcgcgcggggacgccgccgcggacgcgcccgtgccgccgtgcttcgaccacggcctgctcgcggcgcgccccggccccgcgcgcgcggtgctgtacgaccacccggagtacaagcccgacccggagccgccggtggacgccgccggcgggtccgactacgcgagcgccatcctcaccatgaccagggcgcaggtgggcgcgctcaaggcgcggtgcccgggcgcgtccacgttccgcgccgtggcggcgctggtgtggcggtgcgcgtgccgggcgcgggcgctgcccccggaggcggagacgcggctctactccatgatcgacatgcgcgcgcgcctggacccgccgttgccggcgggctacttcggcaacgcggtggtgcgcacgtcggtctccgccacggccggggaggtgctgtccaacccggtcggccacgccgcgcggcgcgcgctcgcggtgacgagccagggcggcgactacgcgcggtcgctggtggactacctggagggcgtggacgccatggacctgccccggagcggcatctcgcgggcgcacctgcgcgccatcagctggatgggcatgtcgctgcacgactccgacttcggctggggcgcgccggcgttcatggggccggcgctcatgtactacagcggcttcgtgtacgtgctgaacgcggcgggcaagggcggcggcctcgcgctcgtgctgtcgctggagcccgagaccatgccggagttcaggaaggtcttcgccgaggagctcgcgcgcctggaggttgtgtaggggtatgcacaactgcgtatattactgttgaatgttgattcatggcgttccgtggaaggttacgaacgtccatggcatattgttgtacatgcacgtgagcgagacagactgttcagttctaagatgtgaagtctttggatgccaagtcatgcgtgaatgtttgaatgtctatatgggtttcaatatatataaccaataaactgaacacatttttttttttgatact

SEQ ID NO: 1007 - protein, 432 aa, Panicum virgatum
  misc_feature (2)..(426): Pfam Name: Transferase Pfam Description: Transferase family
  misc_feature: Ceres Clone ID no. 1995174
  misc_feature: Bit score of 403.7 for HMM based on sequences of Figure 31
  misc_feature: Functional Homolog Of SEQ ID NO. 947
MATVEVLTSEVVVPAEETPSGGLWLSNLDLAARRGYTPTVYFFRSNGEPGFFAADTVKGSLASALVAFYPLAGRLGVDGAGRVQVDCTGEGAVFVTARSGYALDDLMREFVPCRTMRDLLVPATPTPDPPCALLFVQVTYLRCGGVVLGQAMHHSVCDARGAAHFFETWASIARGDAAADAPVPPCFDHGLLAARPGPARAVLYDHPEYKPDPEPPVDAAGGSDYASAILTMTRAQVGALKARCPGASTFRAVAALVWRCACRARALPPEAETRLYSMIDMRARLDPPLPAGYFGNAVVRTSVSATAGEVLSNPVGHAARRALAVTSQGGDYARSLVDYLEGVDAMDLPRSGISRAHLRAISWMGMSLHDSDFGWGAPAFMGPALMYYSGFVYVLNAAGKGGGLALVLSLEPETMPEFRKVFAEELARLEVV

SEQ ID NO: 1008 - protein, 438 aa, Zea mays
  misc_feature (3)..(432): Pfam Name: Transferase Pfam Description: Transferase family
  misc_feature: Public GI ID no. 194707128
  misc_feature: Bit score of 386.8 for HMM based on sequences of Figure 31
  misc_feature: Functional Homolog Of SEQ ID NO. 947
MAPTVEVLTSEVVVPAEETPAGSIWLSNLDIAARRGYTPTVYFFRPNGDPGFFAADVVKGSLARALAAFYPLAGRLGLDGTGRVQVDCTGEGAVFVTARSDYALDDLMREFVPCREMRDLLVPPTPAPNPPCALLFVQVTYLRCGGVVLALSMHHSACDARGAAHFLETWASIARGDDATTENAPVPPCFDYGRLLAARPGPARAVLYDHPEYKPEPEPVDADAVAASDDYASAIIVMTKAQVAALKARCPGASTFRAVVALVWQCVCLARALPPEAETRLYSMIDMRARLDPPLPPGYFGNAVVRTSVSATAGEVTSNPVGHAARRALAVTSQGDDYARSLVDYLEGVDAMNLPRSGISRAHLRAISWVGMSLYKADFGWGAPVFMGPALMYYSGFVYVMNAAGKEGALALVLSLEPESMPEFRKVFAEELASLEVM

SEQ ID NO: 1009 - protein, 433 aa, Oryza sativa subsp. japonica
  misc_feature (2)..(428): Pfam Name: Transferase Pfam Description: Transferase family
  misc_feature: Public GI ID no. 115466808
  misc_feature: Bit score of 383.1 for HMM based on sequences of Figure 31
  misc_feature: Functional Homolog Of SEQ ID NO. 947
MATVDVLTSEVVVPAGETPAGAVWLSNLDLAARRGYTPTVFFYRHNGEPGFFAADAMRDSLARALVAFYPVAGRLGLDGDGRVQVDCTGEGVVFATARSGHYALDDLMGEFVPCDEMRDLFVPAAPAAASCCPRGGALLLVQVTYLRCGGVVLGMALHHSIADGRSAAHFVETWASIARGAPAADAPVPPCFDHRLLAARPARAVLYDHPEYKPEPAPPARAATASTYASAIITLTKQQVGALRAACAGASTFRAVVALVWQCACRARALPPEAETRLHSMIDTRQRLSPPLPPGYFGNAVIRTSTAATAGEVVSSPVGHAARRARAATSQGEDYARSVVDYLEGVDAMNLPRSGVSRADLRAISWLGMSLADADFGWGSPAFMGPAIMYYSGFVYVMNAPGKDGAVALALSLEPESMPEFRKVFADEVARLA

SEQ ID NO: 1010 - DNA, 1326 bp, Sorghum bicolor
  misc_feature: Ceres Annot ID no. 8701741
  misc_feature: Encodes the peptide sequence at SEQ ID NO. 1011
atggtgatcactgtgaggcggtcgacgatggtgcgcccggcgcgggagacgccgcgccagcggctgtggaactccaacctcgacctcgtggtgccgcgcttccacacgcccagcgtctacttctaccgccgcggcgacggcgccgcggcgccggcggaggggttcttcgacggcgagcggatgcggcgcgcgctggcagaggcgctcgtgccgttctacccgatggcgggccgcctcgcgcgggacgaggacgggagggtcgagatcgactgcaatggcgagggagtgctcttcgtcgaggccgacgcgcccgacgtctccgtcgacgactacggtgacttcgcccccaccatggacctgaaacgcctcatcccgaccgtggattacaccgacgacatctcggccttccctctactggtgctccaggtgactcattttaaatgtggaggcatctcccttggtgttggcatgcaacaccatgtagcggatggcatgtctggcttgcacttcattaactcgtggtctgacctctgtcgtggagctcaaatttctgtcatgcccttcattgaccgcactcttattcgcgctcgtgatccaccaactccatcttttcatcatatcgagtaccagcctgccccagctatattgtcctccacaccccagttccttgcttccaagtcaaagccacctgccactgctgtggacattttcaagctcactcgctcagaccttggccggctgcgctcacagcttgctgcaggggaaggtgcaccccggttcagcacatacgcagtgctagcagcacatgtctggaaatgtgtctcccttgcacgcagcctacctcctgaacaacccaccaagttgtattgcgccactgatgggcgccaacggctacagcctccactaccagatggttactttggtaatgtcatcttcactgcgacaccacttgctgaggcgggcaaggtgaccagtgggctggcagaaggagcagcagtcatccagggagcactggataggatggacaacgactactgccgctcagcgctggactacctggagctgcaaccggatttgtcagcactggtgcgtggagcacataccttccggtgcccgaacctagggctcaccagctgggtacgccttcctatccatgatgccgacttcggatggggccgtcctgtgttcatggggccaggcggtattgcatatgaaggtctggcgtttgtcctcccaagtgcaaatggagatggcagcctgtccattgctatctctttgcaggctgagcacatggagaagttccggaagctaatctgcgaagtttaa

SEQ ID NO: 1011 - protein, 441 aa, Sorghum bicolor
  misc_feature (1)..(441): Pfam Name: Transferase Pfam Description: Transferase family
  misc_feature: Ceres Annot ID no. 8701741
  misc_feature: Bit score of 367.0 for HMM based on sequences of Figure 31
  misc_feature: Functional Homolog Of SEQ ID NO. 947
MVITVRRSTMVRPARETPRQRLWNSNLDLVVPRFHTPSVYFYRRGDGAAAPAEGFFDGERMRRALAEALVPFYPMAGRLARDEDGRVEIDCNGEGVLFVEADAPDVSVDDYGDFAPTMDLKRLIPTVDYTDDISAFPLLVLQVTHFKCGGISLGVGMQHHVADGMSGLHFINSWSDLCRGAQISVMPFIDRTLIRARDPPTPSFHHIEYQPAPAILSSTPQFLASKSKPPATAVDIFKLTRSDLGRLRSQLAAGEGAPRFSTYAVLAAHVWKCVSLARSLPPEQPTKLYCATDGRQRLQPPLPDGYFGNVIFTATPLAEAGKVTSGLAEGAAVIQGALDRMDNDYCRSALDYLELQPDLSALVRGAHTFRCPNLGLTSWVRLPIHDADFGWGRPVFMGPGGIAYEGLAFVLPSANGDGSLSIAISLQAEHMEKFRKLICEV

SEQ ID NO: 1012 - DNA, 1584 bp, Triticum aestivum
  misc_feature: Ceres Clone ID no. 788394
  misc_feature: Encodes the peptide sequence at SEQ ID NO. 1013
agctgctctccaccaagagctgctgctaccacccaaccatcccgtcggctctgccgcgccgccgacgccgccgcagatctgatccacccgcgccgccgtccgtccgcccctcttccaagatggcgatcacggtgaggcggtccacgatggtgcggccggcggtggagaggccgcgggagaggctctggaactccaacctcgacctcgtggtcccgcgcttccacacgcccagcgtctacttctaccgccgccccgaggcgggggccgacggcttcttcgacgccgaccggatgcgcctcgcgctggccgacgcgctcgtgcccttctaccccatggccggccgcctcgcgcgcgacgaggacggcagggtcgagatcgactgcagcggggagggggtgctcttcgtcgaggccgacgcccccggcgcggccgtcgacgactacggggacttcgcgcccaccatggacctcaagcgcctcatccccgccgtcgactactcggacgacatatcctccttcccgctcctcgtgcttcaggtgacctacttcaagtgtggtggtgtctcccttggtgtcgggatgcaacaccatgttgctgatggcatgtctggcttgcacttcatcaactcgtggtctgacctctgccgtggagctaagattgcagtgatgcccttcatcgaccgcactcttgtccgtgctcgtgatccaccgactccatcttacccacatattgagtatcagcctgccccagccatgttgtcgtccgtgcctcaggctctcagtggcaagccaacgccgcctcccactgctgtggacatcttcaagctcacccgctcagagcttggctgcctgcgctcgcagctccccacaggtgaaggtgcgccaaggttcagcacgtatgcagtcttagctgcacatgtttggcgctgcgtctccattgcgcgcaaccttgctcctgaacaacccaccaagctgtattgtgccaccgatgggcgacaacggctgcagcccccgctgccagaaggttactttgggaatgtcatcttcactgccaccccgctcgccgaggcaggcaaggtgacgagcgggctggcagaaggagcagcggtcatccagggagcgctagacaggatgaccagcgactactgccaatcagccctggactacctggagatgcagccggacctgtcagcattggtccgtggagcgcacactttccggtgccccaacctcggcctcaccagctgggtgcgcctgccgatccacgacgccgatttcggctgggggcggccggtgttcatgggtcctggcggcatcgcgtacgagggactggcgttcgtcctcccgagcgcgaccaaggacggcagcctgtccatcgccatctcattgcaggcagagcacatggagaagttcaggaagctgatccttgatgtgtagatagaccacattttagagagaagttttacagggcaacaagcttcaggttgcgccgaacgtttttctggggtatgtatgcctgaagtttcaaatgaacatacaccggagtttatatggtggacaaaacataatcttattcttatgtggt

SEQ ID NO: 1013 - protein, 438 aa, Triticum aestivum
  misc_feature (1)..(438): Pfam Name: Transferase Pfam Description: Transferase family
  misc_feature: Ceres Clone ID no. 788394
  misc_feature: Bit score of 357.6 for HMM based on sequences of Figure 31
  misc_feature: Functional Homolog Of SEQ ID NO. 947
MAITVRRSTMVRPAVERPRERLWNSNLDLVVPRFHTPSVYFYRRPEAGADGFFDADRMRLALADALVPFYPMAGRLARDEDGRVEIDCSGEGVLFVEADAPGAAVDDYGDFAPTMDLKRLIPAVDYSDDISSFPLLVLQVTYFKCGGVSLGVGMQHHVADGMSGLHFINSWSDLCRGAKIAVMPFIDRTLVRARDPPTPSYPHIEYQPAPAMLSSVPQALSGKPTPPPTAVDIFKLTRSELGCLRSQLPTGEGAPRFSTYAVLAAHVWRCVSIARNLAPEQPTKLYCATDGRQRLQPPLPEGYFGNVIFTATPLAEAGKVTSGLAEGAAVIQGALDRMTSDYCQSALDYLEMQPDLSALVRGAHTFRCPNLGLTSWVRLPIHDADFGWGRPVFMGPGGIAYEGLAFVLPSATKDGSLSIAISLQAEHMEKFRKLILDV

SEQ ID NO: 1014 - protein, 442 aa, Oryza sativa subsp. japonica
  misc_feature (1)..(442): Pfam Name: Transferase Pfam Description: Transferase family
  misc_feature: Public GI ID no. 115459250
  misc_feature: Bit score of 385.6 for HMM based on sequences of Figure 31
  misc_feature: Functional Homolog Of SEQ ID NO. 947
MAITVRRSTMVRPAWETPRVRLWNSNLDLVVPRFHTPSVYFYRRGPEGGGAPEGFFDGERMRRALAEALVPFYPMAGRLARDEDGRVEIDCNGEGVLFVEADAPDASVDDYGDFAPTMELKRLIPAVDYTDDISSFSLLVLQVTYFKCGGVSLGVGMQHHVADGMSGLHFINSWSDLCRGTQIAIMPFIDRTLLRARDPPTPSYPHVEYQPAPAMLSSVPQSVTANKTTPPPTAVDIFKLTRSDLGRLRSQLPSGEGAPRFSTYAVLAAHVWRCVSLARGLPSEQPTKLYCATDGRQRLQPPLPEGYFGNVIFTATPLAEAGKVTSGLADGAAVIQEALDRMNDSYCRSALDYLELQPDLSALVRGAHTFRCPNLGLTSWVRLPIHDADFGWGRPVFMGPGGIAYEGLAFVLPSANKDGSLSIAISLQAEHMEKFRKLIFEV

SEQ ID NO: 1015 - DNA, 1486 bp, Triticum aestivum
  misc_feature: Ceres Clone ID no. 764333
  misc_feature: Encodes the peptide sequence at SEQ ID NO. 1016
actaagcccccgctttccgtgtttcttcttcacacttgacctgagctgaacaccaggaaaatgagtgtggaacaggacgtgaaggtggtggagtcgtgcatggtgactcccagcgaggagacgcctaggaaaggcttgtggatttccccgatcgacctcacgtgggccaccaggggccacactccgacggtgcacctgtaccttcccggctccggtcccgtcgatggcttcttcgacgtgcccaggctcaaggcggcattggccaaggctctggtcgccttctaccccctggccggccgtctcggcatggactccaatggccgggcagagatcgattgcactggcgagggcgcgctctttgttgtcgctctctcagacctcaccgtcgaagacttcagcaagttgaagccgtcgcgggagctaaagaggctcttcattccccgcgtcgaggactactcgccgcccctcatgtgcggcctccaggtgaacttcctcaagggcggcggagtggccattgggatgacgctgcaccacacctccgccgacgccatgagcgcgttccacttcttgcagacctgggctgctttctccagggacgcggcggcagcggcggccctggagctcccgtgccacgaacgcaccctcctccgtcctcgctcccctcccgtcgtacaccccgacgctctcaccgtgttctgcccgagggtaggcaaatccgagccgccgggagccgttgagaacgtgattttcgtcctctccaaagaccaggtcgacgctatcaagcgtgcttgcaccggcagagctgacggtggccgcgtgagctccttctgcgccgtgagcgcccacgtgtggcggtgcctgtgtgttgcccgacaactgccggcggacgcgacgacgcgcctcaccttccccgccaacatccggcgcagcctgaggccgccgctcccggacacgtactttggaaacgggatcgtcatgctgggcgccgtcgccaaggtgcaggacattgtctgctccgacgagctggcctctgttgctggtcggattagagacgttatccgccggatggacgacgagctggtgcgttcggtgatcgaccacttggagatggccggcagccagacatttatgccttcgggaaggatgccggtgactgagctgaaggtggtcagctggcgaggcatgccggtgtacgacgcggattttggctgggggaagccggtggccatgcaccgcgccgtgcaaccgcatggcgggatcatctgcctcatagacgacgacggcggcagcatgcgcatcgtcctgtctgccgagcctggaattgtcaaggacttcgagcgcctgctacatgccaagttttaatcatctatcttcccactttgtgtggcgtttcacttgtcatcttccgatttgtttgtttcccggcatttgctgtatttatttctaaattgggccttggaattcaatggttctatctgtttgctcg

SEQ ID NO: 1016 - protein, 433 aa, Triticum aestivum
  misc_feature (5)..(428): Pfam Name: Transferase Pfam Description: Transferase family
  misc_feature: Ceres Clone ID no. 764333
  misc_feature: Bit score of 402.3 for HMM based on sequences of Figure 31
  misc_feature: Functional Homolog Of SEQ ID NO. 947
MSVEQDVKVVESCMVTPSEETPRKGLWISPIDLTWATRGHTPTVHLYLPGSGPVDGFFDVPRLKAALAKALVAFYPLAGRLGMDSNGRAEIDCTGEGALFVVALSDLTVEDFSKLKPSRELKRLFIPRVEDYSPPLMCGLQVNFLKGGGVAIGMTLHHTSADAMSAFHFLQTWAAFSRDAAAAAALELPCHERTLLRPRSPPVVHPDALTVFCPRVGKSEPPGAVENVIFVLSKDQVDAIKRACTGRADGGRVSSFCAVSAHVWRCLCVARQLPADATTRLTFPANIRRSLRPPLPDTYFGNGIVMLGAVAKVQDIVCSDELASVAGRIRDVIRRMDDELVRSVIDHLEMAGSQTFMPSGRMPVTELKVVSWRGMPVYDADFGWGKPVAMHRAVQPHGGIICLIDDDGGSMRIVLSAEPGIVKDFERLLHAKF

SEQ ID NO: 1017 - DNA, 1308 bp, Sorghum bicolor
  misc_feature: Ceres Annot ID no. 8735476
  misc_feature: Encodes the peptide sequence at SEQ ID NO. 1018
atggcaatggtagagctgttgtcgacggagctggtcgtcccggccgaggagacgccggcgggcgccgtctggctgtccaacctcgacctggccgcgcgccgcgggtacacgccgacggtctacttctaccgaacgaacaacaagccggagttcttcgaggccgacgccgtcaaggacagcctcgcccgggcgctggtggcgttctacccgctggccggccgcctcggcctcgacgccgccacggggcgcgtccagatcgactgcacgggcgagggcgccgtgttcgtgacggcgcggtcggagtacgcgctggacgagctgctgaacgagttcgtgccgtgcgacgagatgcggcacctgctggtacccgccacgcccgcgcccaacccgccgtgcccgctgctgttcgcgcaggtcacccgcctgcgctgcggcggcgtcgtgctcggtctcgccctgcaccactccgtcgtggacgccaggagcgccgcgcacttcgtggagacgtgggccagcatcgcccgcggcggcggcggcggcggcggcgacgcgcccctgccgccgtgcttcgaccacaggctgctgagcgcgcgtcccccggcgacgcgcgcggtgttgtacgaccacccggagtacaagccggagccggcgccggagcacgcggttgccgcgggctccgcctacgcgagcgccatcatcacgctgagcaagtcgcaggtatcggcgctcaaggcgcggtgcgcgggcgcgtcgacgttccgcgccgtggtggcgctggtgtggcagtgcgcgtgccgcgcgcggtcgctcccggccgacgccgagacgcggctcttctccatggtggacatgcgcgcgcgccttgccccgccgctcccgccggggtacttcgggaacgcggtgatccggacgtcggcgctggccacggtcggggaggtggtgggcaaccccgtggggtacgcggcgcggcgcgcgctggcggcgacgagccagggggacgactacgcgcggtcgctggtggactacctcgaaggcgtggacgccatgaacctgccccggagcggcatctcgcgcgcgcacctgcgggccatcagctggatggggatgtcgctgcacgactcggacttcgggtggggagcgcccgtcttcatggggccggcgctcatgtactacagtgggttcgtgtacgtgatgcaggcgcccgggaaggaaggcgccgtcgcgctcgcgctgtcgctggagcccgagagcatgccggagttcaggaaggtgttcgccgacgaggtcgcgaggctgcagacgatatga

SEQ ID NO: 1018 - protein, 435 aa, Sorghum bicolor
  misc_feature (2)..(428): Pfam Name: Transferase Pfam Description: Transferase family
  misc_feature: Ceres Annot ID no. 8735476
  misc_feature: Bit score of 387.3 for HMM based on sequences of Figure 31
  misc_feature: Functional Homolog Of SEQ ID NO. 947
MAMVELLSTELVVPAEETPAGAVWLSNLDLAARRGYTPTVYFYRTNNKPEFFEADAVKDSLARALVAFYPLAGRLGLDAATGRVQIDCTGEGAVFVTARSEYALDELLNEFVPCDEMRHLLVPATPAPNPPCPLLFAQVTRLRCGGVVLGLALHHSVVDARSAAHFVETWASIARGGGGGGGDAPLPPCFDHRLLSARPPATRAVLYDHPEYKPEPAPEHAVAAGSAYASAIITLSKSQVSALKARCAGASTFRAVVALVWQCACRARSLPADAETRLFSMVDMRARLAPPLPPGYFGNAVIRTSALATVGEVVGNPVGYAARRALAATSQGDDYARSLVDYLEGVDAMNLPRSGISRAHLRAISWMGMSLHDSDFGWGAPVFMGPALMYYSGFVYVMQAPGKEGAVALALSLEPESMPEFRKVFADEVARLQTI

SEQ ID NO: 1019 - DNA, 1308 bp, Sorghum bicolor
  misc_feature: Ceres Annot ID no. 8735473
  misc_feature: Encodes the peptide sequence at SEQ ID NO. 1020
atggcaatggtagagctgttgtcgacggagctggtcgtcccggccgaggagacgccggcgggcgccgtctggctgtccaacctcgacctggccgcgcgccgcgggtacacgccgacggtctacttctaccgaacgaacaacaagccggagttcttcgaggccgacgccgtcaaggacagcctcgcccgggcgctggtggcgttctacccgctggccggccgcctcggcctcgacgccgccacggggcgcgtccagatcgactgcacgggcgagggcgccgtgttcgtgacggcgcggtcggagtacgcgctggacgagctgctgaacgagttcgtgccgtgcgacgagatgcggcacctgctggtacccgccacgcccgcgcccaacccgccgtgcccgctgctgttcgcgcaggtcacccgcctgcgctgcggcggcgtcgtgctcggtctcgccctgcaccactccgtcgtggacgccaggagcgccgcgcacttcgtggagacgtgggccagcatcgcccgcggcggcggcgacggcggcggcgacgcgcccctgccgccgtgcttcgaccacaggctgctgagcgcgcgtcccccggcgacgcgcgcggtgttgtacgaccacccggagtacaagccggagccggcgccggagcacgcggttgccgcgggctccgcctacgcgagcgccatcatcacgctgagcaagtcgcaggtatcggcgctcaaggcgcggtgcgcgggcgcgtcgacgttccgcgccgtggtggcgctggtgtggcagtgcgcgtgccgcgcgcggtcgctcccggccgacgccgagacgcggctcttctccatggtggacatgcgcgcgcgccttgccccgccgctcccgccggggtacttcgggaacgcggtgatccggacgtcggcgctggccacggtcggggaggtggtgggcaaccccgtggggtacgcggcgcggcgcgcgctggcggcgacgagccagggggacgactacgcgcggtcgctggtggactacctggaaggcgtggacgccatgaacctgccccggagcggcatctcgcgggcgcacctgcgggccatcagctggatggggatgtcgctgcacgactcggacttcgggtggggagcgcccgtcttcatggggccggcgctcatgtactacagtgggttcgtgtacgtgatgcaggcgcccgggaaggaaggcgccgtcgcgctcgcgctgtcgctggagcccgagagcatgccggagttcaggaaggtgttcgccgacgaggtcgcgaggctgcagacgatatga

SEQ ID NO: 1020 - protein, 435 aa, Sorghum bicolor
  misc_feature (2)..(428): Pfam Name: Transferase Pfam Description: Transferase family
  misc_feature: Ceres Annot ID no. 8735473
  misc_feature: Bit score of 387.0 for HMM based on sequences of Figure 31
  misc_feature: Functional Homolog Of SEQ ID NO. 947
MAMVELLSTELVVPAEETPAGAVWLSNLDLAARRGYTPTVYFYRTNNKPEFFEADAVKDSLARALVAFYPLAGRLGLDAATGRVQIDCTGEGAVFVTARSEYALDELLNEFVPCDEMRHLLVPATPAPNPPCPLLFAQVTRLRCGGVVLGLALHHSVVDARSAAHFVETWASIARGGGDGGGDAPLPPCFDHRLLSARPPATRAVLYDHPEYKPEPAPEHAVAAGSAYASAIITLSKSQVSALKARCAGASTFRAVVALVWQCACRARSLPADAETRLFSMVDMRARLAPPLPPGYFGNAVIRTSALATVGEVVGNPVGYAARRALAATSQGDDYARSLVDYLEGVDAMNLPRSGISRAHLRAISWMGMSLHDSDFGWGAPVFMGPALMYYSGFVYVMQAPGKEGAVALALSLEPESMPEFRKVFADEVARLQTI

SEQ ID NO: 1021 - DNA, 1914 bp, Zea mays
  misc_feature: Ceres Clone ID no. 465877
  misc_feature: Encodes the peptide sequence at SEQ ID NO. 1022
aaggcccaactccactcatcgccactgcgccgaaacccaaagcggggaggaggagcggaaaagaaaaggaaaatgggaggagcggaagcaagtccgagcaagtcagaggatccgccggcctatctccgcctataaaatgccgtcccaccccccaccttcctagcagctgctctccaccaagagctgctggcaccaccaaaccaatcgctggatttgtccagagtatttccggtttcaccgccctagatctgacccgagacgccgcgtcttcgctgagatggcgattactgtgaggcggtcgacgatggtgcgcccggcgcgggagacgccgcggcagcggctgtggaactccaacctcgacctcgtggtgccgcgcttccacacgcccagtgtctacttctaccgccgcgacggccccgtgccggatgcggaggggttcttcgacggcgagcggatgcggcgcgcgctggcagaggcgctcgtgccgttctatccaatggcgggccgcctcgcgcgggacgaggacggtagggtcgagatcgactgcaatggcgagggagtgctcttcgtcgaggccgacgcgcccgatgcctctgtcgatgactacggtgacttcgcgcccaccatggagctcaagcgcctcatcccgaccgtcgattacaccgacgacatctcggccttctcgctactcgtgctccaggtgacttatttcaaatgtggaggcgtctcccttggtgttggcatgcaacaccatgcagcggatggcatgtctggcttgcacttcattaactcatggtctgacctctgccgtggagctcaaatttctgtcatgcccttcattgaccgcacccttcttcgtgctcgtgatccaccaactccatcttttcaacatatcgagtaccagcctgccccagctatgttgtcctccacaacccagttccttgcttccaagtcaaagccacctgccactgctgtggacattttcaagctcactcgctcagaccttggccggctgcgctcacagcttcctgcaggggaaggtgcaccccggttcagcacatatgcagtgctagcggcacatgtctggaaatgtgtctcccttgcacgcagcctacctcctgaacaacccaccaagttgtattgcgccactgatggccgtcaacggctacagcctccactaccagatgggtactttggcaatgtcatcttcaccgcgacaccacttgctgaggcgggcaaggtgaccagtgagctggcagaaggagcagcagtcatccagggagcactggataggatggacaacgactactgccgctcagcgttagactacctggatcttcaaccggatctgtcagcacttgtgcgtggagcgcataccttccgctgcccgaacctagggctcaccagctgggtgcgccttcctatccatgatgctgacttcggatggggccggcctgtgttcatggggccaggtggcattgcgtatgaaggtctggcgtttgtcctcccaagtgcaaatggcgacggcagcctgtccattgctatctcgttgcaggctgagcacatggagaagttccggaagctaatcggcggtgccaactgttgaaggaggatgtcatagggcgagagggattatgctccgcccaaattctcagataaaatactgaagtttcaagtgaacccagtggctgcactttcactttgaagacttgcagaggaaattcatggtcacttcattttgtgaggttaattatagagaaagggtagaaattatatgaagaaacatagtaaaaaatcattgttaggaacaaactccaatagcaggctctacttgtacgtcgcagacataagctgagactgatctgcgattgcaacagattatactcttctatcaggttgactgaagttccctcg

SEQ ID NO: 1022 - protein, 442 aa, Zea mays
  misc_feature (1)..(440): Pfam Name: Transferase Pfam Description: Transferase family
  misc_feature: Ceres Clone ID no. 465877
  misc_feature: Bit score of 366.4 for HMM based on sequences of Figure 31
  misc_feature: Functional Homolog Of SEQ ID NO. 947
MAITVRRSTMVRPARETPRQRLWNSNLDLVVPRFHTPSVYFYRRDGPVPDAEGFFDGERMRRALAEALVPFYPMAGRLARDEDGRVEIDCNGEGVLFVEADAPDASVDDYGDFAPTMELKRLIPTVDYTDDISAFSLLVLQVTYFKCGGVSLGVGMQHHAADGMSGLHFINSWSDLCRGAQISVMPFIDRTLLRARDPPTPSFQHIEYQPAPAMLSSTTQFLASKSKPPATAVDIFKLTRSDLGRLRSQLPAGEGAPRFSTYAVLAAHVWKCVSLARSLPPEQPTKLYCATDGRQRLQPPLPDGYFGNVIFTATPLAEAGKVTSELAEGAAVIQGALDRMDNDYCRSALDYLDLQPDLSALVRGAHTFRCPNLGLTSWVRLPIHDADFGWGRPVFMGPGGIAYEGLAFVLPSANGDGSLSIAISLQAEHMEKFRKLIGGANC

SEQ ID NO: 1023 - protein, 440 aa, Zea mays
  misc_feature (1)..(440): Pfam Name: Transferase Pfam Description: Transferase family
  misc_feature: Public GI ID no. 194700936
  misc_feature: Bit score of 367.5 for HMM based on sequences of Figure 31
  misc_feature: Functional Homolog Of SEQ ID NO. 947
MAITVRRSTMVRPARETPRQRLWNSNLDLVVPRFHTPSVYFYRRDGPVPDAEGFFDGERMRRALAEALVPFYPMAGRLARDEDGRVEIDCNGEGVLFVEADAPDASVDDYGDFAPTMELKRLIPTVDYTDDISAFSLLVLQVTYFKCGGVSLGVGMQHHAADGMSGLHFINSWSDLCRGAQISVMPFIDRTLLRARDPPTPSFQHIEYQSAPAMLSSTTQFLASKSKPPATAVDIFKLTRSDLGRLRSQLPAGEGAPRFSTYAVLAAHVWKCVSLARSLPPEQPTKLYCATDGRQRLQPPLPDGYFGNVIFTATPLAEAGKVTSELAEGAAVIQGALDRMDNDYCRSALDYLELQPDLSALVRGAHTFRCPNLGLTSWVRLPIHDADFGWGRPVFMGPGGIAYEGLAFVLPSANGDGSLSIAISLQAEHMEKFRKLIGEA

SEQ ID NO: 1024 - protein, 447 aa, Oryza sativa subsp. japonica
  misc_feature (4)..(441): Pfam Name: Transferase Pfam Description: Transferase family
  misc_feature: Public GI ID no. 115484487
  misc_feature: Bit score of 386.8 for HMM based on sequences of Figure 31
  misc_feature: Functional Homolog Of SEQ ID NO. 947
MAGHGTQEMECCFVVPSEKTPKHVLWLSPLDIVLANRGALTPLVHFYRRRHDAAGGGGGFFDVGRLKEALAKALVAFYPLAGRFRVGGDGRPEIDCNADGVFFAVARSELAVDDILTDLKPSPELKRLFIPRTEPPSAVLAVQVTFLRWGGIVLGTAMHHAAVDGHSMFHFLQTWAAFCRDGDAAVVELPCHDRALLRARPRLAIHPDASSVFCPKLNLRPPSASGSGLISAKIFSISNDQIATLKRICGGGASTFSAVTALVWQCACVARRLPLCSQTLVRFPVNIRRRMRPPLPDRYFGNALVEVFAAAAVEDIVSGTLAAIAARIKGVIGRLNDDEMLRSAIDYNEMAGMPDRPDNGSLPETELRVVSWLGIPLYDAVDFGWGKPWAMSRAESLRGGFFYVMDGGAADGDGGDAAAVRVLMCMEAANVEEFERLLRAKFVYPRI

SEQ ID NO: 1025 - protein, 439 aa, Oryza sativa subsp. japonica
  misc_feature (1)..(433): Pfam Name: Transferase Pfam Description: Transferase family
  misc_feature: Public GI ID no. 125576435
  misc_feature: Bit score of 384.3 for HMM based on sequences of Figure 31
  misc_feature: Functional Homolog Of SEQ ID NO. 947
MECCFVVPSEKTPKHVLWLSPLDIVLANRGALTPLVHFYRRRHDAAGGGGGFFDVGRLKEALAKALVAFYPLAGRFRVGGDGRPEIDCNADGVFFAVARSELAVDDILTDLKPSPELKRLFIPRTEPPSAVLAVQVTFLRWGGIVLGTAMHHAAVDGHSMFHFLQTWAAFCRDGDAAVVELPCHDRALLRARPRLAIHPDASSVFCPKLNLRPPSASGSGLISAKIFSISNDQIATLKRICGGGASTFSAVTALVWQCACVARRLPLCSQTLVRFPVNIRRRMRPPLPDRYFGNALVEVFAAAAVEDIVSGTLAAIAARIKGVIGRLNDDEMLRSAIDYNEMAGMPDRPDNGSLPETELRVVSWLGIPLYDAVDFGWGKPWAMSRAESLRGGFFYVMDGGAADGDGGDAAAVRVLMCMEAANVEEFERLLRAKFVYPRI

SEQ ID NO: 1026 - protein, 442 aa, Oryza sativa subsp. japonica
  misc_feature (1)..(442): Pfam Name: Transferase Pfam Description: Transferase family
  misc_feature: Public GI ID no. 115447257
  misc_feature: Bit score of 350.3 for HMM based on sequences of Figure 31
  misc_feature: Functional Homolog Of SEQ ID NO. 947
MKINVRGSTMVRPAEETPRVRLWNSSLDLVVPRFHTPSVYFFRRGEAAAAEGGSYFDGERMRRALAEALVPFYPMAGRLAHDEDGRVEIDCNGEGVLFVEADAPGATVDDFGDFAPTMDLKRLIPTVDYTDGISSFPILVLQVTHFKCGGVALGVGMQHHVADGFSGLHFINSWADLCRGVPIAVMPFIDRTLVRARDPPAPSHPHVEYQPAPAMLAPEPPQALTAKPAPPPTAVDIFKLSRSDLGRLRSQLPRGEGAPRYSTYAVLAAHVWRCASLARGLPAEQPTKLYCATDGRQRLQPSLPDGYFGNVIFTATPLAEAGRVTGSLADGAATIQSALDRMDSGYCRSALDYLELQPDLSALVRGAHTFRCPNLGLTSWVRLPIHDADFGWGRPVFMGPGGIAYEGLAFVLPSASGDGSLSVAISLQAEHMEKFRKMIFDF

SEQ ID NO: 1027 - protein, 438 aa, Prunus mume
  misc_feature (3)..(438): Pfam Name: Transferase Pfam Description: Transferase family
  misc_feature: Public GI ID no. 82568711
  misc_feature: Bit score of 388.2 for HMM based on sequences of Figure 31
  misc_feature: Functional Homolog Of SEQ ID NO. 947
MVVNVSVRETTLVKPAAETPRKALWNSNVDLVIPSIHTPSVYFYRPNQNGASSNFFDPAVLKLALSKALVPFYPMAGRLKRDDDGRIEIDCNGEGVLFVEAETSSVIDDFGDFAPTLELRRLIPAVDYSAGISSYALLVLQVTYFKCGGVSLGVGMQHHAADGFSGLHFVNTWSDMARGLDLTLPPFIDRTLLRARDPPQPAFHHIEYQPAPPLKTPLQSTKPGADSTTVSIFRLTREQLNILKAKSKEAGNTISYSSYEMMAGHIWRCVCKARELPNDQDTKLYIATDGRSRLQPPLPPGYFGNVIFTATPIAVAGDLQSKPTWFAASRIHDSLVRMDDNYLRSALDYLELQPDLSALVRGAHSFRCPNLGITSWVRLPIHDADFGWGRPIFMGPGGIAFEGLAFVIPSATNDGSLSVAISLQSEHMKSFSKLLYDI

SEQ ID NO: 1028 - DNA, 1661 bp, Triticum aestivum
  misc_feature: Ceres Clone ID no. 786100
  misc_feature: Encodes the peptide sequence at SEQ ID NO. 1029
accaagagctaccaaacgccctactttaattttaattatcgccgctgctcccacgcgcgttccacgtacctagcgacgacctttcttttcttccgcctagtctgcccgccagatctgcatccgcggagatgaagatcacggtgcggggatcgacggtcgtggtgccggcggaggagacgccgcggctccggctgtggaacgccaacccggacctggtcgtgccgcggttccacacgccgagcgtctacttcttccggcgcggcgcgggggaggaggaggcggacggctacttcgacgcggagcggatgcgccgggcgctggcggaggcgctggtgccgttctacccgatggcggggcggctggcccgcgacgaggacgggcgcgtggagatcgactgcaacgcggaaggggtgctcttcgtggaggccgacgcgcccgacggcaccgtcgacgacttcggcgacttcgcgcccaccatggacctcaagcgcctcatccccgccgtcgacttcaccgggggcatctcctcctacccgctcctcgtggtccaggtgacccacttcaagtgcggaggcgtcgccctcggcataggcatgcagcaccacgtcgccgacggcttctccggcctgcacttcatcaactcatgggccgacctctgccgcggcgtgccgattgccgtcatgccgttcattgaccgcaccctcctccgcgcacgcgacccgccgacgccgtcccatccgcacatcgagtaccagccagcgcccgccatgctggacgcggaggagccgcaggccctcaccgccaagccggaagcgcggcccacggccgtggacatcttcaagctttcccgcgccgacctcggccgcctccgcgcccagctccccactggcgagggcgcgccgcggttcagcacctacgcggtgctcggggcgcacgtctggcggtgcgcgtccctggcccgtggcctgtccccagagcagcccaccaagctgtactgcgccacggacgggcggcagcggctgcagccgccgctcccggagggctacttcggcaacgtcatcttcacggccacgccgctcgcggtggcgggcaaggtgaccggctcgctggcggacggcgcgaccacgatccaggcggcgctggaggttatggacaacgagtactgccgctcggcgctggactacctggagatgcagccggacctgtcggcgctggtccgcggcgcgcacacgttccggtgccccaacctcgggctcaccagctgggtgcgcctgcccatccacgatgccgacttcggctggggccggcccgtcttcatgggccccggcggcatcgcgtacgaggggctcgcattcgtgctccccagcgccagccgcgacggcagcctgtcggtggccatctcgctgcaggccgagcatatggagaagttccggaagatgatctttgacttctgatcaaaccaacaacaccagcgcgcaacgcagaaagaaagaagcaccggagcgatagtaggatgaagtaaagattctttgattacacacgtagttcctgcacattttcccttccctctttccactttgggctggacgaattttgtgcatcgttatcaaatttccgacaaatgtatctatttaatgaacagtcaatgcattcaaacatac

SEQ ID NO: 1029 - protein, 441 aa, Triticum aestivum
  misc_feature (1)..(441): Pfam Name: Transferase Pfam Description: Transferase family
  misc_feature: Ceres Clone ID no. 786100
  misc_feature: Bit score of 350.9 for HMM based on sequences of Figure 31
  misc_feature: Functional Homolog Of SEQ ID NO. 947
MKITVRGSTVVVPAEETPRLRLWNANPDLVVPRFHTPSVYFFRRGAGEEEADGYFDAERMRRALAEALVPFYPMAGRLARDEDGRVEIDCNAEGVLFVEADAPDGTVDDFGDFAPTMDLKRLIPAVDFTGGISSYPLLVVQVTHFKCGGVALGIGMQHHVADGFSGLHFINSWADLCRGVPIAVMPFIDRTLLRARDPPTPSHPHIEYQPAPAMLDAEEPQALTAKPEARPTAVDIFKLSRADLGRLRAQLPTGEGAPRFSTYAVLGAHVWRCASLARGLSPEQPTKLYCATDGRQRLQPPLPEGYFGNVIFTATPLAVAGKVTGSLADGATTIQAALEVMDNEYCRSALDYLEMQPDLSALVRGAHTFRCPNLGLTSWVRLPIHDADFGWGRPVFMGPGGIAYEGLAFVLPSASRDGSLSVAISLQAEHMEKFRKMIFDF

SEQ ID NO: 1030 - DNA, 1654 bp, Gossypium hirsutum
  misc_feature: Ceres Clone ID no. 1920450
  misc_feature: Encodes the peptide sequence at SEQ ID NO. 1031
agtgctcaccacctttttcaccaactcctctcccgtttttttgttcttcttcttcctttgcatttacttctgatttgcaggccaaaagcaaaccaatccttttccccccagtggatcccaccagcactacaaccatgattgtgaacgtgaaagaatcaacaatggtacggccggcgggggagactccccggcggagcctctggaacgccaacgtggacttggtggtaccaaggttccacacccctagcgtttacttctacaggccgaacggagcggccaatttcttcgatccgcaggtgatgaaggaggcgttgagcaaggccctggtgccgttttaccccatggcggggcggctgaagagggacgaggatggaaggatcgagattgattgcaatggcgaaggggtgctctttgttgaggctgaaactaattctgttattgacgattttggtgattttgcacccaccttggagctcaggcagctcatcccaaccgttgattattccggtggcatctccacgtatccactcttggttttgcaggtcacatatttcaaatgtggtggagcatcactaggtgttggcatgcaacatcatgcagcagatggatattctggtctccacttcatcaacacatggtctgatatggttcgtggtcttgaccttacaattccaccattcattgatcggacccttcttcgtgcccgggaccccccacaacctgtgttccaccacgtcgaatatcaaccaccaccggcaatgaagattccaccccagtccaccggtcctgaaagcacagcaatctccattttcaaattgacccgggatcaactcaatgcactcaaagcaaagtgcaaggaagatggtaacgatgttaactatagttcatacgagatgttgtcaggtcatgtgtggagatcagtctgcaaggcacgtggacttgaagatgatcaagggactaaactgtacattgccactgatggaagggcaaggttgcgccccccactcccacctggttactttgggaatgtgatcttcactgctaccccaatagcagtggcaggggatctactgtcaaagccaacatggtacgctgcgagccgtattcatgatgcattggttcggatggatgatgaatatctaaggtcagcccttgattacctggaacttcagccagatttgtctgcacttgtacgtggtgctcatactttcaggtgtccgaaccttgggattactagctgggttaggctaccaatccatgatgcagatttcgggtggggcaggcccatatttatgggccctggtggaattccttatgaagggttatctttcgtaataccaagtccaaacaatgatgggagcttatcagttgccatctccttgcaaaccgaacacatgaaagtgtttgagaagctcttttatgacatttaaaggaagaagaaacctcgtatacagtccatgtagtctttaaacgttcctttttcccaatttttgtaatacttgtttatgttataaagtctcacatttcacttaaaatgtacctcaaattcagacttcactggtcacaagccatatgcttgtgcatagaaaaaagaaaaactttggacaagttgtattactaatttcgattcaatatcgatgttgttgaacattgt

SEQ ID NO: 1031 - protein, 431 aa, Gossypium hirsutum
  misc_feature (1)..(431): Pfam Name: Transferase Pfam Description: Transferase family
  misc_feature: Ceres Clone ID no. 1920450
  misc_feature: Bit score of 386.3 for HMM based on sequences of Figure 31
  misc_feature: Functional Homolog Of SEQ ID NO. 947
MIVNVKESTMVRPAGETPRRSLWNANVDLVVPRFHTPSVYFYRPNGAANFFDPQVMKEALSKALVPFYPMAGRLKRDEDGRIEIDCNGEGVLFVEAETNSVIDDFGDFAPTLELRQLIPTVDYSGGISTYPLLVLQVTYFKCGGASLGVGMQHHAADGYSGLHFINTWSDMVRGLDLTIPPFIDRTLLRARDPPQPVFHHVEYQPPPAMKIPPQSTGPESTAISIFKLTRDQLNALKAKCKEDGNDVNYSSYEMLSGHVWRSVCKARGLEDDQGTKLYIATDGRARLRPPLPPGYFGNVIFTATPIAVAGDLLSKPTWYAASRIHDALVRMDDEYLRSALDYLELQPDLSALVRGAHTFRCPNLGITSWVRLPIHDADFGWGRPIFMGPGGIPYEGLSFVIPSPNNDGSLSVAISLQTEHMKVFEKLFYDI

SEQ ID NO: 1032 - DNA, 1889 bp, Gossypium hirsutum
  misc_feature: Ceres Clone ID no. 1920870
  misc_feature: Encodes the peptide sequence at SEQ ID NO. 1033
agtgctcaccacctttttcaccaactcctctcccgttttcttgctctttttcttcctttgcatttacttctgatttgtaggttccttttttccgattcccttgagtaatcaagctttttgtttatttgttttactttctgggttttccatcctgtttcattgcttgcttatattctatatgtatatattcttcaatagccatggttatttaagttggaattctgaatgcactggaacacttttttttctcttaaaaaaaaaactcagagaccagagaaggcaaaaagcaaaccaatccttttccccccagtggatcccaccagcactacaaccatgattgtgaatgtgaaagaatcaacaatggtaaggccggcgggggagactccccggcggagcctctggaacgccaacgtggacttggtggtaccaaggttccacacccctagcgtttacttctacaggccgaacggagcggccaatttcttcgatccgcaggtgatgaaggaggcgttgagcaaggccctggtgccattttaccccatggcggggcggctgaagagggacgaggatggaaggatcgagatcgattgcaatggcgaaggggtgctctttgttgaggctgaaactaattctgttattgacgattttggtgattttgcacccaccttggagctcaggcagctcatcccaaccgttgattattccggtggcatctccacgtatccactcttggttttgcaggtcacatatttcaaatgtggtggagcatcactaggtgttggcatgcaacatcatgcagcagatggatattctggtcttcacttcatcaacacatggtctgatatggctcgtggtcttgaccttacaattccaccattcattgatcggacccttcttcgtgcccgggaccccccacaacctgtgtttcaccacatcgaatatcaaccaccaccggcaatgaagattccacccgtgtccaccggttctgaaagcacagaagtctccattttcaaattgacccgggatcaactcaatgcactcaaagcaaagtgcaaggaagatggtaacgatgttaactatagttcatacgagatgttgtcaggtcatgtgtggagatcagtctgcaaggcacgtggacttgaagatgatcaagggactaaactgtacattgccactgatggaagggcaaggttgcgccccccactcccacctggttactttgggaatgtgatcttcactgctaccccaatagcagtggcaggggatctactgtcaaagccaacatggtacgctgcgagccgtattcatgatgcattggttcggatggatgatgaatatctaaggtcagcccttgattacctggaatttcagccagatttgtctgcacttgtacgtggtgctcatactttcaggtctccgaaccttgggattactagctgggttaggctaccaatccatgatgcagatttcgggtggggcaggcccatatttatgggccctggtggaattccttatgaagggttatctttcgtattaccaagtccaaacaatgatgggagcttatcagttgccatctccttgcaaaccgaacacatgaaagtgtttgagaagctcttttatgacatttaaaggaagaggaaacctcgtatacagtccatgtagtctttaaacgttcctttttcccaatttttttaatacttgtttatgttataaagtctcacattcacttgaaatgtacctcaaattcagacttcactggtcacaagccatatgcttgtgcatagaaaaaagaaaaactttggacaagttgtattactaatttcggttcaatatcgatgttgttgtattactaatttcggttcaatatcgatgttgttgaatattgtgac

SEQ ID NO: 1033 - protein, 431 aa, Gossypium hirsutum
  misc_feature (1)..(431): Pfam Name: Transferase Pfam Description: Transferase family
  misc_feature: Ceres Clone ID no. 1920870
  misc_feature: Bit score of 386.6 for HMM based on sequences of Figure 31
  misc_feature: Functional Homolog Of SEQ ID NO. 947
MIVNVKESTMVRPAGETPRRSLWNANVDLVVPRFHTPSVYFYRPNGAANFFDPQVMKEALSKALVPFYPMAGRLKRDEDGRIEIDCNGEGVLFVEAETNSVIDDFGDFAPTLELRQLIPTVDYSGGISTYPLLVLQVTYFKCGGASLGVGMQHHAADGYSGLHFINTWSDMARGLDLTIPPFIDRTLLRARDPPQPVFHHIEYQPPPAMKIPPVSTGSESTEVSIFKLTRDQLNALKAKCKEDGNDVNYSSYEMLSGHVWRSVCKARGLEDDQGTKLYIATDGRARLRPPLPPGYFGNVIFTATPIAVAGDLLSKPTWYAASRIHDALVRMDDEYLRSALDYLEFQPDLSALVRGAHTFRSPNLGITSWVRLPIHDADFGWGRPIFMGPGGIPYEGLSFVLPSPNNDGSLSVAISLQTEHMKVFEKLFYDI

SEQ ID NO: 1034 - protein, 440 aa, Avena sativa
  misc_feature (1)..(440): Pfam Name: Transferase Pfam Description: Transferase family
  misc_feature: Public GI ID no. 32400295
  misc_feature: Bit score of 355.8 for HMM based on sequences of Figure 31
  misc_feature: Functional Homolog Of SEQ ID NO. 947
MKITVRSSTVVVPAAETPRVRLWNANPDLVVPRFHTPSVYFYRRGGDGDACCYFDAARMRRALAEALVPFYPMAGRLAHDEDGRVEIDCNAEGVLFVEADAPDGAVDDFGDFAPTMGLKRLIPTVDFTGGISSYPLLVVQVTHFKCGGVALGIGMQHHVADGFSGLHFINSWSDLCRGVPIAVMPFIDRTLLRARDPPVPTHPHIEYQPAPAMLGSEEPQALAGKPESPPTAVDIFKLSRSDLGRLRAQLPTGEGAPRFSTYAVLGAHVWRCASLARGLAPEQPTKLYCATDGRQRLTPTLPDGYFGNVIFTATPLAEAGKVTGSLADGATTIQDALEKMDDEYCHSALDYLELQPDLSALVRGAHTFRCPNLGLTSWVRLPIHDADFGWGRPVFMGPGGIAYEGLAFVLPSANRDGSLSVAISLQAEHMEKFRKMIFDF

SEQ ID NO: 1035 - DNA, 1998 bp, Gossypium hirsutum
  misc_feature: Ceres Clone ID no. 1920088
  misc_feature: Encodes the peptide sequence at SEQ ID NO. 1036
agtgctcaccacctttttcaccaactcctctcccgttttcttgctctttttcttcctttgcatttacttctgatttgtaggttccttttttccgattcccttgagtaatcaagctttttgtttatttgttttactttctgggttttccatcctgtttcattgcttgcttatattctatatgtatatattcttcaatagccatggttatttgagttggaattctgaatgcactggaacacttttttttctcttaaaaaaaaactcagagaccagagaaggtatcaaatcctaccgaggaaaggcgattatctgttgatttcaatttcaaaatatctatttttcttatactctgtgtgtgtgtggtacatggaactaagtatatggtttcgttttttctggagaaagatgaattggtggtgttgatgttattagtttaatattcaataatacattgaatcaggcaaaaagcaaaccaatccttttccccccagtggatcccaccagcactacaaccatgattgtgaatgtgaaagaatcaacaatggtaaggccggcgggggagactccccggcggagcctctggaacgccaacgtggacttggtggtaccaaggttccacacccctagcgtttacttctacaggccgaacggagcggccaatttcttcgatccgcaggtgatgaaggaggcgttgagcaaggccctggtgccattttaccccatggcggggcggctgaagagggacgaggatggaaggatcgagatcgattgcaatggcgaaggggtgctctttgttgaggctgaaactaattctgttattgacgattttggtgattttgcacccaccttggagctcaggcagctcatcccaaccgttgattattccggtggcatctccacgtatccactcttggttttgcaggtcacatatttcaaatgtggtggagcatcactaggtgttggcatgcaacatcatgcagcagatggatattctggtcttcacttcatcaacacatggtctgatatggctcgtggtcttgaccttacaattccaccattcattgatcggacccttcttcgtgcccgggaccccccacaacctgtgtttcaccacatcgaatatcaaccaccaccggcaatgaagattccacccgtgtccaccggttctgaaagcacagaagtctccattttcaaattgacccgggatcaactcaatgcactcaaagcaaagtgcaaggaagatggtaacgatgttaactatagttcatacgagatgttgtcaggtcatgtgtggagatcagtctgcaaggcacgtggacttgaagatgatcaagggactaaactgtacattgccactgatggaagggcaaggttgcgccccccactcccacctggttactttgggaatgtgatcttcactgctaccccaatagcagtggcaggggatctactgtcaaagccaacatggtacgctgcgagccgtattcatgatgcattggttcggatggatgatgaatatctaaggtcagcccttgattacctggaatttcagccagatttgtctgcacttgtacgtggtgctcatactttcaggtgtccgaaccttgggattactagctgggttaggctaccaatccatgatgcagatttcgggtggggcaggcccatatttatgggccctggtggaattccttatgaagggttatctttcgtattaccaagtccaaacaatgatgggagcttatcagttgccatctccttgcaaaccgaacacatgaaagtgtttgagaagctcttttatgacatttaaaggaagaggaaacctcgtatacagtccatgtagtctttaaacgttcctttttcccaatttttttaatacttgtttatgttataaagtctcacattcacttgaaatgtacctcaaattcagacttcactggtcacaagccatatgcttgtgcatagaaaaaagaaaaactttggacaagttgtattact

SEQ ID NO: 1036 - protein, 431 aa, Gossypium hirsutum
  misc_feature (1)..(431): Pfam Name: Transferase Pfam Description: Transferase family
  misc_feature: Ceres Clone ID no. 1920088
  misc_feature: Bit score of 385.4 for HMM based on sequences of Figure 31
  misc_feature: Functional Homolog Of SEQ ID NO. 947
MIVNVKESTMVRPAGETPRRSLWNANVDLVVPRFHTPSVYFYRPNGAANFFDPQVMKEALSKALVPFYPMAGRLKRDEDGRIEIDCNGEGVLFVEAETNSVIDDFGDFAPTLELRQLIPTVDYSGGISTYPLLVLQVTYFKCGGASLGVGMQHHAADGYSGLHFINTWSDMARGLDLTIPPFIDRTLLRARDPPQPVFHHIEYQPPPAMKIPPVSTGSESTEVSIFKLTRDQLNALKAKCKEDGNDVNYSSYEMLSGHVWRSVCKARGLEDDQGTKLYIATDGRARLRPPLPPGYFGNVIFTATPIAVAGDLLSKPTWYAASRIHDALVRMDDEYLRSALDYLEFQPDLSALVRGAHTFRCPNLGITSWVRLPIHDADFGWGRPIFMGPGGIPYEGLSFVLPSPNNDGSLSVAISLQTEHMKVFEKLFYDI

SEQ ID NO: 1037 - DNA, 1672 bp, Triticum aestivum
  misc_feature: Ceres Clone ID no. 741711
  misc_feature: Encodes the peptide sequence at SEQ ID NO. 1038
agctctccaccaagagctaccaaacgccctactttaattttaattatcgccgctgctcccacgcgccttcacgtacgtaccgacgacctttcgctcgcttttcttccgcctagtctgcccgccagatctgcatccgcggagatgaagatcacggtgcggggatcgacggtcgtggtgccggcggaggagacgccgcggctccggctgtggaacgccaacccggacctggtcgtgccgcggttccacacgccgagcgtctacttcttccggcgcggcgcgggggagggggaggaggcgggccgctacttcgacgcggagcggatgcgccgggcgctggcggaggcgctggtgcccttctacccgatggcggggcggctggcccgcgacgaggacgggcgcgtggagatcgactgcaacgcggaaggggtgctcttcgtggaggccgacgcgcccgacggcaccgtcgacgacttcggcgacttcgcgcccaccatggacctcaagcgccttatccccgccgtcgacttcaccgggggcatctcctcctacccgctcctcgtggtccaggtgacccacttcaagtgcggaggcgtggccctcggcataggtatgcagcaccacgtcgccgacggcttctccggcctgcacttcatcaactcatgggccgacctctgccgcggcgtgccgattgccatcatgccgttcattgaccgcaccctcctccgcgcacgcgacccgccgacgccgtcccacccgcacatcgagtaccagccagcgcccgccatgctggactcggaggagccgcaggccctcaccgccaagccggaagcgccgcccacggccgtggacatcttcaagctgtcccgcgccgacctcggccgcctccgcgcccagctccccacgggcgagggcgcgccgcggttcagcacctacgcggtgctcggggcgcacgtctggcggtgcgcgtccctggcccgtggactgtccccagagcagcccaccaagctgtactgcgccacggacgggcggcagcggctgcagccgccgctcccggagggctacttcggcaacgtcatcttcacggccacgccgctcgcggtggcgggcaaggtgaccggctcgctggcggacggcgcgaccacgatccaggcggcgttggaggtgatggacaacgagtactgccgctcggcgctggactacctggagatgcagccggacctgtcggcgctggtccgcggtgcgcacacgttccggtgccccaacctcgggctcaccagctgggtgcgcctgcccatccacgacgccgatttcggctggggcaggcccgtcttcatgggccccggcggcatcgcgtacgagggcctcgcgttcgtgctccccagcgccagccgcgacggcagcctgtcggtggccatctcgctgcaggccgagcatatggagaagttccggaagatgatctttgacttctgatcaaaccaacaagacgcacgcgcaacgcagaaagaaagaagcagcaccggagcgatagtaggatgcagcaatgattctttgattacacacgtagttcctgcacattttcccttccctctttccactttgggctggacgaattttgtgcatcgttatcaaatttccgacaaatgtatctacttaatgaacagtcaatgcatgc

SEQ ID NO: 1038 - protein, 442 aa, Triticum aestivum
  misc_feature (1)..(442): Pfam Name: Transferase Pfam Description: Transferase family
  misc_feature: Ceres Clone ID no. 741711
  misc_feature: Bit score of 347.6 for HMM based on sequences of Figure 31
  misc_feature: Functional Homolog Of SEQ ID NO. 947
MKITVRGSTVVVPAEETPRLRLWNANPDLVVPRFHTPSVYFFRRGAGEGEEAGRYFDAERMRRALAEALVPFYPMAGRLARDEDGRVEIDCNAEGVLFVEADAPDGTVDDFGDFAPTMDLKRLIPAVDFTGGISSYPLLVVQVTHFKCGGVALGIGMQHHVADGFSGLHFINSWADLCRGVPIAIMPFIDRTLLRARDPPTPSHPHIEYQPAPAMLDSEEPQALTAKPEAPPTAVDIFKLSRADLGRLRAQLPTGEGAPRFSTYAVLGAHVWRCASLARGLSPEQPTKLYCATDGRQRLQPPLPEGYFGNVIFTATPLAVAGKVTGSLADGATTIQAALEVMDNEYCRSALDYLEMQPDLSALVRGAHTFRCPNLGLTSWVRLPIHDADFGWGRPVFMGPGGIAYEGLAFVLPSASRDGSLSVAISLQAEHMEKFRKMIFDF

SEQ ID NO: 1039 - protein, 440 aa, Avena sativa
  misc_feature (1)..(440): Pfam Name: Transferase Pfam Description: Transferase family
  misc_feature: Public GI ID no. 32400293
  misc_feature: Bit score of 348.3 for HMM based on sequences of Figure 31
  misc_feature: Functional Homolog Of SEQ ID NO. 947
MKITVRSTTVVVPAAETPRLRLWNANPDLVVPRFHTPSVYFYRRGDGDGAACYFDAARMRRALAEALVTFYPMAGRLAHDEDGRVEIDCNAEGVLFLEADAPDGTVDDFGDFAPTMGLKRLIPTVDFTGGISSYPLLVAQVTHFKCGGVALGIGMQHHVADGFSGLHFINSWSDICRGVPIAVMPFIDRTLLRARDPPVPTHPHIEYQPAPAMLGSEEPQALAGKPESPPTAVDIFKLSRSDLGRLRAQLPTGEGAPRFSTYAVLGAHVWRCASMARGLAPEQPTKLYCATDGRQRLTPTLPDGYFGNAIFTATPLAEAGKVTGSLADGATTIQEALEKMDDEYCHSALDYLELQPDLSALVRGAHTFRCPNLGLTSWVRLPIHDADFGWGRPVFMGPGGIAYEGLAFVLPSANRDGSLSVAISLQAEHMEKFRKMIFDF

SEQ ID NO: 1040 - DNA, 1494 bp, Triticum aestivum
  misc_feature: Ceres Clone ID no. 886187
  misc_feature: Encodes the peptide sequence at SEQ ID NO. 1041
acaacgccgactgccaactgccaacttccaacgtcactgcacactagctagctcggtcagctcggttggcaatggcgacggtggaggtgctctcgtcggagctggtcgtcccggcggagccgacgccggggggcagcatctggctctccaacctcgacctcgccggcaggagaggctacacccccacggtctacttcttccgccccaacggcgacccgggcttcttctccgccgacgccatgagggacagcctcgccagggcgctcgtcgccttctacccgctcgccggccgcctgggcctcgacgccaccggccgcgtccaggtggactgcaccgccgagggcgtggtcttcgtcacggcccgctccgagcactacgcgctcgaggagctgatgaacgagttcgtgccgtgcggcgagatgcgggacctgctcgtgccgcccacgccggcgcccaacccgccctgcgccctgctcttcgtgcagatcacgcgcctccgctgcggcggcctggtgctcggccaggccatgcaccactccatcgtcgacgcgcgcggcgccgcgcacttcttcgagacgtgggcgagcatctcccgcggcgcaggcgcgcccaccgtgccgccatgcttcgaccacacgctgctcgccgcgcgcccgccgcagtcgcgcgcggtgctgtacgaccacccggagtacaagccggagccggagccggtggaccccgtgtcggcctccacgtacgcgagcgccatcgtcacgatgaccaagggccaggtgggcgcgctcaaggcgcggtgcctcggcgcgtccacgttccgcgccgtggtggccctggtgtggcagtgcgtgtgccgcgcccgcgcgctcccgccgacggccgagacgcggctctactccatggtggacatgcgcgcgcgcctggacccgcagctcccggctgggtacttcggcaacgcggtgatccgcacgtccgtgtcggccacggtggaggaggtggtgtcgagcccgctggtccacgccgcgaggctggcgcgcgcggcgacgagccagggcggcgaccacgcgaggtcgctggtggactacctggagggcgtggacacgatgaacctgccgcgcagcggcatctcgcgcgcgcacctccgcgccatcagctggatgggcatgacgctctccgacgccgacttcgggtggggcgcgccggcgttcatggggccggcgctcatgtactacagcggcttcgtgtacgtgatgaacgcgcccggcaaggacggcgccctcgcgctggtgctgtcgctggagcccgagagcatgccggcgttcaggaaggtgttcgccgacgagctggcccgcctcgagctgtagcatatatacgcatgccgtaaattaaggacgtactcctacacacactgctggcctgttgccatgcatgcgtataccctgcatgcatgtacgttcgcgtcgtgattaatttgctcttcgttaattactactctac

SEQ ID NO: 1041 - protein, 429 aa, Triticum aestivum
  misc_feature (2)..(423): Pfam Name: Transferase Pfam Description: Transferase family
  misc_feature: Ceres Clone ID no. 886187
  misc_feature: Bit score of 376.5 for HMM based on sequences of Figure 31
  misc_feature: Functional Homolog Of SEQ ID NO. 947
MATVEVLSSELVVPAEPTPGGSIWLSNLDLAGRRGYTPTVYFFRPNGDPGFFSADAMRDSLARALVAFYPLAGRLGLDATGRVQVDCTAEGVVFVTARSEHYALEELMNEFVPCGEMRDLLVPPTPAPNPPCALLFVQITRLRCGGLVLGQAMHHSIVDARGAAHFFETWASISRGAGAPTVPPCFDHTLLAARPPQSRAVLYDHPEYKPEPEPVDPVSASTYASAIVTMTKGQVGALKARCLGASTFRAVVALVWQCVCRARALPPTAETRLYSMVDMRARLDPQLPAGYFGNAVIRTSVSATVEEVVSSPLVHAARLARAATSQGGDHARSLVDYLEGVDTMNLPRSGISRAHLRAISWMGMTLSDADFGWGAPAFMGPALMYYSGFVYVMNAPGKDGALALVLSLEPESMPAFRKVFADELARLEL

SEQ ID NO: 1042 - protein, 458 aa, Oryza sativa subsp. japonica
  misc_feature (8)..(452): Pfam Name: Transferase Pfam Description: Transferase family
  misc_feature: Public GI ID no. 115475267
  misc_feature: Bit score of 378.4 for HMM based on sequences of Figure 31
  misc_feature: Functional Homolog Of SEQ ID NO. 947
MNSKHDDDEVQKIESCFVQPSKMLPRQALWLSPLDIIKASRGHTPLVHFYQHGDDAAADFFDVGGLKKAMAKALVAFYPFAGRLTTDADGRPSIDCNNEGVLFVVARSEQLTVDAFSNLKSLPELRRLFIPCIEPPSTVLAIQVTFLRCGGLALGSAVHHSAVDGHSMFHFLQAWSYLCREGDDAAEAVMDPPCHNRALLQPRSPPVVHPDALAMFSPKTNLHERPPGRPVSTKIFAISDDEVAALKAMCGGASTFTAVSALVWRCACAARRLPPDARSKLSFPVNIRRRVRPTLPDRYFGNAIVTAFVATAVRNIVASGSSSATETTTASLAKVAARISGVMRRLAADNKELLRSAVDYHEMAATATSRWRRPDRGSLPETELRVISWLHLPLYDMDFGWGFPRMMSRAESVRGGFVHVMSGRPADGGGVRVLACLEAENMDEFERLLSAKFTYARI

SEQ ID NO: 1043 - protein, 431 aa, Ipomoea batatas
  misc_feature (6)..(431): Pfam Name: Transferase Pfam Description: Transferase family
  misc_feature: Public GI ID no. 6469032
  misc_feature: Bit score of 376.3 for HMM based on sequences of Figure 31
  misc_feature: Functional Homolog Of SEQ ID NO. 947
MASEKFKISIKESTMVKPAKPTPAKRLWNSNLDLIVGRIHLLTVYFYRPNGSPNFFDSKVMKEALSNVLVSFYPMAGRLARDGEGRIEIDCNEEGVLFVEAESDACVDDFGDFTPSLELRKFIPTVDTSGDISSFPLIIFQVTRFKCGGVCLGTGVFHTLSDGVSSLHFINTWSDMARGLSVAIPPFIDRTLLRARDPPTPAFEHSEYDQPPKLKSVPESKRGSSASTTMLKITPEQLALLKTKSKHEGSTYEILAAHIWRCACKARGLTDDQATKLYVATDGRSRLCPPLPPGYLGNVVFTATPMAESGELQSEPLTNSAKRIHSALSRMDDEYLRSALDFLECQPDLSKLIRGSNYFASPNLNINSWTRLPVHESDFGWGRPIHMGPACILYEGTVYILPSPNKDRTLSLAVCLDAEHMPLFKEFLYDF

SEQ ID NO: 1044 - protein, 436 aa, Cynara cardunculus
  misc_feature (1)..(436): Pfam Name: Transferase Pfam Description: Transferase family
  misc_feature: Public GI ID no. 73671233
  misc_feature: Bit score of 372.8 for HMM based on sequences of Figure 31
  misc_feature: Functional Homolog Of SEQ ID NO. 947
MKIEVRESTMVRPAEETPRINLWNSNVDLVVPNFHTPSVYFYRPNGAANFFDPKVMKDALSRALVPFYPMGGRLKRDEDGRIEIDCQGQGVLFVEAESDGVIDDFGDFAPTLELRKLIPAVDYTLGIESYSLLVLQVTYFKCGGVSLGVGMQHHAADGASGLHFINTWSDLARGLDLAVPPFIDRTLLRSRDPPQPAFDHIEYQPAPPMKTAPTPTPTDDESVPETTVSIFKLTRDQVNALKGKSKEDGNTVNYSSYEMLSGHVWRCVCKARGLPDDQDTKLYIATDGRARLRPSLPRGYFGNVIFTTTPIAVAGDLQSKPTWYAASKIHDALARMDDDYLKSALDYLELQPDLKALVRGAHTFKCPNLGITSWARLPIHDADFGWGRPIFMGPGGIAYEGLSFVLPSPINDGSLSIVISLQAEHMKLFSKFLYDI

SEQ ID NO: 1045 - protein, 484 aa, Oryza sativa subsp. japonica
  misc_feature (1)..(459): Pfam Name: Transferase Pfam Description: Transferase family
  misc_feature: Public GI ID no. 70663907
  misc_feature: Bit score of 361.3 for HMM based on sequences of Figure 31
  misc_feature: Functional Homolog Of SEQ ID NO. 947
MAITVRRSTMVRPAWETPRVRLWNSNLDLVVPRFHTPSVYFYRRGPEGGGAPEGFFDGERMRRALAEALVPFYPMAGRLARDEDGRVEIDCNGEGVLFVEADAPDASVDDYGDFAPTMELKRLIPAVDYTDDISSFSLLVLQCTTQRVNGKNLFASVAKVTYFKCGGVSLGVGMQHHVADGMSGLHFINSWSDLCRGTQIAIMPFIDRTLLRARDPPTPSYPHVEYQPAPAMLSSVPQSVTANKTTPPPTAVDIFKLTRSDLGRLRSQLPSGEGAPRFSTYAVLAAHVWRCVSLARGLPSEQPTKLYCATDGRQRLQPPLPEGYFGNVIFTATPLAEAGKVTSGLADGAAVIQEALDRMNDSYCRSALDYLELQPDLSALVRGAHTFRCPNLGLTSWVRLPIHDADFGWGRPVFMGPGGIAYEGLAFVLPSANKDGSLSIAISLQAEHMEKFRKLIFEVIGINNEEKVLYSVKLHGSVVLTKNT

SEQ ID NO: 1046 - protein, 446 aa, Zea mays
  misc_feature (1)..(446): Pfam Name: Transferase Pfam Description: Transferase family
  misc_feature: Public GI ID no. 212722240
  misc_feature: Bit score of 350.8 for HMM based on sequences of Figure 31
  misc_feature: Functional Homolog Of SEQ ID NO. 947
MKITVRGSEMVYPAAETPRRRLWNSGPDLVVPRFHTPSVYFFRREDADGNDLAGADGSFFDGARMRRALAEALVPFYPMAGRLARDEDGRVEIDCNAGGVLFQEADAPDATIDYFGDFAPTMELKRLIPTVDFTDDISSFPLLVLQVTHFKCGGVAIGVGMQHHVADGFSGLHFINSWADLCRGVPIAVMPFIDRSLLRARDPPTPAYPHIEYQPAPAMLSEPPQAALTSKPATPPTAVAIFKLSRAELVRLRSQVPAREGAPRFSTYAVLAAHVWRCASLARGLPADQPTKLYCATDGRQRLQPPLPEGYFGNVIFTATPLANAGTVTAGVAEGASVIQAALDRMDDGYCRSALDYLELQPDLSALVRGAHTFRCPNLGLTSWVRLPIHDADFGWGRPVFMGPGGIAYEGLAFVLPSANRDGSLSVAISLQAEHMEKFRKLIYDF

SEQ ID NO: 1047 - DNA, 1712 bp, Zea mays
  misc_feature: Ceres Clone ID no. 1691303
  misc_feature: Encodes the peptide sequence at SEQ ID NO. 1048
gctctccaccaagagcttgtaccccacaccactaggcactagtccactacctaacgctacctgccttttcaccgcgtcgtgcgctaccgccacgttgagctcgcgtccgtcccagatccgccgtgctcctccatcgctcgcgcaagatgaagatcacggtgcgggggtcggagatggtgtacccggcggcggagacgccgcgccgccgcctctggaactcgggccccgacctggtggtgccgcggttccacacgcccagcgtctacttcttccgccgcgaggacgcggacgggaacgacctggcgggcgcggacgggagcttcttcgacggggcgcggatgcggcgcgcgctggccgaggcgctggtgcccttctacccgatggccggccggctggcgcgcgacgaggacggccgcgtcgagatcgactgcaacgcgggcggggtgctgttccaggaggcggacgcgcccgacgccaccatcgactactttggcgacttcgcgcccaccatggagctcaagcgcctcatccccaccgtcgacttcacggacgacatctcctccttcccgctgctcgtgctccaggtgacccacttcaagtgcggtggcgtggctatcggcgttggcatgcagcaccacgtagccgacggcttctccggcctgcacttcatcaactcgtgggcggacctctgccgcggcgtcccgatcgccgtcatgcccttcattgaccgctcgctcctccgcgcgcgcgatccgccgaccccggcctacccgcacatcgagtaccagccggcgcccgccatgctatcctctgagccgccacaggcggccctcacgtccaagccggcgacgccgcccacagccgtggctatcttcaagctctcccgcgccgagctcgtccgcctccgttcgcaggtccccgcgcgcgagggcgcgccgcggttcagcacgtacgctgtgctggcggcgcacgtgtggcggtgcgcgtccctggcgcgcggcctgccggccgaccagcccaccaagctgtactgcgccacggacgggcggcagcggctgcagccgccgcttccggagggctacttcggcaacgtgatcttcacggcgacgccgctggccaacgccggcacggtgacggccggggtggcagagggcgcgtccgtgatccaggccgcgctggaccggatggacgacgggtactgccggtcagcgctggactacctggagctgcagccggacctgtcggcgctggtccgcggggcgcacacgttccggtgccccaacctggggctcaccagctgggtgcgcctgcccatccacgacgcggacttcgggtgggggcggcccgtgttcatgggccccggcggcatcgcctacgaggggctcgcgttcgtgctccccagcgccaaccgcgacggcagcctgtccgtggccatctcgctgcaggcggagcacatggagaagttccggaagctcatctacgacttctgatctccaactcctccccacaagtcatcagtaccagtacgcgcgacacaaagaagcaagagaccgttgggagtaggttgcagcaatattctttgatttcacacatagttcctgcacacttttccgttcctgcctgccccctttgggcagggcgcataccttttgtgctgaattatttacgagcccctgcaattgtatgatgaatgaacaatttaatccgttctg

SEQ ID NO: 1048 - protein, 447 aa, Zea mays
  misc_feature (1)..(447): Pfam Name: Transferase Pfam Description: Transferase family
  misc_feature: Ceres Clone ID no. 1691303
  misc_feature: Bit score of 346.2 for HMM based on sequences of Figure 31
  misc_feature: Functional Homolog Of SEQ ID NO. 947
MKITVRGSEMVYPAAETPRRRLWNSGPDLVVPRFHTPSVYFFRREDADGNDLAGADGSFFDGARMRRALAEALVPFYPMAGRLARDEDGRVEIDCNAGGVLFQEADAPDATIDYFGDFAPTMELKRLIPTVDFTDDISSFPLLVLQVTHFKCGGVAIGVGMQHHVADGFSGLHFINSWADLCRGVPIAVMPFIDRSLLRARDPPTPAYPHIEYQPAPAMLSSEPPQAALTSKPATPPTAVAIFKLSRAELVRLRSQVPAREGAPRFSTYAVLAAHVWRCASLARGLPADQPTKLYCATDGRQRLQPPLPEGYFGNVIFTATPLANAGTVTAGVAEGASVIQAALDRMDDGYCRSALDYLELQPDLSALVRGAHTFRCPNLGLTSWVRLPIHDADFGWGRPVFMGPGGIAYEGLAFVLPSANRDGSLSVAISLQAEHMEKFRKLIYDF

SEQ ID NO: 1049 - protein, 441 aa, Avena sativa
  misc_feature (1)..(441): Pfam Name: Transferase Pfam Description: Transferase family
  misc_feature: Public GI ID no. 32400291
  misc_feature: Bit score of 346.4 for HMM based on sequences of Figure 31
  misc_feature: Functional Homolog Of SEQ ID NO. 947
MKITVRSSTVVVPAAETPRVRLWNANPDLVVPRFHTPSVYFYRRGGEDGGDACYFDAGRMRRALAEALVPFYPMAGRLAHDEDGRVEIDCNAEGVLFVEADAPDGAVDDFGDFVPTMGLKRLIPTVDFTGGISSYPLLVVQVTHFKCGGVALGIAMQHHVADGFSGLHFINSWSDLCRGVPIAVMPFIDRTLLRARDPPVPTHPHIEYQPAPAMLGSEEPQALAGKPESPPTAVDIFKLSRSDLGRLRAQLPTGEGAPRFSTYAVLGAHVWRCASLARGLAPEQPTKLYCATDGRQRLTPTHPDGYFGNVIFTATPLAEAGKVTGSLADGATTIQDALEKMDDEYCHSALDYLELQPDLSALVRGAHTFRCPNLGLTSWVRLPIHDADFGWGRPVFMGPGGIAYEGLAFVLPSANRDGSLSVAISLQAEHMEKFRKMIFDF

SEQ ID NO: 1050 - protein, 436 aa, Nicotiana tabacum
  misc_feature (7)..(436): Pfam Name: Transferase Pfam Description: Transferase family
  misc_feature: Public GI ID no. 40644899
  misc_feature: Bit score of 375.4 for HMM based on sequences of Figure 31
  misc_feature: Functional Homolog Of SEQ ID NO. 947
MGSEKMMKINIKESTLVKPSKPTPTKRLWSSNLDLIVGRIHLLTVYFYKPNGSSNFFDSKIMKEALSNVLVSFYPMAGRLARDEQGRIEINCNGEGVLFVEAESDAFVDDFGDFTPSLELRKLIPTVDTSGDISTFPLIIFQVTRFKCGGVSLGGGVFHTLSDGLSSIHFINTWSDIARGLSVAIPPFIDRTLLRARDPPTSSFEHVEYHPPPSLISSSKSLESTSPKPSTTTMLKFSSDQLGLLKSKSKHDGSTYEILAAHIWRCTCKARALSDDQLTKLHVATDGRSRLCPPLPPGYLGNVVFTGTPMAKSSELLQEPLTNSAKRIHSALSKMDDNYLRSALDYLELLPDLSALIRGPTYFASPNLNINSWTRLPVHDSDFGWGRPIHMGPACILYEGTVYILPSPNSKDRNLRLAVCLDADHMPLFEKYLYEF

SEQ ID NO: 1051 - protein, 463 aa, Oryza sativa subsp. japonica
  misc_feature (8)..(457): Pfam Name: Transferase Pfam Description: Transferase family
  misc_feature: Public GI ID no. 40253398
  misc_feature: Bit score of 379.1 for HMM based on sequences of Figure 31
  misc_feature: Functional Homolog Of SEQ ID NO. 947
MNSKHDDDEVQKIESCFVQPSKMLPRQALWLSPLDIIKASRGHTPLVHFYQHGDDAAADFFDVGGLKKAMAKALVAFYPFAGRLTTDADGRPSIDCNNEGVLFVVARSEQLTVDAFSNLKSLPELRRLFIPCIEATREVSSSVIRSWQVTFLRCGGLALGSAVHHSAVDGHSMFHFLQAWSYLCREGDDAAEAVMDPPCHNRALLQPRSPPVVHPDALAMFSPKTNLHERPPGRPVSTKIFAISDDEVAALKAMCGGASTFTAVSALVWRCACAARRLPPDARSKLSFPVNIRRRVRPTLPDRYFGNAIVTAFVATAVRNIVASGSSSATETTTASLAKVAARISGVMRRLAADNKELLRSAVDYHEMAATATSRWRRPDRGSLPETELRVISWLHLPLYDMDFGWGFPRMMSRAESVRGGFVHVMSGRPADGGGVRVLACLEAENMDEFERLLSAKFTYARI

SEQ ID NO: 1052 - protein, 430 aa, Coffea canephora
  misc_feature (1)..(430): Pfam Name: Transferase Pfam Description: Transferase family
  misc_feature: Public GI ID no. 139538848
  misc_feature: Bit score of 382.8 for HMM based on sequences of Figure 31
  misc_feature: Functional Homolog Of SEQ ID NO. 947
MKITVKETAMVRPAQPTPTKRLWNSNLDLLVARIHILTVYFYKPNGSANFFDTRVLKEALSNVLVSFYPMAGRLARDEEGRIEIDCNGEGVLFVEAESDSSVDDFGDFAPSLELRRLIPTVDCSGDISSYPLVIFQVTRFKCGAAALGAGVQHNLSDGVSSLHFINTWSDIARGLTIAVPPFIDRTLIRARDPPVPVFEHVEYYPPPQLKSDSRIQELKTGPRASTTAVLKITPEQLSQLKAKANNEGSTYEILAAHIWRTACKARGLTNDQSTKLYVATDGRSRLIPPLPPGYLGNVVFTATPIAESSNLQSEPLTNSAKRIHNALARMDNDYLRSALDYLEIQPDLSALVRGPRHFASPNLNINSWTRLPFHDADFGWGRPIHIGPAIILYEGTVYVLPSPGKDRTLSLAVCLDADHMPLFQRFLYDF

SEQ ID NO: 1053 - DNA, 1580 bp, Panicum virgatum
  misc_feature: Ceres Clone ID no. 1788124
  misc_feature: Encodes the peptide sequence at SEQ ID NO. 1054
aggccaccgccaccgccaccgacatcgcctggtaacccgtcgtccccgaatccacccacccacattccccgaaccccacgccgcattctccccgatccaaccgcgccgccgcaccaggaggggaaggaagaagaaaggagacggaccatgtcgtcgccgcccgcccgcatggatctggacggcaaccccgtcgcgcccctcaccatctgcatgatcggcgcaggtggcttcatcggctcccacctctgcgagaagctcatggccgagaccgcacacgtcgtcctcgccgtcgacgtctactgcgacaagatccgccacctcgtcgaccccgcgccgccgcacctcgctggacgaatctccttccaccgcctcaacatcaagaacgactccaggctcgagggactcatcaagatggccgatctgacgataaacctggcggccatctgcacgcccgccgactacaacacgcggcccctcgacaccatctacagcaacttcatcgacgccctcccagtggtcaagtactgctccgagaacaacaagcgtctcatccacttctccacgtgcgaggtctacggcaagaccatcggcagcttcctccccaaagaccaccctctccgcaaggaacctgaattttatgttctaaaagaagatgagtcgccctgcatttttggtccaatcgtgaaacagcgatggtcctatgcatgtgcaaagcaacttatcgagaggcttatttttgctgaaggcgcggaaaatggacttgagttcacaattgtgagacctttcaattggattggaccaaggatggacttcattcctggtgttgatggccctagtgagggtgtaccgcgggttttggcctgcttcagtaataatctgctccgccgagagcccttgaagcttgttgatgggggccagtcccaaagaacttttgtctacattaaggatgccatcgaagctgttgttttgatgattgaaaatcctgctcgagctaatggtcacatcttcaatgttgggaatcctaacaatgaagttactgttagggagttggcccaaatgatgacagaggtctatgcaaacgtctcaggagaggcaccactagatgaacccatgattgacgtgagttcgagtcagttctacggtgaaggatatgatgatagtgacaagagaatccctgacataactataatcaacaagcagctaggttggaatccaaagacgcctctcaaggatttgctggagacaacattgacatatcagcacaagacatacaaggaagctgtcaaaaggcaaatgtcacaggcttcagcgtcgagttagatagggaaaggtggtggcgggctctcatttagagcgcagtcacaggtgctatggtgttttggaagtcaggatacatatatgctagtaatcgtttttgatgctctagtcgctccctagatgacatcttgttatcagggaagggatgttatccgattccgtgctgctatcaagggaagggatgttatccgtatggcagagttgatgtattctatccattgtactttgattgctcctctgtgctgtgtcaagtcattctttgg

SEQ ID NO: 1054 - protein, 390 aa, Panicum virgatum
  misc_feature (20)..(290): Pfam Name: Epimerase Pfam Description: NAD dependent epimerase/dehydratase family
  misc_feature: Ceres Clone ID no. 1788124
  misc_feature: Bit score of 1153.3 for HMM based on sequences of Figure 26
  misc_feature: Functional Homolog Of SEQ ID NO. 1054
  misc_feature: in Figure 26
MSSPPARMDLDGNPVAPLTICMIGAGGFIGSHLCEKLMAETAHVVLAVDVYCDKIRHLVDPAPPHLAGRISFHRLNIKNDSRLEGLIKMADLTINLAAICTPADYNTRPLDTIYSNFIDALPVVKYCSENNKRLIHFSTCEVYGKTIGSFLPKDHPLRKEPEFYVLKEDESPCIFGPIVKQRWSYACAKQLIERLIFAEGAENGLEFTIVRPFNWIGPRMDFIPGVDGPSEGVPRVLACFSNNLLRREPLKLVDGGQSQRTFVYIKDAIEAVVLMIENPARANGHIFNVGNPNNEVTVRELAQMMTEVYANVSGEAPLDEPMIDVSSSQFYGEGYDDSDKRIPDITIINKQLGWNPKTPLKDLLETTLTYQHKTYKEAVKRQMSQASASS

SEQ ID NO: 1055 - DNA, 1533 bp, Zea mays
  misc_feature: Ceres Clone ID no. 300029
  misc_feature: Encodes the peptide sequence at SEQ ID NO. 1056
agggagcacccttccgaagccacgccaccgacatcgcctcgtgacccgacgcacgggatagaatcccattccccccgaaccctgcgccggggacccagccagctagctacatccactgatccacgcgcattccccgtaccaccgccaccgcgccgcgtcacggaaggaggaggatgtcgtcgtctccctcgccggcggccacccgcctggatctggatggcaaccccatcgcgcccctcaccatctgcatgatcggcgccggcggcttcatcggctcccacctctgcgagaagctaatggccgagacgcaccacaccgtcctcgctgttgacgtctactgcgacaagatccgccacctcgtcgaccccgcgccgccgcacctcgccgggcgcatctcattccaccgccttaacatcaaaaacgactccaggctagaggggctcatcaagatggccgatctgaccataaacctggccgcgatctgcacgccggccgactacaacactcgcccactcgacaccatctacagcaacttcatcgacgcactcccagtggtcaagtactgctccgagaacagcaagcgtctcatccacttctccacctgcgaggtctacggcaagaccatcggcagcttcctccccaaagaccacccgctccgcaaggagcctgaattttatgttcttaaagaagatgagtcgccctgtatttttggtccaatcgtgaaacaaagatggtcctatgcatgcgcaaaacaacttattgagaggcttgtatttgctgaaggtgcagaaaatggccttgatttcacaatcgtgagacctttcaattggattggaccaaggatggacttcattcctggtgttgatggtcctagtgaaggtgtgcctcgggttttggcttgctttagtaacaatctgctccggagagagcccttgaagcttgttgatgggggtcagtctcagagaacctttgtctacatcaaggatgccatcgaagctgtagtgctgatgattgaaaatcctgctcgagccaatggccacatcttcaatgttgggaatccgaacaatgaagttaccgttagggagttggcccaaatgatgacagaggtctacgcaaatgtctcaggagaggcaccgctggatgagcccatgattgacgtgagctcgagtcagttctacggcgaaggatacgatgatagcgacaagaggatccccgacatgactataatcaacaagcagctaggttggaacccaaagacgcctctcaaggatctgctggagacaacgctgacgtatcagcacaagacatacaaagaagctgtgaaaaggcaaatgtcgcaggcttcagcgtcgacttagatagcgtgcccctggctctcgtctagagcctagttgcagctgttaagatgtttcggaagcgcaggtcacacatacgctagtgatctttttttttgaggccctagatgtccgtgttgttagataatcaagggatgctgtatcagtatgatatatttgtggcagagttgatgtatcc

SEQ ID NO: 1056 - protein, 394 aa, Zea mays
  misc_feature (24)..(294): Pfam Name: Epimerase Pfam Description: NAD dependent epimerase/dehydratase family
  misc_feature: Ceres Clone ID no. 300029
  misc_feature: Bit score of 1151.5 for HMM based on sequences of Figure 26
  misc_feature: Functional Homolog Of SEQ ID NO. 1054
  misc_feature: in Figure 26
MSSSPSPAATRLDLDGNPIAPLTICMIGAGGFIGSHLCEKLMAETHHTVLAVDVYCDKIRHLVDPAPPHLAGRISFHRLNIKNDSRLEGLIKMADLTINLAAICTPADYNTRPLDTIYSNFIDALPVVKYCSENSKRLIHFSTCEVYGKTIGSFLPKDHPLRKEPEFYVLKEDESPCIFGPIVKQRWSYACAKQLIERLVFAEGAENGLDFTIVRPFNWIGPRMDFIPGVDGPSEGVPRVLACFSNNLLRREPLKLVDGGQSQRTFVYIKDAIEAVVLMIENPARANGHIFNVGNPNNEVTVRELAQMMTEVYANVSGEAPLDEPMIDVSSSQFYGEGYDDSDKRIPDMTIINKQLGWNPKTPLKDLLETTLTYQHKTYKEAVKRQMSQASAST

SEQ ID NO: 1057 - DNA, 1194 bp, Sorghum bicolor
  misc_feature: Ceres Annot ID no. 8670788
  misc_feature: Encodes the peptide sequence at SEQ ID NO. 1058
atgtcgtcgtcgtctccctctccggcggcggcggccgcgcgcctggatctggacggcaaccccatcgcgcccctcaccatctgcatgattggcgccggcggcttcatcgggtcccacctctgcgagaagctcatggccgagacgcgccacgtcgtcctcgccgtcgacgtctactgcgacaagatccgccacctcgtcgaccccgcgccgccgcacctcgccggccgcatctctttccaccgcctcaacatcaagaacgactccaggctcgagggcctcatcaagatggccgatctgaccatcaacctggcggccatctgcacgccggcggactacaacacgcgccccctcgacaccatctacagcaacttcatcgacgcactcccagtggtcaaatactgctccgagaacagcaagcgtctcatccacttctccacctgcgaggtctatggcaagaccatcggcagcttcctccccaaagaccacccgctccgcaaggaacctgaattttatgttctgaaagaagatgagtcaccctgtatttttggtccaattgtgaaacaacgatggtcctatgcatgcgcaaagcaacttattgagaggcttatatttgctgaaggcgcagaaaatggccttgaattcacgattgtgagacctttcaattggattggcccaagaatggacttcattcctggtgttgatggtcctagtgagggtgtaccccgggttttggcttgcttcagtaacaatctgctccgccgagagcccttgaagcttgttgatgggggccagtctcagagaacttttgtttacattaaggatgccatcgaagctgttgtgctaatgattgaaaatcctgctcgagccaatggtcacatcttcaatgttgggaatcctgacaatgaggttactgttagggagttggcccaaatgatgacagaggtctatgcaaacgtctcaggagaggcaccactggatgagcccatgattgatgtaagttcgagtcagttctatggtgaaggatatgatgacagtgataagagaattcccgacatgactataatcaacaagcagctaggttggaacccaaagactcctctcaaggatctgctggagacaacgttgacatatcagcacaagacatacaaagaagctgtgaagaggcaaatgtcgcaggcttcatcaacgagttag

SEQ ID NO: 1058 - protein, 397 aa, Sorghum bicolor
  misc_feature (27)..(297): Pfam Name: Epimerase Pfam Description: NAD dependent epimerase/dehydratase family
  misc_feature: Ceres Annot ID no. 8670788
  misc_feature: Bit score of 1152.2 for HMM based on sequences of Figure 26
  misc_feature: Functional Homolog Of SEQ ID NO. 1054
  misc_feature: in Figure 26
MSSSSPSPAAAAARLDLDGNPIAPLTICMIGAGGFIGSHLCEKLMAETRHVVLAVDVYCDKIRHLVDPAPPHLAGRISFHRLNIKNDSRLEGLIKMADLTINLAAICTPADYNTRPLDTIYSNFIDALPVVKYCSENSKRLIHFSTCEVYGKTIGSFLPKDHPLRKEPEFYVLKEDESPCIFGPIVKQRWSYACAKQLIERLIFAEGAENGLEFTIVRPFNWIGPRMDFIPGVDGPSEGVPRVLACFSNNLLRREPLKLVDGGQSQRTFVYIKDAIEAVVLMIENPARANGHIFNVGNPDNEVTVRELAQMMTEVYANVSGEAPLDEPMIDVSSSQFYGEGYDDSDKRIPDMTIINKQLGWNPKTPLKDLLETTLTYQHKTYKEAVKRQMSQASSTS

SEQ ID NO: 1059 - DNA, 1559 bp, Zea mays
  misc_feature: Ceres Clone ID no. 243057
  misc_feature: Encodes the peptide sequence at SEQ ID NO. 1060
accgacatcgcctcttaacccgacaagccccattgcccaggagaaccccgtgccggggagcgagccgcgcgcattccccgtcccgtgccaccggaccaggggaaggaggacacacatgtcgtcgtctctctctccagcggcggcagccgcgcccctggatctggacggcaactccgtcgcgcccctcaccatctgcatgattggcgccggcggcttcatcggctcccacctctgcgagaagctcatggccgagacgcgccatgtcgtcctcgccgtcgacgtatactgcgataagatccgccacctcgtcgaccccgcgccgccgcacctcgcggggcgcatctccttccaccgcctcaacatcaagaatgactccaggctcgagggcctcatcaagatggccgatctgaccatcaacctggcggctatctgcacgccggcggactacaacacgcgccccctcgacaccatctacagcaacttcatcgatgcactcccagtggtcaagtactgctccgagaacagcaagcgtctcatccacttctccacgtgcgaggtctatggcaagaccatcggcagcttcctccccaaagaccacccgctccgcaaggaacctgaattttatgttctgaaagaagatgagtcaccctgtatttttggtccaatcgtgaaacaacgatggtcctatgcttgcgcgaagcaacttattgagaggcttatatttgctgagggtgcagaaaatggccttgaattcacaatcgtgagaccttttaattggattgggccaaggatggatttcattcctggtgtcgatggtcctagcgagggtgtaccccgggtgctggcttgcttcagtaacaatctgctccgccgagagcctttgaagcttgtcgatgggggccagtctcagagaacctttgtatacatcaaggatgccatcgaagctgttgtgttgatgattgaaaatcctgctcgagccaatggtcacatcttcaatgttgggaatcctgacaatgaggttacggttagggagttggcccaaatgatgacagaggtctatgcaaacgtctcaggagaggcgccgctggatgagcctatgatcgacgtgagttcgagtcagttctacggtgaaggatacgatgacagtgataagagaattcctgacatgactataatcaacaagcagctaggttggaacccaaagacgcctctcaaggatctgctggagacaacattgacgtaccagcacaagacatacaaagaagctgtgaagaggcaaatgtcgcaggcttcagcaacaagttaagttggcgttggctggggacggctcctcgtttagagccctagtcgcagcaactgtttcgcaagtcagaatacatatacgccggtaatcgatctgtttgaggccctagacgcgcccatgttttgtctgctaccaagggatgttatcctattgtgatataactactacctgtgtctggttgctcctaggtttttttcttgcaattatatgtatttatattgaaaaactagatattatttaaaatacaattaaaaac

SEQ ID NO: 1060 - protein, 396 aa, Zea mays
  misc_feature (26)..(296): Pfam Name: Epimerase Pfam Description: NAD dependent epimerase/dehydratase family
  misc_feature: Ceres Clone ID no. 243057
  misc_feature: Bit score of 1145.9 for HMM based on sequences of Figure 26
  misc_feature: Functional Homolog Of SEQ ID NO. 1054
  misc_feature: in Figure 26
MSSSLSPAAAAAPLDLDGNSVAPLTICMIGAGGFIGSHLCEKLMAETRHVVLAVDVYCDKIRHLVDPAPPHLAGRISFHRLNIKNDSRLEGLIKMADLTINLAAICTPADYNTRPLDTIYSNFIDALPVVKYCSENSKRLIHFSTCEVYGKTIGSFLPKDHPLRKEPEFYVLKEDESPCIFGPIVKQRWSYACAKQLIERLIFAEGAENGLEFTIVRPFNWIGPRMDFIPGVDGPSEGVPRVLACFSNNLLRREPLKLVDGGQSQRTFVYIKDAIEAVVLMIENPARANGHIFNVGNPDNEVTVRELAQMMTEVYANVSGEAPLDEPMIDVSSSQFYGEGYDDSDKRIPDMTIINKQLGWNPKTPLKDLLETTLTYQHKTYKEAVKRQMSQASATS

SEQ ID NO: 1061 - protein, 398 aa, Oryza sativa subsp. japonica
  misc_feature (28)..(298): Pfam Name: Epimerase Pfam Description: NAD dependent epimerase/dehydratase family
  misc_feature: Public GI ID no. 115442487
  misc_feature: Bit score of 1153.2 for HMM based on sequences of Figure 26
  misc_feature: Functional Homolog Of SEQ ID NO. 1054
  misc_feature: in Figure 26
MSSSSSPPAASAAARLDLDGNPIAPLTICMIGAGGFIGSHLCEKLMAETAHVVYAVDVYCDKIRHLVDPAPPHLHGRISFHRLNIKNDSRLEGLIKMADLTINLAAICTPADYNTRPLDTIYSNFIDALPVVKYCSENNKRLIHFSTCEVYGKTIGSFLPTDHPLRKEPEFYVLKEDESPCIFGPIVKQRWSYACAKQLIERLIFAEGAENGLEFTIVRPFNWIGPRMDFIPGVDGPSEGVPRVLACFSNNLLRREPLKLVDGGQSQRTFVYIKDAIEAVHLMIENPARANGQIFNVGNPNNEVTVRQLAEMMTEVYANVSGEPPLDEPMIDVSSKQFYGEGYDDSDKRIPDMTIINKQLGWNPKTPLKDLLETTLTYQHKTYKEAIKRQMSQASASS

SEQ ID NO: 1062 - protein, 389 aa, Arabidopsis thaliana
  misc_feature (20)..(290): Pfam Name: Epimerase Pfam Description: NAD dependent epimerase/dehydratase family
  misc_feature: Public GI ID no. 21594350
  misc_feature: Bit score of 1155.9 for HMM based on sequences of Figure 26
  misc_feature: Functional Homolog Of SEQ ID NO. 1054
  misc_feature: in Figure 26
MANGADRLDLDGKPIKPMTICMIGAGGFIGSHLCEKLMTETPHKVLALDVYNDKIKHLLEPDTVQWAGRIQFHRINIKHDSRLEGLIKMADLTINLAAICTPADYNTRPLDTIYSNFIDALPVVKYCSENNKRLIHFSTCEVYGKTIGSFLPKDHPLRQDPEFYVLKEDISPCIFGSIEKQRWSYACAKQLIERLVYAEGAENGLEFTIVRPFNWIGPRMDFIPGIDGPSEGVPRVLACFSNNLLRREPLKLVDGGESQRTFIYIKDAIEAVLLMIENPERANGHIFNVGNPNNEVTVRQLAEMMTEVYAKVSGETAIDSPTIDVSSKEFYGEGYDDSDKRIPDMTIINRQLGWNPKTSLWDLLESTLTYQHTTYAEAIKKATSKPVAS

SEQ ID NO: 1063 - DNA, 1161 bp, Solanum lycopersicum
  misc_feature: Ceres Annot ID no. 8460479
  misc_feature: Encodes the peptide sequence at SEQ ID NO. 1064
atggcaggaagggtagatctggacggaaatccgattaagccgattacaatatgtatgattggtgccggaggttttattggctcgcatctatgtgaaaaattgatgtcggagacgccgcacaaggtgctcgccgtcgatgttagcaatgacaagatcaagcatcttctcgaaccggctactctcgcctgggctgatcgtattgagtttcaccgtatcaacattaagaacgattctcgtcttgaaggccttatcaagatggcagatctgaccatcaatcttgctgcgatctgcactccagctgattacaacactcgtccacttgataccatttacagcaacttcattgatgctcttccagtggtgaagtactgctcagaaaatggaaagcgacttattcatttttccacctgtgaaatttatgggaaaacaataggagcctttttacccaaagacagcccactgcggcaggatcctgcatactatgtgcttaaggaagacacctccccttgcatttttggacctattgagaagcagaggtggtcatatgcctgtgcaaagcaattgattgagaggttgatatatgctgagggtgctgagaatggtttagaattcactattgtaaggccgttcaattggattggtcctagaatggatttcattccgggcattgatggtcctagtgaaggtgttccacgagtgttagcttgctttagtaataacctcttaagacgtgaaccgctgaaattagtggatggtggggaatcacagagaacttttatatatatcaaggatgctattgaagctgttctcttgatgattgaaaatcctgcaagggccaatggtcatatttttaatgtgggcaatcctaacaatgaagttactgtgcgacagctagctgaaatgatgaccaaggtctattcgaaggtgagtggagaatcttctcttgaaacgcctaccattgatataagttcgaaagaattttatggagaagggtatgatgacagtgacaagagaattccggatatgactataatcaacaaacagcttgcttggaacccgaaaacctccctatgggacttgcttgaatcaacactcacctaccaacacaggacatatgctgaggctatcaagcaggccatgtcaaagtcaactgcaaattga

SEQ ID NO: 1064 - protein, 386 aa, Solanum lycopersicum
  misc_feature (17)..(287): Pfam Name: Epimerase Pfam Description: NAD dependent epimerase/dehydratase family
  misc_feature: Ceres Annot ID no. 8460479
  misc_feature: Bit score of 1138.9 for HMM based on sequences of Figure 26
  misc_feature: Functional Homolog Of SEQ ID NO. 1054
  misc_feature: in Figure 26
MAGRVDLDGNPIKPITICMIGAGGFIGSHLCEKLMSETPHKVLAVDVSNDKIKHLLEPATLAWADRIEFHRINIKNDSRLEGLIKMADLTINLAAICTPADYNTRPLDTIYSNFIDALPVVKYCSENGKRLIHFSTCEIYGKTIGAFLPKDSPLRQDPAYYVLKEDTSPCIFGPIEKQRWSYACAKQLIERLIYAEGAENGLEFTIVRPFNWIGPRMDFIPGIDGPSEGVPRVLACFSNNLLRREPLKLVDGGESQRTFIYIKDAIEAVLLMIENPARANGHIFNVGNPNNEVTVRQLAEMMTKVYSKVSGESSLETPTIDISSKEFYGEGYDDSDKRIPDMTIINKQLAWNPKTSLWDLLESTLTYQHRTYAEAIKQAMSKSTAN

SEQ ID NO: 1065 - DNA, 1567 bp, Gossypium hirsutum
  misc_feature: Ceres Clone ID no. 1948444
  misc_feature: Encodes the peptide sequence at SEQ ID NO. 1066
aaccacatatatacagcacgcccctctttcatttctctccatctctatatctctcagctcttttcttctcttgtgacactgctaatattttttttattgtcgtctccggcgttcgaagatcataaaaaaccggagtcgtttcaaatggctacgagaacggatctagatgggaggccaataaagccgatgacgatatgcatgatcggtgccggaggcttcatcggctcccacctttgcgagaaattgatgtcggagacgccgcacaaggtgctcgccttggacgtttacaatgacaagatcaagcacctcctcgagcctgactctctcccttgggctggccgtattcagttccaccgacttaacatcaagcacgattctaggctcgaaggcctcatcaagatggcagatctcgtgataaatcttgctgccatctgtactccggcagattataatacgcgtccactagacacgatttacagcaattttattgatgcacttcctgtggtgaagtactgttcagagaacaacaagcgtctcattcacttctctacttgtgaagtgtatggaaaaactattggaagctttcttcctaaagattctcctctccgtcaggatcctgcctactatgttcttaaggaagatacttccccctgcatttttggttcaattgagaagcagaggtggtcctatgcatgtgctaagcagttgattgagaggcttatttatgctgaaggggcagagaatggcctcgagttcactattgtgaggccttttaactggattggacccaggatggatttcattcctggcattgatggtcctagtgagggagttcccagagttcttgcatgctttagtaataatctcctacgtcgtgaaccacttaagcttgtggatggtggcgaatctcagagaacttttatatacataaaggatgctattgaagctgttctcttgatgattgaaaatccagatagggccaatggccatattttcaatgtgggtaacccgaacaatgaagtcacagttaggcaacttgctgaaatgatgactaaggtctatgccaaggttagtggagaaactgtgctggagtctccaacagttgatgtcagctccaaggaattttatggtgagggttatgatgatagtgacaagagaattccagacatgaccataataaacaaacaactcggttggaaccccaagacatccctttgggacttgctcgaatctaccctaacctaccaacacaggacttatgccgaggctattaagaaatctatagcaaaaccttctgcatcctaaaggaggctagatgtttaaaccacggctaagaaaggactcattaaatgtgcttcatggcaaatgtttcaattcttctttcccccccttcttttaggaagtcttaaatatatcataatgttgcttttctttatacccccccccctttttttttgtcttccccgtgttggtagttgatagctcactgtagctctggcagctatgttatcagaatggttttatgtggagacgttcttactagggaatggtattgttttagtattac

SEQ ID NO: 1066 - protein, 386 aa, Gossypium hirsutum
  misc_feature (17)..(287): Pfam Name: Epimerase Pfam Description: NAD dependent epimerase/dehydratase family
  misc_feature: Ceres Clone ID no. 1948444
  misc_feature: Bit score of 1146.5 for HMM based on sequences of Figure 26
  misc_feature: Functional Homolog Of SEQ ID NO. 1054
  misc_feature: in Figure 26
MATRTDLDGRPIKPMTICMIGAGGFIGSHLCEKLMSETPHKVLALDVYNDKIKHLLEPDSLPWAGRIQFHRLNIKHDSRLEGLIKMADLVINLAAICTPADYNTRPLDTIYSNFIDALPVVKYCSENNKRLIHFSTCEVYGKTIGSFLPKDSPLRQDPAYYVLKEDTSPCIFGSIEKQRWSYACAKQLIERLIYAEGAENGLEFTIVRPFNWIGPRMDFIPGIDGPSEGVPRVLACFSNNLLRREPLKLVDGGESQRTFIYIKDAIEAVLLMIENPDRANGHIFNVGNPNNEVTVRQLAEMMTKVYAKVSGETVLESPTVDVSSKEFYGEGYDDSDKRIPDMTIINKQLGWNPKTSLWDLLESTLTYQHRTYAEAIKKSIAKPSAS

SEQ ID NO: 1067 - protein, 388 aa, Vitis vinifera
  misc_feature (19)..(289): Pfam Name: Epimerase Pfam Description: NAD dependent epimerase/dehydratase family
  misc_feature: Public GI ID no. 225465764
  misc_feature: Bit score of 1148.6 for HMM based on sequences of Figure 26
  misc_feature: Functional Homolog Of SEQ ID NO. 1054
  misc_feature: in Figure 26
MASAARLDLDGNAIKPMTICMIGAGGFIGSHLCEKLMAETMHKVLAVDVYNDKIRHLLEPAAHPWSDRIQFHRINIKHDSRLEGLIKMADLTVNLAAICTPADYNTRPLDTIYSNFIDALPVVKYCSENNKRLIHFSTCEVYGKTIGSFLPKDSPLRQDPAYYLLKEDASPCIFGSIEKQRWSYACAKQLIERLIYAEGAENGLEFTIVRPFNWIGPRMDFIPGIDGPSEGVPRVLACFSNNLLRREPLKLVDGGQSQRTFVYIKDAIEAVLLMIDNPGRANGHIFNVGNPNNEATVKQLAEMMTEVYAKVSGEPSLEVPTVDVSSKEFYGEGYDDSDKRIPDMTIINKQLGWNPKTSLWDLLESTLTYQHRTYAEAIKQAIAKPVAS

SEQ ID NO: 1068 - DNA, 1642 bp, Panicum virgatum
  misc_feature: Ceres Clone ID no. 1995643
  misc_feature: Encodes the peptide sequence at SEQ ID NO. 1069
ggtagagagagaatcgggagagaagggagggcgagcgaggccgccgccaccgacatcgcctggtaacccgtcgtccacccacccacccacattccccgaacaccacgccgctgccaccgcgcgcattctccccgatccaaccgcaccaagagggggcaaggaagaagaaaggagggagacggggataccatgtcgtcgccctcgccggcgcccgcccgcatggatctggacggcaaccccgtcgcgcccctcaccatctgcatgatcggcgcgggtggcttcatcggctcccacctctgcgagaagctcatggccgagaccgcacacgtcgtcctcgccgtcgacgtctactgcgacaagatccgccacctcgtcgaccccgcgccgccgcacctcgccggacggatctccttccaccgcctcaacatcaagaacgactccaggctcgagggactcatcaagatggccgatctgactataaacctggcggccatctgcacgcccgccgactacaacacgcggcccctcgacaccatctacagcaacttcatcgacgccctcccagtggtcaagtactgctccgagaacaacaagcgtctcatccacttctccacctgcgaggtctacggcaagaccgtcggcagcttcctccccaaagaccaccctctccgcaaggaacctgaattttatgttctaaaagaagatgagtcgccctgcatttttggtccaatcgtgaaacagcgatggtcctatgcatgtgcaaagcaacttattgagaggcttatttttgctgaaggtgcagaaaatggacttgagttcacaattgtgagacctttcaattggattggaccaaggatggacttcattcctggtgttgatggccctagtgagggtgtacctcgggttttggcctgcttcagtaacaatctgctccgccgagagcccttgaagcttgttgatgggggccagtcccaaagaacttttgtctacattaaggatgccatcgaagctgttgttttgatgattgaaaatcctgctcgagctaatggtcacatcttcaacgttgggaatcctaacaatgaagttactgttagggagttggcccaaatgatgacagaggtctatgcaaacgtctcaggagaggcaccactagatgaacccatgattgacgtgagttcgagtcagttctacggtgaaggatatgatgatagtgacaagagaatccctgacatgactataatcaacaagcagctaggttggaatccaaagacacctctcaaggatttgctggagacaacattgacatatcagcacaagacatacaaggaagctgtgaaaaggcaaatggcacaggcttcagcgtcgagttgatgtattctatccattgtactttgattgctcctctgtgctgtgtcaagtcattctttggaatcatttcattggcgagagttgttattgttcgtatgttgcaacctgagtgagtgagattattaattagttgggcgcacatttctctgctgggtagcaatactatatcatattatagctgatctgctgatgtggtgggttattaagttctggtggtttggttcctttgaccacttgaaattgatgttggcagactcagattttttccactgac

SEQ ID NO: 1069 - protein, 393 aa, Panicum virgatum
  misc_feature (23)..(293): Pfam Name: Epimerase Pfam Description: NAD dependent epimerase/dehydratase family
  misc_feature: Ceres Clone ID no. 1995643
  misc_feature: Bit score of 1151.2 for HMM based on sequences of Figure 26
  misc_feature: Functional Homolog Of SEQ ID NO. 1054
MSSPSPAPARMDLDGNPVAPLTICMIGAGGFIGSHLCEKLMAETAHVVLAVDVYCDKIRHLVDPAPPHLAGRISFHRLNIKNDSRLEGLIKMADLTINLAAICTPADYNTRPLDTIYSNFIDALPVVKYCSENNKRLIHFSTCEVYGKTVGSFLPKDHPLRKEPEFYVLKEDESPCIFGPIVKQRWSYACAKQLIERLIFAEGAENGLEFTIVRPFNWIGPRMDFIPGVDGPSEGVPRVLACFSNNLLRREPLKLVDGGQSQRTFVYIKDAIEAVVLMIENPARANGHIFNVGNPNNEVTVRELAQMMTEVYANVSGEAPLDEPMIDVSSSQFYGEGYDDSDKRIPDMTIINKQLGWNPKTPLKDLLETTLTYQHKTYKEAVKRQMAQASASS

SEQ ID NO: 1070 - protein, 395 aa, Zea mays
  misc_feature (24)..(294): Pfam Name: Epimerase Pfam Description: NAD dependent epimerase/dehydratase family
  misc_feature: Public GI ID no. 162462229
  misc_feature: Bit score of 1128.1 for HMM based on sequences of Figure 26
  misc_feature: Functional Homolog Of SEQ ID NO. 1054
MSSSPSPAATRLDLDGNPIAPLTICMIGAGGFIGSHLCEKLMAETHHTVLAVDVYCDKIRHLVDPAPPHLAGRISFHRLNIKNDSRLEGLIKMADLTINLAAICTPADYNTRPLDTIYSNFIDALPVVKYCSENSKRLIHFPTCEVYGKTIGSFLPKDHPLRKEPEFYVLKEDESPCIFGPIVKQRWSYACAKQLIERLVFAEGAENGLDFTIVRPFNWIGPRMDFIPGVDGPSEGVPRVLACFSNNLLRREPLKLVDGGQSQRTFVYIKDAIEAVVLMIENPARANGHIFNVGNPNNEVTVRELAPMMTEVYTQMSQGEAPLDEPMIDVSSSQFYGEGYDDSDKRIPDMTIINKQLGWNPKTPLKDLLETTLTYQHKTYKEAAKRQMSQASAST

SEQ ID NO: 1071 - protein, 407 aa, Oryza sativa subsp. indica
  misc_feature (28)..(307): Pfam Name: Epimerase Pfam Description: NAD dependent epimerase/dehydratase family
  misc_feature: Public GI ID no. 125529268
  misc_feature: Bit score of 1137.3 for HMM based on sequences of Figure 26
  misc_feature: Functional Homolog Of SEQ ID NO. 1054
MSSSSSPPAASAAARLDLDGNPIAPLTICMIGAGGFIGSHLCEKLMAETAHVVYAVDVYCDKIRHLVDPAPPHLHGRISFHRLNIKNDSRLEGLIKMADLTINLAAICTPADYNTRPLDTIYSNFIDALPVVKYCSENNKRLIHFSTCEVYGKTIGSFLPTDHPLRKIGGGMDLVQEPEFYVLKEDESPCIFGPIVKQRWSYACAKQLIERLIFAEGAENGLEFTIVRPFNWIGPRMDFIPGVDGPSEGVPRVLACFSNNLLRREPLKLVDGGQSQRTFVYIKDAIEAVHLMIENPARANGQIFNVGNPNNEVTVRQLAEMMTEVYANVSGEPPLDEPMIDVSSKQFYGEGYDDSDKRIPDMTIINKQLGWNPKTPLKDLLETTLTYQHKTYKEAIKRQMSQASASS

SEQ ID NO: 1072 - protein, 369 aa, Zea mays
  misc_feature (1)..(269): Pfam Name: Epimerase Pfam Description: NAD dependent epimerase/dehydratase family
  misc_feature: Public GI ID no. 194689614
  misc_feature: Bit score of 1071.7 for HMM based on sequences of Figure 26
  misc_feature: Functional Homolog Of SEQ ID NO. 1054
MIGAGGFIGSHLCEKLMAETHHTVLAVDVYCDKIRHLVDPAPPHLAGRISFHRLNIKNDSRLEGLIKMADLTINLAAICTPADYNTRPLDTIYSNFIDALPVVKYCSENSKRLIHFSTCEVYGKTIGSFLPKDHPLRKEPEFYVLKEDESPCIFGPIVKQRWSYACAKQLIERLVFAEGAENGLDFTIVRPFNWIGPRMDFIPGVDGPSEGVPRVLACFSNNLLRREPLKLVDGGQSQRTFVYIKDAIEAVVLMIENPARANGHIFNVGNPNNEVTVRELAQMMTEVYANVSGEAPLDEPMIDVSSSQFYGEGYDDSDKRIPDMTIINKQLGWNPKTPLKDLLETTLTYQHKTYKEAVKRQMSQASAST

SEQ ID NO: 1073 - DNA, 1561 bp, Arabidopsis thaliana
  misc_feature: Ceres Annot ID no. 863641
  misc_feature: Encodes the peptide sequence at SEQ ID NO. 1074
attctcacaaatctctcttccacccattgttatctctgtagaagcgtgagagagatcacgcgtgttcaccgacacaatcaaaatatggcgaacggagccgatagattggatctggacggtaaaccgattaagccgatgacgatatgcatgatcggtgccggaggtttcattggctctcatctctgtgagaagcttatgacggagactcctcacaaggttcttgcgcttgatgtttacaatgataagatcaagcacttgcttgagcctgataccgttcaatgggctggtcggatccagtttcatcgtatcaacattaagcatgattctagacttgaaggactgatcaagatggcagatctgacgataaatctagctgcgatctgtactccagcagattacaatacgcgtcctcttgacactatctacagcaatttcattgatgctctcccagtggttaaatactgctcagagaacaacaagcgtctgattcacttttccacttgtgaagtgtatggaaaaactataggaagctttcttccaaaggatcatcctctgcgtcaggatcctgaattttatgtactcaaagaagatatatccccttgcatctttggttcaattgagaagcagaggtggtcatatgcttgtgcaaagcaacttattgagagacttgtttacgctgagggtgctgagaatggactcgagttcaccattgtaagaccattcaactggattggacctaggatggatttcatccctggcattgatggtcctagcgagggtgtcccacgggttctagcgtgctttagtaacaatcttctgcgacgggagcctctcaagcttgtggatggtggagaatcacagagaaccttcatctacatcaaagatgctatcgaagctgtccttttgatgatcgaaaatccagagagagccaatgggcatatcttcaatgtaggcaacccaaacaatgaagtgacagtgagacaacttgctgaaatgatgactgaggtctacgccaaagtgagtggagagacagctatcgagagtccaacgatcgacgtgagctccaaagagttttatggagaaggttatgatgacagcgacaagagaatcccagacatgaccatcatcaaccgtcaacttggatggaacccgaagacgtcgctttgggacttgcttgaatcgaccttaacataccagcacacgacttatgcggaagccattaagaaggccacttcaaaaccagtcgcatcttagaggtcgtctctctttacaaacacctcaaatcatgtggtggctacgattccattctttctttttaaaaaaaaaattctcccaacagaaaccttctcttcccttattttaggccattctaaacaaatgatatatcatggtggttgattctagtttacgttttccttgttatatagtattactgttaatgtttttgaattcctttgttttgaagctttatatcttgtatttgtccgaaactaaaaagggaatggtttgtgcaaactataacattggggctttctttatatgttacatatctttggcggat

SEQ ID NO: 1074 - protein, 389 aa, Arabidopsis thaliana
  misc_feature (20)..(290): Pfam Name: Epimerase Pfam Description: NAD dependent epimerase/dehydratase family
  misc_feature: Ceres Annot ID no. 863641
  misc_feature: Bit score of 1155.5 for HMM based on sequences of Figure 26
  misc_feature: Functional Homolog Of SEQ ID NO. 1054
MANGADRLDLDGKPIKPMTICMIGAGGFIGSHLCEKLMTETPHKVLALDVYNDKIKHLLEPDTVQWAGRIQFHRINIKHDSRLEGLIKMADLTINLAAICTPADYNTRPLDTIYSNFIDALPVVKYCSENNKRLIHFSTCEVYGKTIGSFLPKDHPLRQDPEFYVLKEDISPCIFGSIEKQRWSYACAKQLIERLVYAEGAENGLEFTIVRPFNWIGPRMDFIPGIDGPSEGVPRVLACFSNNLLRREPLKLVDGGESQRTFIYIKDAIEAVLLMIENPERANGHIFNVGNPNNEVTVRQLAEMMTEVYAKVSGETAIESPTIDVSSKEFYGEGYDDSDKRIPDMTIINRQLGWNPKTSLWDLLESTLTYQHTTYAEAIKKATSKPVAS

SEQ ID NO: 1075 - DNA, 1444 bp, Gossypium hirsutum
  misc_feature: Ceres Clone ID no. 1969770
  misc_feature: Encodes the peptide sequence at SEQ ID NO. 1076
ataaaaaaccggagtcgtttcaaatggctacgagaacggatctagatgggaggccaataaagccgatgacgatatgcatgatcggtgccggaggcttcatcggctcccacctttgcgagaaattgatgtcggagacgccgcacaaggtgctcgccttggacgtttacaatgacaagatcaagcacctcctcgagcctgactctctcccttgggctggccgtattcagttccaccgacttaacatcaagcacgattctaggctcgaaggcctcatcaagatggcagatctcgtgataaatcttgctgccatctgtactccggcagattataatacgcgtccactagacacgatttacagcaattttattgatgcacttcctgtggtgaagtactgttcagagaacaacaagcgtctcattcacttctctacttgtgaagtgtatggaaaaactattggaagctttcttcctaaagattctcctctccgtcaggatcctgcctactatgttcttaaggaagatacttccccctgcatttttggttcaattgggaagcagaggtggtcctatgcatgtgctaagcagttgattgagaggcttatttatgctgaaggggcagagaatggcctcgagttcactattgtgaggccttttaactggattggacccaggatggatttcattcctggcattgatggtcctagtgagggagttcccagagttcttgcatgctttagtaataatctcctacgtcgtgaaccacttaagcttgtggatggtggcgaatctcagagaacttttatatacataaaggatgctattgaagctgttctcttgatgattgaaaatccagatagggccaatggccatattttcaatgtgggtaacccgaacaatgaagtcacagttaggcaacttgctgaaatgatgactaaggtctatgccaaggttagtggagaaactgtgctggagtctccaacagttgatgtcagctccaaggaattttatggtgagggttatgatgatagtgacaagagaattccagacatgaccataataaacaaacaactcggttggaaccccaagacatccctttgggacttgctcgaatctaccctaacctaccaacacaggacttatgccgaggctattaagaaatctatagcaaaaccttctgcatcctaaaggaggctagatgtttaaaccacggctaagaaaggactcattaaatgtgcttcatggcaaatgtttcaattcttctttcccccccttcttttaggaagtcttaaatatatcataatgttgcttttctttatacccccccccctttttttttgtcttccccgtgttggtagttgatagctcactgtagctctggcagctatgttatcagaatggttttatgtggagacgttcttactagggaatggtattgttttagtatt

SEQ ID NO: 1076 - protein, 386 aa, Gossypium hirsutum
  misc_feature (17)..(287): Pfam Name: Epimerase Pfam Description: NAD dependent epimerase/dehydratase fam
  misc_feature: Ceres Clone ID no. 1969770
  misc_feature: Bit score of 1143.5 for HMM based on sequences of Figure 26
  misc_feature: Functional Homolog Of SEQ ID NO. 1054
MATRTDLDGRPIKPMTICMIGAGGFIGSHLCEKLMSETPHKVLALDVYNDKIKHLLEPDSLPWAGRIQFHRLNIKHDSRLEGLIKMADLVINLAAICTPADYNTRPLDTIYSNFIDALPVVKYCSENNKRLIHFSTCEVYGKTIGSFLPKDSPLRQDPAYYVLKEDTSPCIFGSIGKQRWSYACAKQLIERLIYAEGAENGLEFTIVRPFNWIGPRMDFIPGIDGPSEGVPRVLACFSNNLLRREPLKLVDGGESQRTFIYIKDAIEAVLLMIENPDRANGHIFNVGNPNNEVTVRQLAEMMTKVYAKVSGETVLESPTVDVSSKEFYGEGYDDSDKRIPDMTIINKQLGWNPKTSLWDLLESTLTYQHRTYAEAIKKSIAKPSAS

SEQ ID NO: 1077 - protein, 389 aa, Arabidopsis thaliana
  misc_feature (20)..(290): Pfam Name: Epimerase Pfam Description: NAD dependent epimerase/dehydratase family
  misc_feature: Public GI ID no. 14596185
  misc_feature: Bit score of 1143.9 for HMM based on sequences of Figure 26
  misc_feature: Functional Homolog Of SEQ ID NO. 1054
MANGADRLDLDGKPIKPMTICMIGAGGFIGSHLCEKLMTETPHKVLALDVYNDKIKHLLEPDTVQWAGRIQFHRINIKHDSRLEGLIKMADLTINLAAICTPADYNTRPLDTIYSNFIDALPVVKYCSENNKRLIHFSTCEVYGKTIGSFLPKDHPLRQDPEFYVLKEDISPCIFGSIEKQRWSYACAKQLIERLVYAEGAENGLEFTIVRPFNWIGPRMDFIPGIDGPSEGVPRVLACFSNNLLRREPLKLVDGGESQRTFIYIKDAIEAVLLMIENPERANGHIFNVGNPNNEVTVRQLAEMMTEVYAKVSGETAIESPTIDVSSKEFYGEGYDDSDKRIPDMTIINRQLGCTPKTSLWDLLESTLTYQHTTYAEAIKKATSKPVAS

SEQ ID NO: 1078 - protein, 388 aa, Vitis vinifera
  misc_feature (19)..(289): Pfam Name: Epimerase Pfam Description: NAD dependent epimerase/dehydratase family
  misc_feature: Public GI ID no. 225436371
  misc_feature: Bit score of 1136.8 for HMM based on sequences of Figure 26
  misc_feature: Functional Homolog Of SEQ ID NO. 1054
MASAARLDLDGNAIKPMTICMIGAGGFIGSHLCEKLMAETMHKVLAVDVYSDKIKHLLEPSTHPWSDRIQFHRINIKHDSRLEGLIKMADLTINLAAICTPADYNTRPLDTIYSNFIDALPVVKYCSENNKRLIHFSTCEVYGKTIGSFLPKDSPLWQDPTYYVLKEDASPCIFGPIEKQRWSYACAKQLIERLIYAEGAENDLEFTIVRPFNWIGPRMDFIPGIDGPSEGVPRVLACFSNNLLRHEPLKLVDGGQSQRTFVYIKDAIEAVLLMIDNPARANGHIFNVGNPNNEVTVRQLAEMMTEVYAKVSGEPSLEVPTVDVSSKEFYGEGYDDSDKRIPDMTIINKQLGWNPKTSLWDLLESTLTYQHRTYAEAIKQAIAKPVAS

SEQ ID NO: 1079 - protein, 386 aa, Solanum tuberosum
  misc_feature (17)..(287): Pfam Name: Epimerase Pfam Description: NAD dependent epimerase/dehydratase family
  misc_feature: Public GI ID no. 85718018
  misc_feature: Bit score of 1113.2 for HMM based on sequences of Figure 26
  misc_feature: Functional Homolog Of SEQ ID NO. 1054
MAGRVDLDGNPIKPMTICMIGAGGFIGSHLCEKLMSETPHTVLAVDVYSDKIKHLLEPTSLPWNGRIQFHRINIKNDSRLEGLIKMADLTVNLAAICTPADYNTRPLDTIYSNFIDALPVVKYCSENGKRLIHFSTCEVYGKTIGAFLPEDSPLRQDPAYFVLSEEASPCIFGPIEKQRWSYACAKQLIERLIYAEGAENGLEFTIVRPFNWIGPRMDFIPGIDGPSEGVPRVLACFSNNLLRHEPLKLVDGGHSQRTFIYIKDAIEAVFLMIENPARANGHIFNVGNPNNEVTVKQLAEMMTQVYSKVSGETPLETPTVDVSSKEFYGEGYDDSDKRIPDMTIINRQLGWNPKTSLWDLLESTLTYQHRTYAEAVKQAMSKTTAN

SEQ ID NO: 1080 - DNA, 1496 bp, Arabidopsis thaliana
  misc_feature: Ceres Clone ID no. 28205
  misc_feature: Encodes the peptide sequence at SEQ ID NO. 1081
ttttttagattctctctctacagagaacttgattattttttctgatctgagaaaaaaaatggcgaatggagctaatagagtggatctcgacgggaaaccgatacaaccgttgacaatatgcatgatcggcgccggaggtttcatcggttcacatctctgtgaaaagctcttgaccgagacgccacataaggtgcttgcgctcgatgtttacaacgataagatcaaacacttgcttgagcctgataccgttgaatggagtggtcggatccagtttcatcgtatcaatattaagcatgattcgagacttgaaggtcttgttaagatggcggatctgattataaatcttgctgcgatctgtactccagctgattacaatacacgtcctcttgatactatctacagcaatttcattgatgcgcttccagttgtgaaatactgttctgagaacaacaagcgtctcattcacttttctacctgtgaagtttatggaaaaaccattggaagctttcttcctaaggatcatcctctgcgtgatgatcctgctttctatgttcttaaagaagatatttccccttgcatatttggttcaattgagaagcagaggtggtcatatgcgtgtgcaaagcaactgattgagagacttgtttacgctgagggtgctgagaatgggcttgagttcaccatcgtacgaccttttaactggattggacctaggatggatttcatccccggcattgatggtcctagcgaaggtgtcccacgtgtccttgcctgctttagtaacaatcttctacgtcgtgagcctctcaagcttgtagatggtggagaatcacagagaactttcgtctacatcaatgatgctattgaagctgtccttttgatgattgaaaacccagagagggcaaatgggcacatcttcaacgtaggcaacccgaacaacgaagttacagtaagacagctcgctgaaatgatgaccgaggtttacgcaaaagtgagtggagaaggagccattgagagcccaacggttgatgttagctccaaagagttttacggggaaggttatgatgacagtgacaagagaatcccagacatgaccatcattaaccgccaactcggatggaacccgaaaacatcgctatgggacttgctcgagtcgaccttaacctaccagcacaggacatacgctgaagctgtgaagaaggcaacatccaaaccagtggcttcctaaactctccaagaccccaacgaaactcgttaaacacgcgtcattttggcattttactctattcgattctatttttttcatcccagagaaaactttttttcttttttctttttaagaaaacgatataatcacggtggttcgttccaagtataccttttcgtttgtaagttttctctttttgtttggtttgtttggccatgtatgtcggagctgtcagaaagcaagaggttaatcgtttgtagcgaatgataaatgttcgagtttatatttt

SEQ ID NO: 1081 - protein, 389 aa, Arabidopsis thaliana
  misc_feature (20)..(290): Pfam Name: Epimerase Pfam Description: NAD dependent epimerase/dehydratase fam
  misc_feature: Ceres Clone ID no. 28205
  misc_feature: Bit score of 1134.1 for HMM based on sequences of Figure 26
  misc_feature: Functional Homolog Of SEQ ID NO. 1054
MANGANRVDLDGKPIQPLTICMIGAGGFIGSHLCEKLLTETPHKVLALDVYNDKIKHLLEPDTVEWSGRIQFHRINIKHDSRLEGLVKMADLIINLAAICTPADYNTRPLDTIYSNFIDALPVVKYCSENNKRLIHFSTCEVYGKTIGSFLPKDHPLRDDPAFYVLKEDISPCIFGSIEKQRWSYACAKQLIERLVYAEGAENGLEFTIVRPFNWIGPRMDFIPGIDGPSEGVPRVLACFSNNLLRREPLKLVDGGESQRTFVYINDAIEAVLLMIENPERANGHIFNVGNPNNEVTVRQLAEMMTEVYAKVSGEGAIESPTVDVSSKEFYGEGYDDSDKRIPDMTIINRQLGWNPKTSLWDLLESTLTYQHRTYAEAVKKATSKPVAS

SEQ ID NO: 1082 - DNA, 1170 bp, Populus balsamifera subsp. trichocarpa
  misc_feature: Ceres Annot ID no. 1541782
  misc_feature: Encodes the peptide sequence at SEQ ID NO. 1083
atggcatcatcagtggtgagggttgatcttgatggaaaaccaataaatccgctaacaatttgcatgatcggtgctggtggtttcattgggtcccacctgtgtgagaagatcttgaacgagactcaacacaagatcttagcccttgatgtttacaatgacaagatcaagcaccttctcgaaccggacagcctcccttgggctggccggatccagttccaccgtatcaatatcaaacacgactctcgcctcgaaggcctcatcaagatgtcagatctgacgataaatctggctgcgatctgtactccggcggattataatacgcgtcctttggatacgatttatagcaactttatcgacgcgttgcctgtggcgaagtactgttcagagaatgggaagcgtctgattcacttctcgacttgtgaagtgtatgggaaaactattgggagttttcttcctaaagacagtcctcttcgtcaggatcctgcatattatgtgcttaaagaagatgcctctccctgcatttttggttccattgagaagcagagatggtcttatgcgtgtgcaaagcaattgattgagaggctggtttatgctgagggtgcagagaatggacttgagttcaccatcgtgaggcctttcaactggattggacccagaatggattttattcccggtgttgatggcccaagtgagggcgttccccgggttcttgcttgctttagcaatgctcttcttcgccgggagccgctcaagcttgtggatggtggcgaatcccagagaacatttgtttatattaaggatgccatcgaggctgttctcttgatgattgaaaatccttccagggccaatggtcatatttttaacgttggcaaccctaacaatgaagtcactgtgaggcagcttgctgaaatgatgacagcggtctacgcaaatgtaagtggagaacctgctctggaggaaccgacagttgatgtcagctccaaagagttctacggtgagggatatgacgatagtgacaagagaattccagacatgaccataatcaatagacaacttggttggaaccccaagacgtctctgtgggacttgctcgattcaaccctcacttatcaacacaagacttatgccgaggcaatcaagaaggtcatgtcacaacccacaaccagctga

SEQ ID NO: 1083 - protein, 389 aa, Populus balsamifera subsp. trichocarpa
  misc_feature (20)..(290): Pfam Name: Epimerase Pfam Description: NAD dependent epimerase/dehydratase family
  misc_feature: Ceres Annot ID no. 1541782
  misc_feature: Bit score of 1116.8 for HMM based on sequences of Figure 26
  misc_feature: Functional Homolog Of SEQ ID NO. 1054
MASSVVRVDLDGKPINPLTICMIGAGGFIGSHLCEKILNETQHKILALDVYNDKIKHLLEPDSLPWAGRIQFHRINIKHDSRLEGLIKMSDLTINLAAICTPADYNTRPLDTIYSNFIDALPVAKYCSENGKRLIHFSTCEVYGKTIGSFLPKDSPLRQDPAYYVLKEDASPCIFGSIEKQRWSYACAKQLIERLVYAEGAENGLEFTIVRPFNWIGPRMDFIPGVDGPSEGVPRVLACFSNALLRREPLKLVDGGESQRTFVYIKDAIEAVLLMIENPSRANGHIFNVGNPNNEVTVRQLAEMMTAVYANVSGEPALEEPTVDVSSKEFYGEGYDDSDKRIPDMTIINRQLGWNPKTSLWDLLDSTLTYQHKTYAEAIKKVMSQPTTS

SEQ ID NO: 1084 - DNA, 1581 bp, Gossypium hirsutum
  misc_feature: Ceres Clone ID no. 1936952
  misc_feature: Encodes the peptide sequence at SEQ ID NO. 1085
gcttctattttccacatatatacagacaaagacattctctcccatttctcaccatctccaattagcttctctctcttcctttgtcacgttcggcattcaaaaataacgaaacaccggcgttgtttcaaatggcgactagaatggatctggatggaaggcctataaagccgatgacgatatgcatgattggagccggcggcttcattggttctcacctttgtgagaaactgatggcggagacgccgcacaaggtgcttgccttggatgtttacagtgacactgacaagatcaagcaccttcttgagcctgactctcttccttgggctggccgtattgtgttccaccgacttaacatcaagcacgattctaggctcgaaggccttatcaagatggcagatctcacgataaatcttgcggcgatctgtactccagcagactataatactcgtccacttgacacgatttacagcaattttattgatgcacttccggtggtaaagtactgctcagagaacaacaagcgtcttattcacttctctacttgcgaagtgtatggcaaaacaattggaagctttcttcctaaagattctcctctccggaaggatcctgcctactatgtccttaaggaagatacctccccctgcatttttggttcaatcgaaaagcaaaggtggtcatatgcatgtgctaagcaattgattgagaggcttatttatgctgagggggcagagaatggccttgatttcaccattgtgagaccttttaactggattggacctaggatggatttcatccctggtattgatggtccaagtgagagtgttccaagagttctggcatgctttagtaataatctcttacgccgtgagccactaaagcttgtggatggtggtgaatctcagagaacttttgtttacattaaggatgctattgaagctgttctcttgatgattgaaaatcccgacagggccaatggtcatattttcaatgtcggcaacccaaataatgaagtcacagtgaggcaacttgctgaaatgatgactaaggtctatgcaaaggtaagtggagaaccttcactggagtcaccaacaattgatgtcagttccaaggaattttacggggagggatatgatgatagtgacaagagaattccagacatgaccataataaatagacaacttggttggaaccccaagacaacgctttgggacttgcttgaatcgacccttacctaccaacacaggacttatgctgaggctatcaagaaatccatggtaaaacctattgcatcctaaataggtaaagatgttcagaccatgcctaaggaaggatgcatgtaaaatttacttgttcgaaaaatgttccaattcttttttttccttttaaggagtcctatatatatctgaattgttgattttacttgtatgctacattttgggtcatcccttgtgtcaatagttaatagctcacattagctcaggcagttatgttccctttgtggtcctatgtgtacattattaaatttcttactgatctgaaccgatattgtgttcgtattatatatgttttgagttttgagct

SEQ ID NO: 1085 - protein, 388 aa, Gossypium hirsutum
  misc_feature (17)..(289): Pfam Name: Epimerase Pfam Description: NAD dependent epimerase/dehydratase family
  misc_feature: Ceres Clone ID no. 1936952
  misc_feature: Bit score of 1125.2 for HMM based on sequences of Figure 26
  misc_feature: Functional Homolog Of SEQ ID NO. 1054
MATRMDLDGRPIKPMTICMIGAGGFIGSHLCEKLMAETPHKVLALDVYSDTDKIKHLLEPDSLPWAGRIVFHRLNIKHDSRLEGLIKMADLTINLAAICTPADYNTRPLDTIYSNFIDALPVVKYCSENNKRLIHFSTCEVYGKTIGSFLPKDSPLRKDPAYYVLKEDTSPCIFGSIEKQRWSYACAKQLIERLIYAEGAENGLDFTIVRPFNWIGPRMDFIPGIDGPSESVPRVLACFSNNLLRREPLKLVDGGESQRTFVYIKDAIEAVLLMIENPDRANGHIFNVGNPNNEVTVRQLAEMMTKVYAKVSGEPSLESPTIDVSSKEFYGEGYDDSDKRIPDMTIINRQLGWNPKTTLWDLLESTLTYQHRTYAEAIKKSMVKPIAS

SEQ ID NO: 1086 - DNA, 1472 bp, Brassica napus
  misc_feature: Ceres Clone ID no. 1459647
  misc_feature: Encodes the peptide sequence at SEQ ID NO. 1087
attgttaagagatcatcacgcggcttccctctctctctctctctttctttctccaccgactaaagcaatggcgaacggagccgttagattggatctggacggaaagccgatcaagccgctcacgatctgcatgatcggcgccggaggtttcatcggctctcacctctgcgagaagctcctgaccgagactccgcacaaggtcctcgcgctcgacgtctacaacgacaagatcaagcacttgctcgagcccgatacttccgagtgggccgagaggatccagtttcaccgcatcaacatcaagcacgattcgaggctcgagggactcgtgaagatggcggatctgacgattaatctcgctgcgatttgtactccggctgattacaatacgcgtccgcttgatactatctacagcaacttcatcgatgctctccctgtggttaagtactgctcagagaacaacaagcgtcttattcacttctccacctgtgaggtgtatgggaaaactataggaagctttcttcctaaggatcatcctctgcgtcaggatcctgatttttatgtactcaaagaagatacatccccttgcatttttggctccattgagaagcagaggtggtcatatgcttgtgcgaagcaactgattgagagactcgtctacgctggtgctgagaacggacttgagttcaccattgtaagaccgtttaactggattggacctaggatggacttcatccctggcattgatggtcctagcgagggtgtccctcgtgtcctggcctgctttagcaacaaccttctgcgacgtgaacctctgaagcttgtggatggtggagaatcacagagaaccttcatctacatcaaggatgctattgacgctgtcctcctgatgattgaaaacccagagagagccaatgggcgtatcttcaatgtaggtaacccaaacaatgaagtgacagtaagacaacttgctgaaatgatgactaaggtctactcaaaagtgagtggagagacagcaattgagagtccaacgatagacgtgagctccaaagaattttatggagagggttatgatgacagcgacaagagaatcccagacatgaccatcatcaaccgtcaacttggatggaacccgaagacgtctctttgggacttgcttgagtcgaccttaacttaccagcacaggacctacgctgaagccgttaagaaggccacctcaaaaccagtcgcatcttagaggtggtctatcatcacctcgaatcatttggtggctacttccttttctttcttttttttaatacacccagtattcccttaaaacaggccattctaagcgagtgatatatatcatggtcgttggttctagtttgcgcgttattgcttatatagtatatgctaatgtctttaatttcgttgttgaagcttaatatctttgtactttgtccaaaacttaaaaaaaaaagaatggtttgttc

SEQ ID NO: 1087 - protein, 388 aa, Brassica napus
  misc_feature (20)..(289): Pfam Name: Epimerase Pfam Description: NAD dependent epimerase/dehydratase family
  misc_feature: Ceres Clone ID no. 1459647
  misc_feature: Bit score of 1126.3 for HMM based on sequences of Figure 26
  misc_feature: Functional Homolog Of SEQ ID NO. 1054
MANGAVRLDLDGKPIKPLTICMIGAGGFIGSHLCEKLLTETPHKVLALDVYNDKIKHLLEPDTSEWAERIQFHRINIKHDSRLEGLVKMADLTINLAAICTPADYNTRPLDTIYSNFIDALPVVKYCSENNKRLIHFSTCEVYGKTIGSFLPKDHPLRQDPDFYVLKEDTSPCIFGSIEKQRWSYACAKQLIERLVYAGAENGLEFTIVRPFNWIGPRMDFIPGIDGPSEGVPRVLACFSNNLLRREPLKLVDGGESQRTFIYIKDAIDAVLLMIENPERANGRIFNVGNPNNEVTVRQLAEMMTKVYSKVSGETAIESPTIDVSSKEFYGEGYDDSDKRIPDMTIINRQLGWNPKTSLWDLLESTLTYQHRTYAEAVKKATSKPVAS

SEQ ID NO: 1088 - protein, 387 aa, Nicotiana benthamiana
  misc_feature (18)..(288): Pfam Name: Epimerase Pfam Description: NAD dependent epimerase/dehydratase family
  misc_feature: Public GI ID no. 37379419
  misc_feature: Bit score of 1095.3 for HMM based on sequences of Figure 26
  misc_feature: Functional Homolog Of SEQ ID NO. 1054
  misc_feature (152)..(152): Xaa is any aa, unknown, or other
  misc_feature (365)..(365): Xaa is any aa, unknown, or other
MAGGRVDLDGNVIKPMKICMIGAGGFIGSHLCEKLMNETPHTVLAVDVYSDKIKHLLEPADLPWTGRIQFHRINIKNDSRLEGLIKMADLVVNLAAICTPADYNTRPLDTIYSNFIDALPVVKYCSENGKRLIHFSTCEVYGKTIGAFLPEXSPLRQDPAYYVLKEDVSPCIFGSIEKQRWSYACAKQLIERLIYAEGAENGLEFTIVRPFNWIGPRMDFIPGIDGPSEGVPRVLACFSNNLLRHEPLKLVDGGHSQRTFIYIKDAIEAVLLMIENPARANGQIFNVGNPNNEVTVRQLAEMMTQVYSKVSGESPPETPTIDVSSKEFYGEGYDDSDKRIPDMTLINRQLGWNPKTSLWDLLESXLTYQHRTYAEAVKQAMSKTTAN

SEQ ID NO: 1089 - DNA, 1170 bp, Populus balsamifera subsp. trichocarpa
  misc_feature: Ceres Annot ID no. 1460446
  misc_feature: Encodes the peptide sequence at SEQ ID NO. 1090
atggcagcatcaacggtgaggattaatcttgatggaaaaccgataaatcagctaacaatattgatgatcggtgccggtggtttcatcgggtcccacctctgtgagaagatcttgcaggaaactccacacaagatcctagctcttgatgtttacagtgacaagatcaagcaccttctcgaaccggatagtctcgaatgggctggccggatccagtttcaccgtatcaatattaagcacgattctcgcctcgaaggcctaattaagatgtcagatctgacgataaatctggcggcgatctgtactccagcggattataatacgcgtcctttggatacgatttatagcaactttattgacgcgctgcccgtggtgaagtactgttcagagaatgggaagcgtttgattcacttctcgacttgtgaagtgtatggaaaaactattggtagttttcttcctaaagatagtcctcttcgtcaggaccctgcatactatgtcctcaaagaagatgcctctccctgcattttcggttctatcgagaagcagaggtggtcctatgcatgtgcaaagcagttgattgagaggttgatttatgctgagggtgcagagaatgggcttgagttcaccattgtgaggcccttcaactggattggacccagaatggatttcatacccggcattgatggcccaagtgagggtgttcccagggttctggcatgcttcagcaatgctcttcttcgtcgtgagcaactcaagcttgttgatggtggtgaatcccagagaacttttgtttacatcaaggatgccatagaggcggtcctcttgatgattgaaaatcctgacagggccaacggtcatatttttaatgttggcaaccctaacaatgaagtcactgttaggcagcttgctgaaatgatgacagcggtctacgcaaacgtaagtggcgaacctgcactggaggaacccacagttgatgtcagctccaaagagttctacggtgaaggatatgacgatagtgacaagagaattccagacatgaccataatcaataaacaacttggttggaaccccaagacatctgtgtgggacttgcttgattcaaccctcacttatcaacacaagacgtatgccgaggcagtcaagaaggttatctcaaaacccacaaccagctga

SEQ ID NO: 1090 - protein, 389 aa, Populus balsamifera subsp. trichocarpa
  misc_feature (20)..(290): Pfam Name: Epimerase Pfam Description: NAD dependent epimerase/dehydratase fam
  misc_feature: Ceres Annot ID no. 1460446
  misc_feature: Bit score of 1095.5 for HMM based on sequences of Figure 26
  misc_feature: Functional Homolog Of SEQ ID NO. 1054
MAASTVRINLDGKPINQLTILMIGAGGFIGSHLCEKILQETPHKILALDVYSDKIKHLLEPDSLEWAGRIQFHRINIKHDSRLEGLIKMSDLTINLAAICTPADYNTRPLDTIYSNFIDALPVVKYCSENGKRLIHFSTCEVYGKTIGSFLPKDSPLRQDPAYYVLKEDASPCIFGSIEKQRWSYACAKQLIERLIYAEGAENGLEFTIVRPFNWIGPRMDFIPGIDGPSEGVPRVLACFSNALLRREQLKLVDGGESQRTFVYIKDAIEAVLLMIENPDRANGHIFNVGNPNNEVTVRQLAEMMTAVYANVSGEPALEEPTVDVSSKEFYGEGYDDSDKRIPDMTIINKQLGWNPKTSVWDLLDSTLTYQHKTYAEAVKKVISKPTTS

SEQ ID NO: 1091 - DNA, 1284 bp, Populus balsamifera subsp. trichocarpa
  misc_feature: Ceres Annot ID no. 1488364
  misc_feature: Encodes the peptide sequence at SEQ ID NO. 1092
atggcatcatcagtggtgagggttgatcttgatggaaaaccaataaatccgctaacaatttgcatgatcggtgctggtggtttcattgggtcccacctgtgtgagaagatcttgaacgagactcaacacaagatcttagcccttgatgtttacaatgacaagatcaagcaccttctcgaaccggacagcctcccttgggctggccggatccagttccaccgtatcaatatcaaacacgactctcgcctcgaaggcctcatcaagatgtcagatctgacgataaatctggctgcgatctgtactccggcggattataatacgcgtcctttggatacgatttatagcaactttatcgacgcgttgcctgtggcgaagtactgttcagagaatgggaagcgtctgattcacttctcgacttgtgaagtgtatgggaaaactattgggagttttcttcctaaagacagtcctcttcgtcaggtagaggggtttggttctgtgtcaatgttttatattggtaatatgatcatatttagctcaatggaaggtgtcatcagtctttttttttattttgatttggctggagtgttgaaggatcctgcatattatgtgcttaaagaagatgcctctccctgcatttttggttccattgagaagcagagatggtcttatgcgtgtgcaaagcaattgattgagaggctggtttatgctgagggtgcagagaatggacttgagttcaccatcgtgaggcctttcaactggattggacccagaatggattttattcccggtgttgatggcccaagtgagggcgttccccgggttcttgcttgctttagcaatgctcttcttcgccgggagccgctcaagcttgtggatggtggcgaatcccagagaacatttgtttatattaaggatgccatcgaggctgttctcttgatgattgaaaatccttccagggccaatggtcatatttttaacgttggcaaccctaacaatgaagtcactgtgaggcagcttgctgaaatgatgacagcggtctacgcaaatgtaagtggagaacctgctctggaggaaccgacagttgatgtcagctccaaagagttctacggtgagggatatgacgatagtgacaagagaattccagacatgaccataatcaatagacaacttggttggaaccccaagacgtctctgtgggacttgctcgattcaaccctcacttatcaacacaagacttatgccgaggcaatcaagaaggtcatgtcacaacccacaaccagctga

SEQ ID NO: 1092 - protein, 427 aa, Populus balsamifera subsp. trichocarpa
  misc_feature (20)..(328): Pfam Name: Epimerase Pfam Description: NAD dependent epimerase/dehydratase family
  misc_feature: Ceres Annot ID no. 1488364
  misc_feature: Bit score of 1063.0 for HMM based on sequences of Figure 26
  misc_feature: Functional Homolog Of SEQ ID NO. 1054
MASSVVRVDLDGKPINPLTICMIGAGGFIGSHLCEKILNETQHKILALDVYNDKIKHLLEPDSLPWAGRIQFHRINIKHDSRLEGLIKMSDLTINLAAICTPADYNTRPLDTIYSNFIDALPVAKYCSENGKRLIHFSTCEVYGKTIGSFLPKDSPLRQVEGFGSVSMFYIGNMIIFSSMEGVISLFFYFDLAGVLKDPAYYVLKEDASPCIFGSIEKQRWSYACAKQLIERLVYAEGAENGLEFTIVRPFNWIGPRMDFIPGVDGPSEGVPRVLACFSNALLRREPLKLVDGGESQRTFVYIKDAIEAVLLMIENPSRANGHIFNVGNPNNEVTVRQLAEMMTAVYANVSGEPALEEPTVDVSSKEFYGEGYDDSDKRIPDMTIINRQLGWNPKTSLWDLLDSTLTYQHKTYAEAIKKVMSQPTTS

SEQ ID NO: 1093 - protein, 407 aa, Ipomoea trifida
  misc_feature (17)..(287): Pfam Name: Epimerase Pfam Description: NAD dependent epimerase/dehydratase family
  misc_feature: Public GI ID no. 45935133
  misc_feature: Bit score of 1021.7 for HMM based on sequences of Figure 26
  misc_feature: Functional Homolog Of SEQ ID NO. 1054
MAGRVDLDGNPIKPITICMIGAGGFIGSHLCEKLMSETQHKVLAVDVYNDKIKHLLEPASLPWADRIQFHRLNIKNDSRLEGLIKMADLTVNLAAICTPADYNTRPLDTIYSNFIDALPVVKYCSENGKRLIHFSTCEVYGKTIGCFLPKDSPLRQDPAYYVLKEDASPCIFGPIEKQRWSYACAKQLIERLVYAEGAENGLEFTIVRPFNWIGPRMDFIPGIDGPSEGVPRVLACFSNNLLRREPLKLVDGGQSQRTFVYIKDAIEAVVLMIENPARANGHIFNVGNPNNEVTVRQLAEMMTQVYSKVSGEVSLETPTIDVSSKEFYGEGYDDSDKRIPDMTIINRQLAGLCDDQAGIQRLPYGTYLNPHSHTNTEHMPKLSSRQYQNQLQAEGKYQSQTALSDSF

SEQ ID NO: 1094 - DNA, 1688 bp, Panicum virgatum
  misc_feature: Ceres Clone ID no. 1874074
  misc_feature: Encodes the peptide sequence at SEQ ID NO. 1095
aaggcgtagcgaggccaccgccaccgacatcgcctggtaacccgtcgtccccgaatccacccacccacattccccgaaccccacgccgcattctccccgatccaaccgcgccgccgcaccaggaggggaaggaagaagaaaggagacggaccatgtcgtcgccgcccgcccgcatggatctggacggcaaccccgtcgcgcccctcaccatctgcatgatcggcgcaggtggcttcatcggctcccacctctgcgagaagctcatggccgagaccgcacacgtcgtcctcgccgtcgacgtctactgcgacaagatccgccacctcgtcgaccccgcgccgccgcacctcgctggacgaatctccttccaccgcctcaacatcaagaacgactccaggctcgaggggctcatcaagatggccgatctggttgcttgcttgcccgccccgatctgatgctgctgctgctgctgcttcttcttcttcttctagattgattttttgttgtcgttgttgatttcgctcctctgctgagctgactgttctgctgctctttggatggatctcatcaagacgataaacctggcggccatctgcacgcccgccgactacaacacgcggcccctcgacaccatctacagcaacttcatcgacgccctcccagtggtcaagtactgctccgagaacaacaagcgtctcatccacttctccacgtgcgaggtctacggcaagaccatcggcagcttcctccccaaagaccaccctctccgcaaggaacctgaattttatgttctaaaagaagatgagtcgccctgcatttttggtccaatcgtgaaacagcgatggtcctatgcatgtgcaaagcaacttattgagaggcttatttttgctgaaggcgcggaaaatggacttgagttcacaattgtgagacctttcaattggattggaccaaggatggacttcattcctggtgttgatggccctagtgagggtgtacctcgggttttggcctgcttcagtaacaatctgctccgccgagagcccttgaagcttgttgatgggggccagtcccaaagaacttttgtctacattaaggatgccatcgaagctgttgttttgatgattgaaaatcctgctcgagctaatggtcacatcttcaatgttgggaatcctaacaatgaagttactgttagggagttggcccaaatgatgacagaggtctatgcaaacgtctcaggagaggcaccactagatgaacccatgattgacgtgagttcgagtcagttctacggtgaaggatatgatgatagtgacaagagaatccctgacatgactataatcaacaagcagctaggttggaatccaaagacgcctctcaaggatttgctggagacaacattgacatatcagcacaagacatacaaggaagctatcaaaaggcaaatgtcacaggcttcagcgtcgagttagatagggaaaggtggcggcgggctctcatttagagcgcagtcacaggtgctatggtgttttggaagtcaggatacatatatgctagtaatcgtttttgatgctctagtcgctccctagatgacatcttgttatcagggaagggatgctatccgattccgtgctgctatcaagggaagggatgttatccgtatggcagagttgatgtattctatccattgt

SEQ ID NO: 1095 - protein, 303 aa, Panicum virgatum
  misc_feature (1)..(203): Pfam Name: Epimerase Pfam Description: NAD dependent epimerase/dehydratase family
  misc_feature: Ceres Clone ID no. 1874074
  misc_feature: Bit score of 785.8 for HMM based on sequences of Figure 26
  misc_feature: Functional Homolog Of SEQ ID NO. 1054
MDLIKTINLAAICTPADYNTRPLDTIYSNFIDALPVVKYCSENNKRLIHFSTCEVYGKTIGSFLPKDHPLRKEPEFYVLKEDESPCIFGPIVKQRWSYACAKQLIERLIFAEGAENGLEFTIVRPFNWIGPRMDFIPGVDGPSEGVPRVLACFSNNLLRREPLKLVDGGQSQRTFVYIKDAIEAVVLMIENPARANGHIFNVGNPNNEVTVRELAQMMTEVYANVSGEAPLDEPMIDVSSSQFYGEGYDDSDKRIPDMTIINKQLGWNPKTPLKDLLETTLTYQHKTYKEAIKRQMSQASASS

SEQ ID NO: 1096 - protein, 382 aa, Vitis vinifera
  misc_feature (16)..(285): Pfam Name: Epimerase Pfam Description: NAD dependent epimerase/dehydratase family
  misc_feature: Public GI ID no. 225464984
  misc_feature: Bit score of 940.4 for HMM based on sequences of Figure 26
  misc_feature: Functional Homolog Of SEQ ID NO. 1054
MARLDLDGKEIAPLTICLIGGAGFIGSHLCELLMTHTHHSAIVIDVSSDKITRLLEKSCSWSNRIEFHKINIKNDSRLETLIKSSDLTINLAAICTPADYNTRPLDTIYSNFLDAIPVVKYCTESNKRLIHFSTCEVYGKTIGSFLPADHSLRQDPDFYILKEDVSPCIFGPVEKQRWSYACAKQMIERLIYAEGAEHGLKFTIVRPFNWIGPRMDFIPGIDGPTEGVPRVLACFSNNLLRGEPLKLVDGGKSQRTFCYIKDAIEAVLLMIENPERANGQIFNVGNPNNEVTMRQLAQLMIEVYGKISVGSSDLTTVDVSSKDFYGVGYDDSDKRIPDMTIINRQLGWNPKTPLQDLLEVTLTYQHQTYSQSIKKALSNPTY

SEQ ID NO: 1097 - protein, 382 aa, Vitis vinifera
  misc_feature (16)..(285): Pfam Name: Epimerase Pfam Description: NAD dependent epimerase/dehydratase family
  misc_feature: Public GI ID no. 147771536
  misc_feature: Bit score of 940.9 for HMM based on sequences of Figure 26
  misc_feature: Functional Homolog Of SEQ ID NO. 1054
MARLDLDGKEIAPLTICLIGGAGFIGSHLCELLMTHTHHSAIVIDVSSDKITRLLEKSCSWSNRIEFHKINIKNDSRLETLIKSSDLTINLAAICTPADYNTRPLDTIYSNFLDAIPVVKYCTESNKRLIHFSTCEVYGKTIGSFLPADHSLRQDPDFYILKEDVSPCIFGPVEKQRWSYACAKQMIERLIYAEGAEHGLKFTIVRPFNWIGPRMDFIPGIDGPTEGVPRVLACFSNNLLRGEPLKLVDGGKSQRTFCYIKDAIEAVLLMIENPERANGQIFNVGNPNNEVTMRQLAELMIEVYGKISVGSSDLTTVDVSSKDFYGVGYDDSDKRIPDMTIINRQLGWNPKTPLQDLLEVTLTYQHQTYSQSIKKALSNPTY

SEQ ID NO: 1098 - DNA, 1574 bp, Arabidopsis thaliana
  misc_feature: Ceres Clone ID no. 6892
  misc_feature: Encodes the peptide sequence at SEQ ID NO. 1099
ttttctttcttttctcccattctcacaaatctctcttccacccattgttatctctgtagaagcgtgagagagatcacgcgtattcaccgacacaatcaaaatatggcgaacggagccgatagattggatctggacggtaaaccgattaagccgatgacgatatgcatgatcggtgccggaggtttcattggctctcatctctgtgagaagcttatgacggagactcctcacaaggttcttgcgcttgatgtttacaatgataagatcaagcacttgcttgagcctgataccgttcaatgggctggtcggatccagtttcatcgtatcaacattaagcatgattctagactcgaaggactgatcaagatggcagatctgacgataaatctagctgcgatctgtactcccgcagattacaatacgcgtcctcttgacactatctacagcaatttcattgatgctctcccagtggttaagtactgctcagagaacaacaagcgtctgattcacttttccacttgtgaagtgtatggaaaaactataggaagctttcttccaaaggatcatcctctgcgtcaagatcctgaattttatgtactcaaagaagatatatccccttgcatctttggttcaattgagaagcagaggtggtcatatgcttgtgcaaagcaacttatagagagacttgtttacgctgagggtgctgagaatggactcgagttcaccattgttagaccattcaactggattggacctaggatggatttcatccctggcattgatggtcccagcgagggtgtcccacgggttctagcgtgctttagtaacaaccttctgcgacgggagcctctcaagcttgtggatggtggagaatcacagagaaccttcatctacatcaaagatgctatcgaagctgtccttttgatgatcgaaaatccagagagagccaatgggcatatcttcaatgtaggcaacccaaacaatgaagtgacagtgagacaacttgctgaaatgatgactgaggtctacgccaaagtgagtggagagacagctatcgatagtccaaacgatcgacgtgagctccaaagagttttatggagaaggttatgatgacagcgacaagagaatcccagacatgaccatcatcaaccgtcaacttggatggaacccgaagacgtcgctttgggacttgcttgaatctaccttaacataccagcacacgacttatgcggaagccattaagaaggccacttcaaaaccagtcgcatcttagaggtcgtctctctttacaaacacctcaaatcatgtggtggctacgattccattctttctttttaaaaaaaaaattctcccaacagaaaccttctcttcccttattttaggccattctaaacaaatatatcatggtggttgattctagtttacgttttccttgttatatagtattactattaatgtttttgaaattcctttgttttgaagctttatatcttgtatttgtccgaaactaaaaagggaatggtttgtgcaaactataacattggggctttctttatatgttacatatctttggc

SEQ ID NO: 1099 - protein, 335 aa, Arabidopsis thaliana
  misc_feature (20)..(290): Pfam Name: Epimerase Pfam Description: NAD dependent epimerase/dehydratase family
  misc_feature: Ceres Clone ID no. 6892
  misc_feature: Bit score of 878.6 for HMM based on sequences of Figure 26
  misc_feature: Functional Homolog Of SEQ ID NO. 1054
MANGADRLDLDGKPIKPMTICMIGAGGFIGSHLCEKLMTETPHKVLALDVYNDKIKHLLEPDTVQWAGRIQFHRINIKHDSRLEGLIKMADLTINLAAICTPADYNTRPLDTIYSNFIDALPVVKYCSENNKRLIHFSTCEVYGKTIGSFLPKDHPLRQDPEFYVLKEDISPCIFGSIEKQRWSYACAKQLIERLVYAEGAENGLEFTIVRPFNWIGPRMDFIPGIDGPSEGVPRVLACFSNNLLRREPLKLVDGGESQRTFIYIKDAIEAVLLMIENPERANGHIFNVGNPNNEVTVRQLAEMMTEVYAKVSGETAIDSPNDRRELQRVLWRRL

SEQ ID NO: 1100 - DNA, 1063 bp, Glycine max
  misc_feature: Ceres Clone ID no. 1047104
  misc_feature: Encodes the peptide sequence at SEQ ID NO. 1101
aatcacatctccgtcttctatatattatcagtcgctgagtcccgttaaaaagcaccaccaccaccaccaccacaacactattcttcttcgcagcaatggcgcgagtggatctggacgggaaccccatgaaggcacttacgatctgcatgatcggcgctggcggcttcataggctcgcatctctgcgagaagctcatgtccgaaacccctcacaccgtcctcgccctcgacgtctacaacgacaagatcaaacacctcctcgaaccctccgattccccctgggccggccgcatcaccttccaccgcctcaacatcaaacacgactctcgcctcgaaggcctcatcaagatggcagatctcactattaatctggctgccatttgcactcccgcggattacaacacccgccctctcgacaccatttacagcaatttcatcgacgcgctccccgtggtgaaatactgttccgagaacaacaagcgccttatccatttctctacttgcgaagtgtacggaaagacgattggagcctttctccctaaagatagtcctcttcgtaaggatccggcatactatgttcttaaagaagacgagtctccttgcatttttggttctattgaaaaacagaggtggtcttatgcctgtgcgaaacagttgattgagaggctgatttatgctgagggtgctgaaaatggcttggagttcacaattgtgaggccttttaactggattggacctcgaatggatttcattcctggcattgatggtccaagtgagggtgttcctcgggttcttgcatgctttagcaataatcttctcagaggagagcccctcaagcttgtggacggtggccagtcccagagaacctttgtttacattaaagatgctattgaagctgtcttgctgatgattgaaaaccctgccagggccaatggccacatatttaatgtgggtaacccaaacaatgaggttactgttaggcagcttgctgaaataatgattaaggtttattcaaaggtaagtggcgaacaaactcctgaaacacctaccgttgatgtgagctc

SEQ ID NO: 1101 - protein, 322 aa, Glycine max
  misc_feature (16)..(286): Pfam Name: Epimerase Pfam Description: NAD dependent epimerase/dehydratase family
  misc_feature: Ceres Clone ID no. 1047104
  misc_feature: Bit score of 831.4 for HMM based on sequences of Figure 26
  misc_feature: Functional Homolog Of SEQ ID NO. 1054
MARVDLDGNPMKALTICMIGAGGFIGSHLCEKLMSETPHTVLALDVYNDKIKHLLEPSDSPWAGRITFHRLNIKHDSRLEGLIKMADLTINLAAICTPADYNTRPLDTIYSNFIDALPVVKYCSENNKRLIHFSTCEVYGKTIGAFLPKDSPLRKDPAYYVLKEDESPCIFGSIEKQRWSYACAKQLIERLIYAEGAENGLEFTIVRPFNWIGPRMDFIPGIDGPSEGVPRVLACFSNNLLRGEPLKLVDGGQSQRTFVYIKDAIEAVLLMIENPARANGHIFNVGNPNNEVTVRQLAEIMIKVYSKVSGEQTPETPTVDVS

SEQ ID NO: 1102 - protein, 385 aa, Physcomitrella patens subsp. patens
  misc_feature (17)..(286): Pfam Name: Epimerase Pfam Description: NAD dependent epimerase/dehydratase family
  misc_feature: Public GI ID no. 168063797
  misc_feature: Bit score of 887.7 for HMM based on sequences of Figure 26
  misc_feature: Functional Homolog Of SEQ ID NO. 1054
MTARLNLDGQEIKPLRICMIGAGGFIGSHLCEKLMETTKHSVLAIDVCGVKIQHLLALGQPWSDRIEFYKINIKSDTRLEGLIKVSDLVINLAAICTPADYNTRPLDTIYSNFVDALPVVQQCRDNGKRLIHFSTCEIYGKTIGSFLPRDHPLKADPAFSVLKEDETACIYGSIHKQRWSYACAKQLIERLIFGEGAENGMKFTIVRPFNWIGPRMDFIPGIDGPSDSIPRVLACFSNSLMKGEPLKLVDGGKSQRTFIYIKDAIEAVQKIIENPARANGHIFNVGNPHNEVTIQELAELMTDLYCKISGTARPEVVTVDVPSKEFYGVGYDDSDKRIPEMTQVRKQLEWEPKTSMYDLMEHTLKYQYSTYAEAVKKAMSKSTYK

SEQ ID NO: 1103 - DNA, 760 bp, Gossypium hirsutum
  misc_feature: Ceres Clone ID no. 100063067
  misc_feature: Encodes the peptide sequence at SEQ ID NO. 1104
agcggcgtcggaagacaggaaaacaccggtgttgtttgaaatggcagcttcgagaatggatctggacgggagaccaataaagccaattacgatatgcatgattggagcgggaggcttcattggctctcacctctgcgagaaattaatgtcggaaacgccgcacaaggtgctcgccttggacgtttacaatgacaagattaagcacctcctcgagcctgactctctcccttgggctggccgtatccagttccaccgacttaacatcaagcacgattctaggcttgaaggcctcatcaagatggcagatctcacgataaatcttgcggcgatctgtactccggcagattataatacacgcccgctcgatacgatttacagcaattttattgatgcacttcctgtggtgaaatactgttcagagaacaacaagcgtctcattcatttctcgacttgtgaagtgtatggtaaaaccatccaaagctttctgcctaaagattctcctctccgtcaggatcctgcctactatgttcttaaggaagatgtctcgccctgcatttttggctctattgagaagcagaggtggtcgtatgcatgtgcgaagcagttgattgagaggctcatttatgctgagggagcagagaatggcctcgagttcaccattgtgaggccatttaactggattggaccaaggatggacttcattcccggcattgatggtccaagtgagggagttccaagagttctagcgtgctttagtaat

SEQ ID NO: 1104 - protein, 240 aa, Gossypium hirsutum
  misc_feature (18)..(237): Pfam Name: Epimerase Pfam Description: NAD dependent epimerase/dehydratase family
  misc_feature: Ceres Clone ID no. 100063067
  misc_feature: Bit score of 506.3 for HMM based on sequences of Figure 26
  misc_feature: Functional Homolog Of SEQ ID NO. 1054
MAASRMDLDGRPIKPITICMIGAGGFIGSHLCEKLMSETPHKVLALDVYNDKIKHLLEPDSLPWAGRIQFHRLNIKHDSRLEGLIKMADLTINLAAICTPADYNTRPLDTIYSNFIDALPVVKYCSENNKRLIHFSTCEVYGKTIQSFLPKDSPLRQDPAYYVLKEDVSPCIFGSIEKQRWSYACAKQLIERLIYAEGAENGLEFTIVRPFNWIGPRMDFIPGIDGPSEGVPRVLACFSN

SEQ ID NO: 1105 - protein, 293 aa, Vitis pseudoreticulata
  misc_feature (19)..(269): Pfam Name: Epimerase Pfam Description: NAD dependent epimerase/dehydratase family
  misc_feature: Public GI ID no. 85376636
  misc_feature: Bit score of 546.5 for HMM based on sequences of Figure 26
  misc_feature: Functional Homolog Of SEQ ID NO. 1054
MASAARLDLDGNAIKPMTICMIGAGGFIGSHLCEKLMAETMHKVLAVDVCSDKIKHLLEPATHPWSDRIQFHRINIKHDSRLEGLIKMADLTINLAAICTPADYNTRPLDTIYSNFIDALPVVKYCSENNKRLIHFSTCEVYGKTIGCFLPKDSPLWQDPTYYALKEDASPCIFGPIEKQRWSYACAKQLIERLIYAEGAENDLEFTIVRPFNWIGPRMDFIPGIDGPSEGVPRVLACFSITFFVMSHSSLWMVAIPEDLCLHKRMLLSSLDDDDIFKGYGHIFMWATHMSYC

SEQ ID NO: 1106 - DNA, 2345 bp, Panicum virgatum
  misc_feature: Ceres Clone ID no. 1781320
  misc_feature: Encodes the peptide sequence at SEQ ID NO. 1107
cttccgtttttattctaagcttggcgctcgcctcgcgcagccagcgagcgggcctagcctacgaggagctgcacgagaagaaaagggagaggaaaccagagcgagttcttctcggctcgggcatcgccattggctggggctagtcgctcgctccgggcttttgcgtcctcacgctagctagctactggaggaagacgcgtaagcaccgagcttcttgggagagaataaaccagctgcacggcagcatgaagggcggcggcgcgggcgacaaggccgggaggggcggcggcaagctgcagcagccgctgcgcctggagtcgcagcggttcaggctgctgtccatcgtcgtcggctgcttcgtcatctgcctcgtcttcctcctctcctcccgccccgacgccaccgccttcgacaccgtgagccccagggcgtcgctggagggcgcgcgccggcggccggccgccgtcaagaccctccaaacctcctccaccgccggcgtcggtggggatgtccatgtggacatccggccgcagcagcagcagggggggagcctgcgtcagagcgtcgagcagagcgccggcgacaagacggccacagaatgggtcagagacacggtgatcgtggaggagaggagcgacgccgaggccagcgaagctgcggcggagccggaggaggccgagcgcaacgtcgacggcaatgccgctgccgcggcgtccaaccccgacgaccagccagcaccaggcgccgagacggaggaggtccgagacgccgccgcgacagccaccgcacaacccgccgcggagaccacggcgaccgcgcccgaccggccagaggggaagccgcgagctgccggcggcggtcagagcaagctccaggagcagccagctcggcagccgcaagaggagcgccacgagccagcacgtaggggcaacgggacggcgaaagcaacgcccgaccaaaccttgtcaactggatccaacggcggggaccaccagcagccgctgtgcgacttctccgacttccgcagcgacatctgcgacatggccggcgacatccgcatggacgccaacgcgtcggcgttcgtggtcgtcgacccggcggcgagcggggccgacggcggccagtggcaccgggtccggccgtacccgcgcaagggcgacgagacgtgcatgggccggatcacggaggtcacggtgcggtcggcgggcggcgccgcgccgcggtgcacgcgggagcacgccgcgccggcggtggtgttctccatcggcgggtacacgggcaacatcttccacgacttctctgacgtgctggtgccgctgtacaacacggcgcggcggtacggcggcgacgtgcagctggtgatggcggacgtgtcgtcgtggtggctggtcaagtacgacaagctcctgcgcgcgctgtcgcggcacgcgccgcaggacctcgccagggccggcgccgccggggaggtccactgcttccggcgggccgtggtgagcctgcgcgcgcacaaggagctcatcatcgagcgggcgcgcagcgcggacggactcgcgacgccggacttcacgcggttcgtccggcgcgcgctgtcgctgccccgcgacgcgccgacgcgtctcggcgacggcacgggccggaagccccggctcctggtcatctcccgccaccacacgcggctgctcctgaacctcgacgccgtggtccgcgcggcggaggaggtcgggttcgaggccgtggtgaacgagtccgacgtgggcaacgacatcgcgcaggtcggggcgctcgtcaactcgtgcgacgcgctggtgggcgtgcacggcgccgggctcaccaacatgatgttcctgccgccgggggcgaccctggtgcagatcgtgccgtggggagggctgcagtggatggcgcgggcggactacggcgacccggcggaggcgatggggctccggtacatccagtacgaggtggccgtcggcgagagcacgctcaaggacaagttccccccggggcacaagatcttcaccgacccgacgtcgctgcacaagaagggcttcatgttcatcaggcagacgctcatggacggccaggacatcgccgtcgacgtcggccgcttcagggaggtgctgctccaggtgctcaacaacctctcgcagtagacggctctgcctgcgtatgcccgatcgagtacacacagctgcatagtacaagtatatacagtacaccggtgctatgtatacgtatattcatttagttggagctttgtatcattatacggataacggatgtacactttggcataatctttttcccctgaaagattacaatgaaacctctgcggttagtggtcc

SEQ ID NO: 1107 - protein, 635 aa, Panicum virgatum
  misc_feature (252)..(501): Pfam Name: DUF563 Pfam Description: Protein of unknown function (DUF563)
  misc_feature: Ceres Clone ID no. 1781320
  misc_feature: Bit score of 1481.7 for HMM based on sequences of Figure 24
  misc_feature: Functional Homolog Of SEQ ID NO. 1107
  misc_feature: in Figure 24
MKGGGAGDKAGRGGGKLQQPLRLESQRFRLLSIVVGCFVICLVFLLSSRPDATAFDTVSPRASLEGARRRPAAVKTLQTSSTAGVGGDVHVDIRPQQQQGGSLRQSVEQSAGDKTATEWVRDTVIVEERSDAEASEAAAEPEEAERNVDGNAAAAASNPDDQPAPGAETEEVRDAAATATAQPAAETTATAPDRPEGKPRAAGGGQSKLQEQPARQPQEERHEPARRGNGTAKATPDQTLSTGSNGGDHQQPLCDFSDFRSDICDMAGDIRMDANASAFVVVDPAASGADGGQWHRVRPYPRKGDETCMGRITEVTVRSAGGAAPRCTREHAAPAVVFSIGGYTGNIFHDFSDVLVPLYNTARRYGGDVQLVMADVSSWWLVKYDKLLRALSRHAPQDLARAGAAGEVHCFRRAVVSLRAHKELIIERARSADGLATPDFTRFVRRALSLPRDAPTRLGDGTGRKPRLLVISRHHTRLLLNLDAVVRAAEEVGFEAVVNESDVGNDIAQVGALVNSCDALVGVHGAGLTNMMFLPPGATLVQIVPWGGLQWMARADYGDPAEAMGLRYIQYEVAVGESTLKDKFPPGHKIFTDPTSLHKKGFMFIRQTLMDGQDIAVDVGRFREVLLQVLNNLSQ

SEQ ID NO: 1108 - protein, 572 aa, Sorghum bicolor
  misc_feature (195)..(438): Pfam Name: DUF563 Pfam Description: Protein of unknown function (DUF563)
  misc_feature: Public GI ID no. 56409848
  misc_feature: Bit score of 1385.5 for HMM based on sequences of Figure 24
  misc_feature: Functional Homolog Of SEQ ID NO. 1107
MKSGERPKLVRGLRQESRRFRLLVIVVGFFLVSLTFVVISKPDAILFSLNGKLPVDQAPTSILIQQKVNSPPATTAKTSTDALRGDPRVVDDEADPRPQGFKGEEEESRVLSEPDPTSGMTELTPNKDGSGRKSDEDKLGGGGDGEGKRREERGHEADKHKVTLPTVSNYTIHDTEDTETAKKDDTSYDQQGSKPLCDFSNFRANVCEMRGDVRVHPNATEIMFMEPGHSQRDELWKIKPYPRKGDEFCLSHITELTVKSSKVAPECTKYHDMPAVIFSLTGYTGNLFHDFTDVMVPLFTTASEFNGEVQFLITDMALWWTIKYHTVLQKLSKYPVIDFSKDDQVHCFKHVIVGLHAYMEFTIDSSKAPHNYSMVDFNRFMRGAYSLGRDTVTVLGEYPKVKPRLLIIKRHRTRMFLNLDEIVVMAEELGFEVVIDEANVSSDISKFARLVNTVDVMMGVHGAGLTNCVFLPQNATLIQIVPWGGLEWVSRTDFGNPAELMGLHYKQYSIGVDESSLTEQYPRDHEIFKNPIAFHKNGFDFIRQTFMDKQNVKLDCKRFRPILLEALDNLNP

SEQ ID NO: 1109 - DNA, 1881 bp, Sorghum bicolor
  misc_feature: Ceres Annot ID no. 8659084
  misc_feature: Encodes the peptide sequence at SEQ ID NO. 1110
atgaagggcggcggcgccggcgacaaggccgggaggggcggcgtcggcgtcggcggcggcaggataccgcagccgctgcgcctcgactcgcagcggttcaggctgctgtccatcgtcgtcggctgctccgtcatctgcctcgtcttcctcctctcctcccgccccgacgccaccgccttcgacaccatgagccccaaggcgtcgctggtggccgcgcgccgcccggtggccgtcaagaccctgcggacctcctccgccgccgccgccgccagaggcttcggtggcgatttccatgtcgacgtccggccgcagcatcatgacgagcagaccgccggcgacaagacgatcacagaatgggtcagagacacggtgatcgtggaggagagcagcgaggcagagccggaggagacggagcccggccgtgacgccagtgccactgccgcggcgtcgtccaactccgacgaccaccctgccgcaccaggtaccgagaaggcggtccacgacgccgccgcgatcaccgtgcagccggccgcgggaacgacgacgtcgactgcgccggacaacaggccagaggagaagacgggagttgcaactggtactggtggtggtggtcagagcaaggtccagcagcagccagctcggcaacggcaagacgaggagccagcacgacaatctggcggggaccaccaccaccagcagccgctgtgcgacttctccgacttccgcagcgacatctgcgacatcgccggcgatgtccggttggacgctaacgtgtcgtcgttcgtcgtcgtcgtcgacccggcgtcggcgagcggccagcaggaggaggaggagcacaaggtccggccgtaccctcggaagggcgacgagacgtgcatggggcggatcacggagatcacggtgcgcgcgacgcgcggcgcagcgggcgcgccgcggtgcacgcggacgcacgcggcgcccgcggtggtgttctccatcggcggctacacgggcaacatcttccacgacttctccgacgtgctggtgccgctctacaacacggtgcggcggtacggcggcgacgtgcagctggtgatggccaactccgcgtcgtggtggctggtcaagtacgaccggctcctccgcgagctgtcgcgccacgcgccgctggacctcgccggcgccggcgcggcgcgggaggtgcactgcttccgccacgccgtcgtgagcctgcgcgcgcacaaggagctcatcatcgagcgggaccgcagcctggacgggctcgccacgccggacttcacgcggttcctccgccgcgcgctcgggctgccccgggacgcgcccacgcgcctcgtcgtcggcggcggcgacgggacggggaggaagaagccccggctgctgatcatctcgcgccaccgcacccggctgctcctgaacctcgacgccgtggtgcgggcggcggaggaggtcgggttcgaggcgatcgtgaacgagtcggacgtggccaacgacatcgcgcaggtcggcgggctcatcaactcgtgcgacgccatggtgggcgtgcacggagcggggctcaccaacatgatgttcctgccgccgggggcggcgctggtgcagatcgtgccgtggggcgggctgcagtggatggcgagggcggactacggcgacccggcggaggcgatggggctcaagtacatccagtacgagatcggcgtcgacgagagcacgctcaaggacaagttccccagcgggcacaagatcttcaccaacccgacggagctgcacaagaaggggttcatgttcatcaggcagacgctcatggacggccaggacatcaccgttgacgtcgcccgcttcagggaggtgctgctccaggtgctcaacaacctcgcgcagtag

SEQ ID NO: 1110 - protein, 626 aa, Sorghum bicolor
  misc_feature (234)..(492): Pfam Name: DUF563 Pfam Description: Protein of unknown function (DUF563)
  misc_feature: Ceres Annot ID no. 8659084
  misc_feature: Bit score of 1465.7 for HMM based on sequences of Figure 24
  misc_feature: Functional Homolog Of SEQ ID NO. 1107
  misc_feature: in Figure 24
MKGGGAGDKAGRGGVGVGGGRIPQPLRLDSQRFRLLSIVVGCSVICLVFLLSSRPDATAFDTMSPKASLVAARRPVAVKTLRTSSAAAAARGFGGDFHVDVRPQHHDEQTAGDKTITEWVRDTVIVEESSEAEPEETEPGRDASATAAASSNSDDHPAAPGTEKAVHDAAAITVQPAAGTTTSTAPDNRPEEKTGVATGTGGGGQSKVQQQPARQRQDEEPARQSGGDHHHQQPLCDFSDFRSDICDIAGDVRLDANVSSFVVVVDPASASGQQEEEEHKVRPYPRKGDETCMGRITEITVRATRGAAGAPRCTRTHAAPAVVFSIGGYTGNIFHDFSDVLVPLYNTVRRYGGDVQLVMANSASWWLVKYDRLLRELSRHAPLDLAGAGAAREVHCFRHAVVSLRAHKELIIERDRSLDGLATPDFTRFLRRALGLPRDAPTRLVVGGGDGTGRKKPRLLIISRHRTRLLLNLDAVVRAAEEVGFEAIVNESDVANDIAQVGGLINSCDAMVGVHGAGLTNMMFLPPGAALVQIVPWGGLQWMARADYGDPAEAMGLKYIQYEIGVDESTLKDKFPSGHKIFTNPTELHKKGFMFIRQTLMDGQDITVDVARFREVLLQVLNNLAQ

SEQ ID NO: 1111 - protein, 637 aa, Hordeum vulgare subsp. vulgare
  misc_feature (263)..(509): Pfam Name: DUF563 Pfam Description: Protein of unknown function (DUF563)
  misc_feature: Public GI ID no. 31339690
  misc_feature: Bit score of 1332.8 for HMM based on sequences of Figure 24
  misc_feature: Functional Homolog Of SEQ ID NO. 1107
  misc_feature: in Figure 24
MKQQGYGGVRFESQRFRLLSIVVGCFLISVTFLLSTRPDSIVFDTPPARTAIKTVKPSSSFSSPRGLGRDFLVDIAPKQGDAHGRQPQLSAGEKTETEWVKDTVIIQESSAVAAERAEQEEADKATAPTPARRGRYPRYYVHSCAGRTGNVPHDANKSWGARDVDVLTELAGATEEVVRDHAAAITARPAVDTTPTPATTTRHDQDQPLPVEEETRKAGGGKIKLQAEPAATEPQQLPTPGRLETSEPERRASRDQPPQLLPPLCDFSDRRSDVCDFTGDIRMDANASTFFLVVDAATAASHKVRPYPRKGDPTCMGRVPEITMRTTSSSSPPECTRTHGVPAVTFSIGGYTGNIFHDFSDVLVPLYNTVHRYRGDVQLVMANVAPWWLVKYDKLLRELSRHAPLDLAAVAAKGETHCFRHAVVSLRAHRELIIERDRSPDGLATPDFTRFIRRALSLPRDAPTRLADGTGRKPRLLIIARHRTRILLNLGDMMRVAEEAGFEAAVSELDVGDPISRVGAEINSADVLVGVHGAGLTNMMSLAPGATMVQVVPWGGLQWFARMDYGDPAEALGLRYVQYEIGVDESSLKDKYPRGHKIFTDPTSLHKKGFGFMRRTLMDGQNITIDLGRFRACSSRR

SEQ ID NO: 1112 - protein, 522 aa, Oryza sativa subsp. japonica
  misc_feature (139)..(387): Pfam Name: DUF563 Pfam Description: Protein of unknown function (DUF563)
  misc_feature: Public GI ID no. 115434204
  misc_feature: Bit score of 1213.4 for HMM based on sequences of Figure 24
  misc_feature: Functional Homolog Of SEQ ID NO. 1107
  misc_feature: in Figure 24
MKPGGSSGRLHALRFESQRFRLLTIVVGCFLISLTFLLSSRPDATVFSTRVKDTVIIQEVAGERSEEAEEAAERVAADSGDEAAPAVEEKNQQQLPVKLQDAGEPARTPEQTFNFEFWAPTNVADNVRAMNADSVDRRPLCDFSDFRTDICDFSGDVRMAANTSEFVVVVDPAAAAVSHKVRPYPRKGDATCMGRVTEITVRATGDAAGAPRCTRAHDVPAVAFSIGGYTGNIFHDFSDVIVPLYNTVQRYRGGVQLVMVNVASWWLVKYDKLLRELSRHAPIDLAKAGAAGEVHCFPSAVVSLRAHRELIIERERSLDGLATPDFTRFLRRALSLPRDAPTRLGDGTGRRPRLLVISRGRTRLLLNLDAVVRAAEEVGFEVVVNESDVGNSIEQVGKLINSCDALLGVHGAGLTNMMFLPPGATMVQVVPWGGLQWIARMDYGEPAAAMGLNYIQYEIAVAESSLKDKYPAGDEIFTNPTGLHKRGFAFMKQTLMDGQDITIDVTRFRPVLQQALDNLATK

SEQ ID NO: 1113 - protein, 573 aa, Saccharum officinarum
  misc_feature (196)..(439): Pfam Name: DUF563 Pfam Description: Protein of unknown function (DUF563)
  misc_feature: Public GI ID no. 56409850
  misc_feature: Bit score of 1411.4 for HMM based on sequences of Figure 24
  misc_feature: Functional Homolog Of SEQ ID NO. 1107
  misc_feature: in Figure 24
MKSGERPKLVRGLRQESRRFRLLVIVVGFFLVSLTFVVISKPDAILFSLNGKLPVDQAPTSILIQQKVNSPPATTLRTSTDALPGGDPRVVDDEADPRPQGFKGEEEESRVLSEPDPTSGMTELTPNKDGSGRKSDGEKLGGGGDGEGKRNEEPGHAADKHKVTLPTVSNYTIHDTEDTENAKRDDTSYDQQGSKPLCDFSNFRANVCEMRGDVRVHPNATSIMFMEPGHSQRDELWKIKPYPRKGDEFCLSHITELTVKSSKVAPECTKYHDVPAVIFSLTGYTGNLFHDFTDVMVPLFTTASEFNGEVQFLITDMALWWTIKYHTVLQKLSKYPVIDFSKDDQVHCFKHVIVGLHAYMEFTIDSSKAPHNYSMVDFNRFMRGAYSLGRDTVTVLGEYPKVKPRLLIIKRHRTRMFLNLDEIIAMAEELGFEVVIDEANVSSDISKFASLVNTVDVMMGVHGAGLTNCVFLPQNATLIQIVPWGGLEWVSRTDFGNPAELMGLHYKQYSIGVDESSLTEQYPRDHEIFKNPIAFHKKGFDFIRQTFMDKQNVKLDCKRFRPILLEALDNLNP

SEQ ID NO: 1114 - protein, 572 aa, Zea mays
  misc_feature (195)..(438): Pfam Name: DUF563 Pfam Description: Protein of unknown function (DUF563)
  misc_feature: Public GI ID no. 162460428
  misc_feature: Bit score of 1379.2 for HMM based on sequences of Figure 24
  misc_feature: Functional Homolog Of SEQ ID NO. 1107
  misc_feature: in Figure 24
MKSGERPKQMRGVRQESRRFRLLVIVAGFFLVSLTFVVISKPDSILSSLNGKLPVDQAPTSILIQQKVNSPPATALETSTDALRGDPRVVDDEADPRPQGFKGEEEESRVLSEPDATSGMTELTPDKDGSGRKSNEEVLGGGGDGEGKSKEDRGHGPEKHKVTLPTVSNYTIHDTEDTQNAKQDDTSNDQQGSKPLCDFSNFRANVCEMRGDVRVHPNAASIMFMEPGHSQRDELWKIKPYPRKGDEFCLSHITELTVKSSKVAPECSKYHDVPAVIFSLTGYTGNLFHDFTDVMVPLFTTASEFNGEVQFLITDMALWWTIKYHTVLEKLSKYPVIDFSKDGEVHCFKHVIVGLHAYMEFTIDSSKAPHNYSMVDFNRFMRGAYSLGRDSVTLLGEYPKVKPRLLIIKRHRTRMFLNLDEIIAMAEELGFEVVIDEANVSSDISKFAALVNTVDVMMGVHGAGLTNCVFLPQNATLIQIVPWGGLEWVSRTDFGNPAELMGLHYKQYSIGVHESSLTEQYPSDHEIFKNPISFHKKGFDFIRQTFMDKQNVKLDCKRFRPILLEALDNLNA

SEQ ID NO: 1115 - protein, 580 aa, Triticum aestivum
  misc_feature (203)..(446): Pfam Name: DUF563 Pfam Description: Protein of unknown function (DUF563)
  misc_feature: Public GI ID no. 56409844
  misc_feature: Bit score of 1347.1 for HMM based on sequences of Figure 24
  misc_feature: Functional Homolog Of SEQ ID NO. 1107
  misc_feature: in Figure 24
MIKAGERPNSKLLRGGGRQESRRFRMLAIVVGFFIVSLTFVLVSKPDAILFGLNGKLPADQAPASILIQQKVNTPAQKTSTDAIIGGDPKVVDDETYVKPKEIRGGEEEDHRVLSEPDPASGMAEPAANKDGDARKSSDETLGGERKDEAEEERDEEKHAKVTLPTVSNYTIHDAEDAENAKQEGLSLSNVQHEQQQQQGSKPLCDFSNFRANVCEMRGDVRVHPKATSVLFMEPEGSQRDEVWKIKPYPRKGDEFCLSHITELTVKSSKVAAECTRYHDVPVVIFSLTGYTGNLFHDFTDVIVPLFTTAAQFDGEVQFLITDMALWWTVKYHTLLQKLSKYPLIDFSKDDQVRCFKHAIVGTHAYMEFTIDAAKSPNGVTMVDFNRFMRAAYSLPKAAAAALGESPRVKPRLLIIKRHRTRMFLNLEEIIGMAEELGFEVVIDEANVSSDINGFAKLVNSVDVMMGVHGAGLTNCVFLPQNATLIQIVPFGGLDWISRTDFGNPSEMMGLRYKQYAITVDESSLTDHYPRDHKIFKDPISFHKRGFEFIRRTFMDKQNVRLDCKRFRPVLLEALDNLNQ

SEQ ID NO: 1116 - DNA, 2373 bp, Panicum virgatum
  misc_feature: Ceres Clone ID no. 1888614
  misc_feature: Encodes the peptide sequence at SEQ ID NO. 1117
acgcctcacaatccactggagcagtctgccacccaccccctccacctcgcctggcctccactctggtcagacgctatgtatcaccgatacgcgatacgggtacggcgatatggatatggtgatatgtgagtttaaaaaacgatatagtggtagtatagagagtatcgaagtatggaagtatcgaatacggctgggttagcgaagtatcggtgattcgtataggtcagaagcgccgcacatagataccggggcggcggcacacgcaagaggggcctggccaagtagcctgaccgcttcttgctggctcctcctgtgctccgtttccttttctgctcccgggctccctctcctcgagttctcgcacgcctctcttcctcttgggttgggtccgtccagcaagtggagaaaggggcagggatgaagtccggggagcggccgaagctggtgcggggcctccggcaggagtcgcggcggttccggctgctggtcatcgtcgtcggcttcttcctcgtctccctcaccttcgtcgtcatctccaagcccgacgccatcctcttcagcctgaacggcaagctgccggtggagcaggcgccgacgtccatcctgatcaagcagaaggtcgactcgccgcccgccacctcccggaagactgccaccgacgctctcccaggtggagatcctagagtggtcgacgacgaagccgatgtgagaccaaaaggtaccaaacgcgaggaggaggagagccgggtgctgagcgagcccgacccgaccagcgggatgacggagctgaccgccaacaaggacgggggcggccgtaaatccgacgaggagacgttaggcggcgaggggaaagggaagcaggatggggaggagcgtgggcacgcggcggagaagcacaaagtcacgctcccaaccgtttccaattacaccattcatgactccgaggacaccgaaaatggcaagcaagacgacggtacaggttctgacctgcagggaagcaagcccctgtgtgatttctcaaactttagagcaaatgtgtgcgagatgcgtggtgatgttagggttcacccaaacgctacctcaatcatgtttatggagcctgccggttcgcagagagatgagctctggaagatcaagccataccctcggaagggggacgagttctgcctcagccatatcactgagctgacagtgaaatcaagcaaagtggccccagagtgcaccaagtaccacgacgtgcctgctgtgatcttttcactgacaggatacacggggaacctgttccatgatttcacggacgtgatggtcccccttttcacgaccgcaagcgagttcaatggtgaagttcagttcctcataaccgacatggcactttggtggacaatcaagtatcacactgtactccagaagctgtccaaatacccactgattgatttcagcaaggatgagcaggtgcattgcttcaagcatgtcatcgtcggcctccatgcttacatggagttcacaatcgactcgtccaaggccccgcacaactattctatggtcgacttcaacagattcatgcgcggagcttactcgctgcccagggacaccgttacagtgcttggagagtaccccaaggtcaagccaagattgctcatcatcaagaggcaccgaacgaggatgttcctcaacctcgatgagatcattgctatggctgaggagctcggctttgaggtggtgaccgatgaggccaatgtgagctctgacatctcaaagttcgccaggctggttaacacggtcgatgtgatgatgggagtccatggggctgggctcacaaactgtgtgttcctgccacagaatgccactctgattcagatcgtgccgtggggagggctggaatgggtatcccgcaccgatttcggcaacccagcagagctcatgggcatgcactacaagcaatacagcatcagcgtagacgagagcagcctcacggagcagtacccacgggaccatgagatcttcaagaaccctattgcattccataagcacgggttcgacttcatcaggcagactttcatggacaagcagaacgtgaagctggattgcaagaggttcaggccgattctcttggaggcattagacaatctcaacccatgaagattgtgatcgattgcttgttgggcatggtaatagagattcttgtacacaatccatttttttcttcaccattcgttcccgtttaattagtaagaaaaattcttgtttgttctatccttacctgagaatgtccccattctggaaattgtaggatagaagctgtgtgtacactgtataaattgctgtaggtgcaaagatggaacgaaattcattcaaatcacatatagcctcatc

SEQ ID NO: 1117 - protein, 573 aa, Panicum virgatum
  misc_feature (196)..(439): Pfam Name: DUF563 Pfam Description: Protein of unknown function (DUF563)
  misc_feature: Ceres Clone ID no. 1888614
  misc_feature: Bit score of 1390.4 for HMM based on sequences of Figure 24
  misc_feature: Functional Homolog Of SEQ ID NO. 1107
  misc_feature: in Figure 24
MKSGERPKLVRGLRQESRRFRLLVIVVGFFLVSLTFVVISKPDAILFSLNGKLPVEQAPTSILIKQKVDSPPATSRKTATDALPGGDPRVVDDEADVRPKGTKREEEESRVLSEPDPTSGMTELTANKDGGGRKSDEETLGGEGKGKQDGEERGHAAEKHKVTLPTVSNYTIHDSEDTENGKQDDGTGSDLQGSKPLCDFSNFRANVCEMRGDVRVHPNATSIMFMEPAGSQRDELWKIKPYPRKGDEFCLSHITELTVKSSKVAPECTKYHDVPAVIFSLTGYTGNLFHDFTDVMVPLFTTASEFNGEVQFLITDMALWWTIKYHTVLQKLSKYPLIDFSKDEQVHCFKHVIVGLHAYMEFTIDSSKAPHNYSMVDFNRFMRGAYSLPRDTVTVLGEYPKVKPRLLIIKRHRTRMFLNLDEIIAMAEELGFEVVTDEANVSSDISKFARLVNTVDVMMGVHGAGLTNCVFLPQNATLIQIVPWGGLEWVSRTDFGNPAELMGMHYKQYSISVDESSLTEQYPRDHEIFKNPIAFHKHGFDFIRQTFMDKQNVKLDCKRFRPILLEALDNLNP

SEQ ID NO: 1118 - DNA, 1719 bp, Sorghum bicolor
  misc_feature: Ceres Annot ID no. 8740887
  misc_feature: Encodes the peptide sequence at SEQ ID NO. 1119
atgaagtccggcgagcggccgaagctggtgcggggcctccggcaggagtctcggcggttccgcctgctagtcatcgtcgtcggattcttcctcgtctccctgaccttcgtcgtcatctccaagcccgacgccatcctattcagcctgaacggcaagctaccggtggaccaggcgccgacatccatcctgatccagcagaaggttaactcgcccccagccaccacggttaagacctccaccgacgcactccgtggagaccctagagtggttgatgacgaagctgatccaagaccgcaagggttcaaaggcgaggaggaagagagccgggtcctgagcgagccggacccgaccagcgggatgacggagctgacccctaacaaggacggcagcggccgtaaatccgacgaggataagttaggcggcggcggtgacggcgaggggaaaaggagggaggagcgtgggcacgaggcggacaagcataaagtcacgctcccaaccgtttccaattacactattcatgacaccgaggacacggaaactgccaaaaaagatgatacaagttatgaccagcaggggagcaagcccctgtgtgatttctcaaattttagagcaaatgtgtgcgagatgcgtggtgatgttagagttcacccaaatgctacagaaatcatgttcatggagcctggccattcgcagagagatgagctgtggaaaattaagccataccctcggaaaggagacgagttctgccttagccatatcactgagctgacagtaaaatcaagcaaagtggccccagagtgcaccaagtaccatgacatgcctgctgtgatcttttccctgacaggctatactggaaatctgttccatgacttcactgacgtgatggtccctcttttcacgacagcaagtgagtttaatggagaagttcagttccttataacggacatggcactttggtggacaatcaagtaccacactgtgcttcagaagctgtccaagtaccctgtcattgatttcagcaaggatgaccaggtgcactgcttcaagcatgtcattgtcggcctccatgcttacatggaattcacgatagactcgtcgaaggctccacacaactattcaatggttgattttaacagattcatgcgcggagcttactcactgggcagggacaccgttaccgtgcttggagagtaccctaaggtcaagccaaggttgctcatcatcaagaggcaccgtacaaggatgttccttaaccttgatgagatcgttgcaatggctgaggagctcggctttgaggtggttatcgatgaggccaatgtgagctctgatatctccaagttcgccaggctggttaacacggtggacgttatgatgggtgtccatggagctgggcttacaaactgcgtgttcttgccacagaatgccacactgattcagattgtgccgtggggagggttggaatgggtatcccgtactgatttcggcaacccggcagagctgatggggctgcactacaagcaatacagcatcggcgtggacgagagcagcctcacggagcaatatccgagggaccatgagatcttcaagaatcctattgctttccataagaacgggtttgacttcatcaggcaaaccttcatggacaagcaaaacgtgaagctggattgcaagaggttcaggcctattctattggaggcactggataacctcaacccataa

SEQ ID NO: 1119 - protein, 572 aa, Sorghum bicolor
  misc_feature (195)..(438): Pfam Name: DUF563 Pfam Description: Protein of unknown function (DUF563)
  misc_feature: Ceres Annot ID no. 8740887
  misc_feature: Bit score of 1387.8 for HMM based on sequences of Figure 24
  misc_feature: Functional Homolog Of SEQ ID NO. 1107
MKSGERPKLVRGLRQESRRFRLLVIVVGFFLVSLTFVVISKPDAILFSLNGKLPVDQAPTSILIQQKVNSPPATTVKTSTDALRGDPRVVDDEADPRPQGFKGEEEESRVLSEPDPTSGMTELTPNKDGSGRKSDEDKLGGGGDGEGKRREERGHEADKHKVTLPTVSNYTIHDTEDTETAKKDDTSYDQQGSKPLCDFSNFRANVCEMRGDVRVHPNATEIMFMEPGHSQRDELWKIKPYPRKGDEFCLSHITELTVKSSKVAPECTKYHDMPAVIFSLTGYTGNLFHDFTDVMVPLFTTASEFNGEVQFLITDMALWWTIKYHTVLQKLSKYPVIDFSKDDQVHCFKHVIVGLHAYMEFTIDSSKAPHNYSMVDFNRFMRGAYSLGRDTVTVLGEYPKVKPRLLIIKRHRTRMFLNLDEIVAMAEELGFEVVIDEANVSSDISKFARLVNTVDVMMGVHGAGLTNCVFLPQNATLIQIVPWGGLEWVSRTDFGNPAELMGLHYKQYSIGVDESSLTEQYPRDHEIFKNPIAFHKNGFDFIRQTFMDKQNVKLDCKRFRPILLEALDNLNP

SEQ ID NO: 1120 - protein, 576 aa, Oryza sativa subsp. japonica
  misc_feature (199)..(442): Pfam Name: DUF563 Pfam Description: Protein of unknown function (DUF563)
  misc_feature: Public GI ID no. 115453815
  misc_feature: Bit score of 1323.9 for HMM based on sequences of Figure 24
  misc_feature: Functional Homolog Of SEQ ID NO. 1107
MKAGERPKLVRGVRQESRRFRLLVIVVGFFLVSLTFVFVSKPDAILFSLNGKLPVEQAPTSILIQQKVNEPSGESRKTSTDALRGDPKVVDDEADAKPKGTGGGSEEEEGRVLSEPDPTSGMMEPTHNKDGNGHKSHQETLGGGGDGESKGNDEEGEHAEQKHKVTLPTVSNYTIHDAAEDTENAKQEGMNNVQQGSKPLCDFSNFRANVCEMRGDVRIHPTATSVLFMEPEGSQRDEVWKIKPYPRKGDEFCLSHITEVTVKSSKVAPECTKYHDVPAVIFSLTGYTGNLFHDFTDVLVPLFTTASEFNGEVQFLITDMALWWTIKYQTVLQKLSKYPVIDFSKDDQVHCFKHAIVGLHAYMEFTIDSTKAPHNYSMADFNRFMRGAYSLGRDSVTVLGEYPKIKPRLLIIKRHRTRMFLNLDEIISMAEELGFEVVIDEANVSSDISRFARLVNSVDVMMGVHGAGLTNCVFLPQHATLIQIVPWGGLDWISRTDFGNPAELMGLRYKQYSIGVDESSLTDQYPRDHEIFKNPISFHQRGFDFIRQTFMDKQNVKLDCKRFRPILLEALDNLNP

SEQ ID NO: 1121 - protein, 576 aa, Oryza sativa subsp. indica
  misc_feature (199)..(442): Pfam Name: DUF563 Pfam Description: Protein of unknown function (DUF563)
  misc_feature: Public GI ID no. 125544555
  misc_feature: Bit score of 1320.3 for HMM based on sequences of Figure 24
  misc_feature: Functional Homolog Of SEQ ID NO. 1107
MKAGERPKLVRGVRQESRRFRLLVIVVGFFLVSLTFVFVSKPDAILFSLNGKLPVEQAPTSILIQQKVNEPSGESRKTSTDALRGDPKVVDDEADAKPKGTGGGSEEEEGIVLSEPDPTSGMIEPTHNKDGNGHKSHQETLGGGGDGESKGNDEEGEHAEQKHKVTLPTVSNYTIHDAAEDTENAKQEGMNNVQQGSKPLCDFSNFRANVCEMRGDVRIHPTATSVLFMEPEGSQRDEVWKIKPYPRKGDEFCLSHITEVTVKSSKVAPECTKYHDVPAVIFSLTGYTGNLFHDFTDVLVPLFTTASEFNGEVQFLITDMALWWTIKYQTVLQKLSKYPVIDFSKDDQVHCFKHAIVGLHAYMEFTIDSTKAPHNYSMADFNRFMRGAYSLGRDSVTVLGEYPKIKPRLLIIKRHRTRMFLNLDEIISMAEELGFEVVIDEANVSSDISRFARLVNSVDVMMGVHGAGLTNCVFLPQHATLIQIVPWGGLDWISRTDFGNPAELMGLRYKQYSIGVDESSLTDQYPRDHEIFKNPISFHQRGFDFIRQTFMDKQNVKLDCKRFRPILLEALDNLNP

SEQ ID NO: 1122 - protein, 583 aa, Oryza sativa subsp. japonica
  misc_feature (206)..(449): Pfam Name: DUF563 Pfam Description: Protein of unknown function (DUF563)
  misc_feature: Public GI ID no. 115445881
  misc_feature: Bit score of 1112.3 for HMM based on sequences of Figure 24
  misc_feature: Functional Homolog Of SEQ ID NO. 1107
MKPVERAKLVRSLRQESRRLRLLVLVIGFFLVTLTFVVISKPDALLFNLNGRLSVDHAPRSLLIRQRIHADSRRSADTFPAAEDPKVVDEDEGAEDATAKGTSEEEKRLLSSEPEQGKNEEAATASEVLGGGGEEDNKNGEEEGHTQHSKVTLPTVSNYTIRDAEDTDNGKQEDGKPNEKYEFEMDADKGDNVEPETDNEEWNKKPLCDFSNFRANVCEMRGNIRIHPNASSVMYMEPASSKREEIWKVKPYPRKGDELCLGHITEITVKSSKVAPECSKYHNVPAVVFALTGYTGNLFHDFTDVLVPLFTTASEFNGEVQFLITDMAIWWTRKYKVVFDKLSKYPLIDFNNDDQVHCFKHAIVGLHAYMEFTIDSSKAPHNYSMVDFNRFMRRTYSLPRDFVTALGEIPKAKPRLLIISRQRTRMFLNLNEIVAMAEEIGYEVVVEEANVSSDLSHFGKVVNSVDVMMGVHGAGLTNCVFLPQNATLIQIVPWGGLDWISRIDFGNPAEQMGLRYKQYSIGVHESSLTDQYPLDHEIFTNPLSFHKHGFEFIRQTFMDKQNVKLDCNRFKPVLLEVLDQLNQ

SEQ ID NO: 1123 - DNA, 1349 bp, Panicum virgatum
  misc_feature: Ceres Clone ID no. 1957829
  misc_feature: Encodes the peptide sequence at SEQ ID NO. 1124
caagtagcctgaccgcttcttgctgccacctgtgctccgtttccttttctgctcccgggctccctctcctcgagttcttgctcgcctctcttcctcttgggtttggtccaacaagtggagaaaggggcaggatgaagtccggggagcggccgaagctggtgcggggcctccggcaggagtcccggcggttccggctgctggtcatcgtcgtcggcttcttcctcgtctccctcaccttcgtcgtcatctccaggcccgacgccatcctcttcagcctgaacggcaagctgccggtggagcaggcgccgacgtccatcctgatcaagcagaaggtcaattcgccgcccgacacctcccggaagacctcgaccgacgctctccgtggagatcctagagtggtcgacgacgaagccgatgtgagaccaaaaggtaccaaaggcgaggaggagagccgggtgctgagcgagcccgacccgaccagcgggatgacggagctgaccccaaacaaggacgggggcggccgtaaatccgacgwggagacgttaggcggcgaggggaaacgggaggagggggaggagcgtggtcacgcggcggagaagcacaaagtcacgctcccaaccgtttccaattacaccattcatgactccgaggacaccgaaaatggcaagcaagacgacggtacaggttctgacctgcagggaagcaagcccctgtgtgatttctcaaactttagagcaaatgtgtgcgagatgcgtggcgatgttagggttcacccaaacgcgacctcaatcatgttcatggagcctgccggttcgcagagagatgagctctggaagatcaagccgtaccctcggaaaggggacgagttctgcctcagccatatcaccgagctgacagtgaaatcaaacaaagtggccccagagtgcaccaagtaccacgatgtgcctgctgtgatcttttcactgacaggatacacaggaaacctgttccatgatttcaccgacgtgatggtccccattttcacgaccgcaagcgagttcaatggtgaagttcagttcctcataaccgacatggcactttggtggaccatcaagtatcacactgtgctccagaagctgtccaaatacccactgattgatttcagcaaggatgaccaggtgcattgcttcaagcatgtcatcgtcggcctccatgcttacatggagttcacaatcgactcgtccaaggccccgcacaactattccatggtcgacttcaacagattcatgcgcggagcttactcgctgggcagggacaccgttaccgtgcttggagagtaccccaaggtcaagccaagattgctcatcatc

SEQ ID NO: 1124 - protein, 406 aa, Panicum virgatum
  misc_feature (193)..(406): Pfam Name: DUF563 Pfam Description: Protein of unknown function (DUF563)
  misc_feature: Ceres Clone ID no. 1957829
  misc_feature: Bit score of 660.7 for HMM based on sequences of Figure 24
  misc_feature: Functional Homolog Of SEQ ID NO. 1107
  misc_feature (135)..(135): Xaa is any aa, unknown, or other
MKSGERPKLVRGLRQESRRFRLLVIVVGFFLVSLTFVVISRPDAILFSLNGKLPVEQAPTSILIKQKVNSPPDTSRKTSTDALRGDPRVVDDEADVRPKGTKGEEESRVLSEPDPTSGMTELTPNKDGGGRKSDXETLGGEGKREEGEERGHAAEKHKVTLPTVSNYTIHDSEDTENGKQDDGTGSDLQGSKPLCDFSNFRANVCEMRGDVRVHPNATSIMFMEPAGSQRDELWKIKPYPRKGDEFCLSHITELTVKSNKVAPECTKYHDVPAVIFSLTGYTGNLFHDFTDVMVPIFTTASEFNGEVQFLITDMALWWTIKYHTVLQKLSKYPLIDFSKDDQVHCFKHVIVGLHAYMEFTIDSSKAPHNYSMVDFNRFMRGAYSLGRDTVTVLGEYPKVKPRLLII

SEQ ID NO: 1125 - DNA, 1770 bp, Sorghum bicolor
  misc_feature: Ceres Annot ID no. 8674833
  misc_feature: Encodes the peptide sequence at SEQ ID NO. 1126
atgaaggcggtggagcgcgcgaaactggtgaggagcctccggcacgagtcgcggcggctgcgtctactcgtcctcgtcatcggtttcttcctcgtcacgctcaccttcgttgtcgtctccaagcccgacgccctcctcttcaacctgaacggcaggctgttggtggaccaggcgccgcgctcgctcttgatccgccagcgggttgacgcccacgacgggagatccgccgacactctcgcctctgcctctggggatctaaaggtggtcgacgacgataccgccggcgaggaagccagcaccaacgccatagggaccagtggagaggaggaacgggtgctcgctagcgagcccgagcagagcaaaagggcagtggaagccactacatcagagattttaggtggggaacacgacgagggaaggaaaagccagcaagagggggagaaagagcaccagcagcacaagttgactctcccaactgtttcaaattataccattcatgatgccactgatggcaccgacaatggcaaccgggatgatgcagaatttaagcccactctggatgttgaccagagaaatggtcgtgacagatctcatcaagcagcattggataatgtggagcgggacaaaccattgtgtgatttctcaaacttcagagcaaatacctgtgagatgagaggtaacatcagaatacacccaaatggcagttcggtcatttacgtggaacctacaagttcaagtccaaagagaaatgaacaatggaaaattaagccttaccctcgcaaaggtgatgaattatgccttaatcatattacagaagtgacagtgaaatccagcaaagtggcacctgagtgttccaagtaccatcatgtgcctgctgtgatctttgctctgactggatacactggaaatctattccatgacttcaccgacgtgcttgtcccccttttcacgactgcaagtgagttcaatggtgaagttcaattcctaatcacagacatggctatttggtggacaaggaagtatgcagtggtgtttgagaagttaactaagtaccccttgattgatttcaacaaagacaatgaagtgcattgcttcaagcatgccatcgttggccttcatgcttacatggagttcacaattgacccgttaaaggctccacacaattactcaatggtggacttcaaccggttcatgcgcaggacctactctctgcctagggatgcagtgacagcacttggtgagatcccgaagaccaggccaaggttgctgattatctccaggcaaaggacaagaatgttcctcaatctcaaggaaatcgtggccatggctgacgagataggctatgacgtggtggttgaagaggccaatgtgaactccaatgtcactcattttgccaaggtagttaactccgtcgatgtgatgatgggtgtccatggtgctgggctcacaaattgtgtgttccttccacacgatgccatactgattcagattgtaccttggggtgctctagatgggatatgcagaattgattttggctacccagcagaacaaatgggcttgagatacaagcactacagcataggtgtgcacgagagcagcctcacggagcaataccccctggatcacgagatcttcagaaacccacttgctttccacaagaatggattcgagtttgtcagacaaaccttcatggatacacaaaatgtgaggcttgattgcaaccgtttcagacctatactcttggaggctcttgatcaattgaaccaataa

SEQ ID NO: 1126 - protein, 589 aa, Sorghum bicolor
  misc_feature (210)..(455): Pfam Name: DUF563 Pfam Description: Protein of unknown function (DUF563)
  misc_feature: Ceres Annot ID no. 8674833
  misc_feature: Bit score of 998.4 for HMM based on sequences of Figure 24
  misc_feature: Functional Homolog Of SEQ ID NO. 1107
MKAVERAKLVRSLRHESRRLRLLVLVIGFFLVTLTFVVVSKPDALLFNLNGRLLVDQAPRSLLIRQRVDAHDGRSADTLASASGDLKVVDDDTAGEEASTNAIGTSGEEERVLASEPEQSKRAVEATTSEILGGEHDEGRKSQQEGEKEHQQHKLTLPTVSNYTIHDATDGTDNGNRDDAEFKPTLDVDQRNGRDRSHQAALDNVERDKPLCDFSNFRANTCEMRGNIRIHPNGSSVIYVEPTSSSPKRNEQWKIKPYPRKGDELCLNHITEVTVKSSKVAPECSKYHHVPAVIFALTGYTGNLFHDFTDVLVPLFTTASEFNGEVQFLITDMAIWWTRKYAVVFEKLTKYPLIDFNKDNEVHCFKHAIVGLHAYMEFTIDPLKAPHNYSMVDFNRFMRRTYSLPRDAVTALGEIPKTRPRLLIISRQRTRMFLNLKEIVAMADEIGYDVVVEEANVNSNVTHFAKVVNSVDVMMGVHGAGLTNCVFLPHDAILIQIVPWGALDGICRIDFGYPAEQMGLRYKHYSIGVHESSLTEQYPLDHEIFRNPLAFHKNGFEFVRQTFMDTQNVRLDCNRFRPILLEALDQLNQ

SEQ ID NO: 1127 - DNA, 1892 bp, Triticum aestivum
  misc_feature: Ceres Clone ID no. 914572
  misc_feature: Encodes the peptide sequence at SEQ ID NO. 1128
gttccccacccactcctcccttcctcttccttcttccctccctccctcgggccgtggagcccggtcagacgcacaaggacacacgcaacgagccaggactgacgaccgcgtctctccttctccgctcatcttccaccactgtctccgccccgttccttgcacgcctcttcgtcctccgtgcgtgttaggccgagagagacctggtggccacgatgatgaaggcgggggagcggcccaactcgaagctgctccgcgggggcggccggcaggagtcgcggcggttccggatgctggccatcgttgtcggattcttcatcgtctccctcaccttcgtcctcgtctccaagcccgacgccatcctcttcggcctgaacggcaagctgccggcggaccaggcgccggcgtccatactgatccagcagaaggtcaacacgccggcccagaagacctccaccgacgctatcatcggtggagaccccaaagtggtcgacgatgaaacctatgtaaagccaaaaggcttgagcttgagcaacgtccagcaggagcagcagcagcaggggagcaagccgctgtgcgacttctcgaacttccgggcgaacgtgtgcgagatgcgcggcgacgtgagggtgcacccgaaggcgacgtcggtgctgttcatggagcccgaggggtcgcagagggacgaggtgtggaagatcaagccctacccgcggaaaggcgacgagttctgcctcagccacatcacggagctgacggtgaagtcgagcaaggttgccgccgagtgcacccggtaccacgacgtgcctgtggtgatcttctcgctcaccggctacacggggaacctatttcacgacttcaccgacgtgatcgtgccgctcttcaccacggccagccagttcgacggcgaggtgcagttcctcatcacggacatggcgctctggtggaccatcaagtaccacaccctgctccagaagctgtccaagtacccccttatcgacttcagcaaggacgaccaggtgcactgcttcaagcacgccatcgtcggcacgcacgcctacatggagttcaccatcgacgccaccaagtcgccgaacggggtcaccatggtcgacttcaaccggttcatgcggtcggcctactcgctgcccaaggccgccgcggcggcgctcggggagagccccagggtgaagccgaggctgctcatcatcaagcggcaccgcaccaggatgttccttaacctggaggagattatcggcatggccgaggagctcgggttcgaggtggtgatcgacgaggccaacgtgagctccgacatcaacggcttcgccaagctggtgaactcggtggacgtgatgatgggcgtgcacggcgccgggctcaccaactgcgtcttcctgccgcagaacgccacgctcatccagatcgtgcccttcggcggcctcgactggatctcccgcaccgacttcgggaacccgtcggagatgatgggcctccggtacaagcagtacgccattaccgtcgacgagagcagcctcaccgaccactacccgagggaccacaagatcttcaaggaccccatctccttccacaagcgtgggttcgagttcatcaggcgcaccttcatggacaagcagaacgtgaggctcgactgcaagaggttcagacctgtgctgctggaggcactggacaacctcaaccagtaaatttaaggcaacttgccacccatttttaccattcgtttcgtgaaatttgatgttcattctctcatggcgtgtatgtatggtctaaactatagagattttgtctaggaattactcgtgtaaactgtataaattaaattgcccgccgctgcaaagatggaacgaaattcattgaaatgatataggcccctc

SEQ ID NO: 1128 - protein, 496 aa, Triticum aestivum
  misc_feature (119)..(362): Pfam Name: DUF563 Pfam Description: Protein of unknown function (DUF563)
  misc_feature: Ceres Clone ID no. 914572
  misc_feature: Bit score of 1135.5 for HMM based on sequences of Figure 24
  misc_feature: Functional Homolog Of SEQ ID NO. 1107
MMKAGERPNSKLLRGGGRQESRRFRMLAIVVGFFIVSLTFVLVSKPDAILFGLNGKLPADQAPASILIQQKVNTPAQKTSTDAIIGGDPKVVDDETYVKPKGLSLSNVQQEQQQQGSKPLCDFSNFRANVCEMRGDVRVHPKATSVLFMEPEGSQRDEVWKIKPYPRKGDEFCLSHITELTVKSSKVAAECTRYHDVPVVIFSLTGYTGNLFHDFTDVIVPLFTTASQFDGEVQFLITDMALWWTIKYHTLLQKLSKYPLIDFSKDDQVHCFKHAIVGTHAYMEFTIDATKSPNGVTMVDFNRFMRSAYSLPKAAAAALGESPRVKPRLLIIKRHRTRMFLNLEEIIGMAEELGFEVVIDEANVSSDINGFAKLVNSVDVMMGVHGAGLTNCVFLPQNATLIQIVPFGGLDWISRTDFGNPSEMMGLRYKQYAITVDESSLTDHYPRDHKIFKDPISFHKRGFEFIRRTFMDKQNVRLDCKRFRPVLLEALDNLNQ

SEQ ID NO: 1129 - DNA, 2040 bp, Zea mays
  misc_feature: Ceres Clone ID no. 343865
  misc_feature: Encodes the peptide sequence at SEQ ID NO. 1130
tcctgtcgccagttcgccactctctggttgctgcacgcctctagtcggcggggccaagaggtggaaaagggcaggatgaagtccggcgagcggccgaagcagatgcggggcgtccggcaggaatctcggcggttccggcttctggtcatcgtcgccggcttcttcctcgtctccctgaccttcgtcgtcatctccaagcccgattccatcctgtccagcctgaacggcaagctgccggtggaccaggcgccgacgtccatcctgatccagcagaaggttaactcgccccccgccaccgcacttgagacctccaccgacgcactgcgtggagaccctagagtggtcgatgacgaagccgatccaagaccacaggggttcaagggcgaggaggaagagagccgggtactgagcgagccggacgcgaccagcgggatgacggagctgacccccgacaaggacggcagcggccgtaaatccaacgaggaggtgctaggcggcggaggtgacggcgaggggaaaagtaaggaggaccgcggccacgggccggagaagcataaagtgacgctcccaaccgtttccaactacactattcatgacaaccgaggacacccaaaatgccaagcaagacgatacaagttatgaccagcaggggagcaagcccctgtgcgacttctcaaatttcagagcaaacgtgtgcgagatgcgtggtgacgttagagttcacccaaatgctgcatcaatcatgttcatggagcctgggcattcgcagagagatgagctgtggaaaatcaagccgtaccctcggaaaggggacgagttctgccttagccatatcacagagctgacggtaaaatcaagcaaagtggcccccgagtgcagcaagtaccatgacgtgcctgctgtgatcctttccctgacaggctacactggaaatctgttccacgacttcactgacgtgatggtccctcttttcacgacagcaagcgagttcaacggagaagtccagttccttataacggacatggcgctctggtggacaatcaagtaccataccgttcttgagaaactgtccaagtaccctgtgatcgatttcagcaaggacggcgaggtgcactgcttcaagcatgtcatcgtcggcctgcatgcctacatggagttcacgatagactcgtccaaggctccgcacaactactcgatggttgactttaacagattcatgcgcggcgcttactcgctgggcagggacagtgtcaccgtgctgggagagtaccctaaggtgaagcctaggctgctcatcatcaagaggcaccgcacaaggatgttcctcaacctggacgagatcattgcaatggctgaggagctcggcttcgaggtggtcatcgacgaggccaacgtgagctctgatatctccaagttcgcggcgctggtgaacacggtggacgttatgatgggcgtccatggagctgggctcacaaactgcgtgttcttgccgcagaacgccacgctgatccagattgtgccgtggggagggttggaatgggtgtcccgcaccgacttcggcaaccccgcggagctgatggggctgcactacaagcagtacagcatcggcgtgcacgagagcagcctcacggagcagtacccgagcgaccatgagatcttcaagaaccccatttctttccacaagaaagggtttgacttcatcaggcagaccttcatggacaagcagaacgtgaagctggactgcaagaggttcaggcctattctgttggaggcactggacaacctcaacgcgtaagaccgtaaaagcttgtgcttgtgcttgtgctcaattggtactgggcatggcaatagagattccttcctgtatacaattccttcttttttttttacaattcgttccttttagtaaaatctattgttcgttctgtccctccctgagaaggttcgcattgtggaaaatttaggagaaattggcttataagttgttgtatacacactgtataaattgctgccactgcatagctttcgttctaatcaatc

SEQ ID NO: 1130 - protein, 400 aa, Zea mays
  misc_feature (23)..(266): Pfam Name: DUF563 Pfam Description: Protein of unknown function (DUF563)
  misc_feature: Ceres Clone ID no. 343865
  misc_feature: Bit score of 829.4 for HMM based on sequences of Figure 24
  misc_feature: Functional Homolog Of SEQ ID NO. 1107
MTTEDTQNAKQDDTSYDQQGSKPLCDFSNFRANVCEMRGDVRVHPNAASIMFMEPGHSQRDELWKIKPYPRKGDEFCLSHITELTVKSSKVAPECSKYHDVPAVILSLTGYTGNLFHDFTDVMVPLFTTASEFNGEVQFLITDMALWWTIKYHTVLEKLSKYPVIDFSKDGEVHCFKHVIVGLHAYMEFTIDSSKAPHNYSMVDFNRFMRGAYSLGRDSVTVLGEYPKVKPRLLIIKRHRTRMFLNLDEIIAMAEELGFEVVIDEANVSSDISKFAALVNTVDVMMGVHGAGLTNCVFLPQNATLIQIVPWGGLEWVSRTDFGNPAELMGLHYKQYSIGVHESSLTEQYPSDHEIFKNPISFHKKGFDFIRQTFMDKQNVKLDCKRFRPILLEALDNLNA

SEQ ID NO: 1131 - DNA, 1572 bp, Zea mays
  misc_feature: Ceres Clone ID no. 322206
  misc_feature: Encodes the peptide sequence at SEQ ID NO. 1132
cactacatctgagattttagctggggaagacgaccggggaaggaaaagccagcaagagggacacaaagagcaccagcagcacaagttgaccctcccaactgtttcgaattataccattcacgatgccactgacggcaccgacaatggcaaacaggaagatacagaatttaatctcactctggatgttgaccagagaaatggtcgagacagatctcatcaagcagaattggataatatggagcgggacaaaccattgtgtgatttctcaaacttcagagcaaatgtctgtgagatgagaggtaacatcagaatacacccaaatggcagttcggtcatatacatggaacctacgggttcaggttcaaagagaaacgaacaatggaagattaagccttaccctcgcaaaggtgatgaattatgcctcaatcatattacagaggtgacagtgaaatccagcatagtggcacctgagtgttccaagtaccatgacgtgcctgctgtgatctttgctctgactggatacaccggaaatctattccatgacttcaccgacgtgcttgtcccccttttcacgactgcaagcgagttcaatggtgaagttcagttcctaatcacagacatggctatttggtggacaaggaagtatgctgtggtgtttgagaagctaaccaagtaccccttgattgatttcaacaaagacaacgaagtgcattgcttcaagcatgccattgtcggccttcatgcttacatggagttcacaatcgacccattaaaggctccacacaattactcaatggtggacttcaaccggttcatgcgcaggacctactcgctgcctagggatgcagtgagagcacctggtgagaccccgaagaccaggaagccgaggctgctgattatctcgaggcaaaggacaaggatgttcctcaatcttaaggagatcgtggccatggctgaggagatcggctacgaggtggtggttgaagaggccaatgtgaactccaacgtcggccatttcgccaaggtagttaattctgtggacgtgatgatgggcgtccatggcgctgggctcacaaactgcgtgttccttccgcacggcgccacactgatccagattgtaccttggggcgccctagatgggatatgcaggatcgattttggctacccagcagaacagatgggcctgaggtaccagcactacagcatcggcgtgcacgagagcagcctcacggagcagtaccctctggaccacgagatcttcagaaacccgcttgcgttccacaagaacgggttcgagttcgtcaggcagaccttcatggatacacagaatgtaaggcttgactgcaaccgtttcagacctgtgctcttggaggctcttgaccaattgaaccaataaggacccattggtctaattccacggccactgtactagatttttgttttccttggcgattctagtctcaccatttttcctctttgtaaaatttcgtgatcactgtatctggttacatgagcaacatgaaaatcaattgtttctccaaatgtgtaggatcgaaatcgggattgtactac

SEQ ID NO: 1132 - protein, 386 aa, Zea mays
  misc_feature (6)..(252): Pfam Name: DUF563 Pfam Description: Protein of unknown function (DUF563)
  misc_feature: Ceres Clone ID no. 322206
  misc_feature: Bit score of 612.4 for HMM based on sequences of Figure 24
  misc_feature: Functional Homolog Of SEQ ID NO. 1107
MERDKPLCDFSNFRANVCEMRGNIRIHPNGSSVIYMEPTGSGSKRNEQWKIKPYPRKGDELCLNHITEVTVKSSIVAPECSKYHDVPAVIFALTGYTGNLFHDFTDVLVPLFTTASEFNGEVQFLITDMAIWWTRKYAVVFEKLTKYPLIDFNKDNEVHCFKHAIVGLHAYMEFTIDPLKAPHNYSMVDFNRFMRRTYSLPRDAVRAPGETPKTRKPRLLIISRQRTRMFLNLKEIVAMAEEIGYEVVVEEANVNSNVGHFAKVVNSVDVMMGVHGAGLTNCVFLPHGATLIQIVPWGALDGICRIDFGYPAEQMGLRYQHYSIGVHESSLTEQYPLDHEIFRNPLAFHKNGFEFVRQTFMDTQNVRLDCNRFRPVLLEALDQLNQ

SEQ ID NO: 1133 - protein, 584 aa, Oryza sativa subsp. japonica
  misc_feature (185)..(446): Pfam Name: DUF563 Pfam Description: Protein of unknown function (DUF563)
  misc_feature: Public GI ID no. 77554062
  misc_feature: Bit score of 835.0 for HMM based on sequences of Figure 24
  misc_feature: Functional Homolog Of SEQ ID NO. 1107
MKGGGGGLWRPRVESRGTFRRRLLTVTAGCFLFFIVFLLSSRHDAIVLLDTRLGVGRPTAASLRSPAAADTLPDAGSAGRRNHEAPSSPAFSSGVRETVTGVETNDDGAERGAEPAERDNAAPAAAAAISGGDQEAQPGTAAVDAAPGHDKSLRTAAATGTSPPRHEQPGETTTRADSVDQPRHPLCDLSDHRTDVCDLAGDIRMDANASAFVVVVDPAVGADGPTYKVRPYPRKGDATSMGRVTEITVRTTAAGAPPPRCTTTHAAPAVVFSISGYTGNLFHDFTDVIVPLYNTAARYCGDVQLVVTDGNAATRRWLARYGAVLRGLSRHVPLDLAAEAAAGGGEVHCFGHTVVGLRAHGELIIDRERSPDGLGMPDFTRFLRRALSLPRDAPTRPGGGHGDATKPQPRPRLLIISRRGTRLLLNTDAVARAAEQVGFEAVASELDMAGADHDDVARVARLVNSFDAVVGVHGAGLTNMVFLPPGAAAVQIVPWGGLRWLARADFGEPAVAMGLRYIQYEVAAGESTLKDKYPRDHEIFTNPTALHKKGFTFMRHTFLNGQDIIVDIDRFKPVLLRALNSLAR

SEQ ID NO: 1134 - DNA, 1629 bp, Sorghum bicolor
  misc_feature: Ceres Annot ID no. 8659080
  misc_feature: Encodes the peptide sequence at SEQ ID NO. 1135
atgaaagccggcggcggcggcggcgacaagaagcagcagcaggtgggtatcaggttgctgtccgtcgccgtcggctgcttcctcctcttcgtcgtcttcaccctctcctcccgctacaacgccaccttcgtcgtcgacactcgccgaggcgacttccggccatcgcagggggacagaggcggcgacggcggcgagggcgaactgaagcagcttgctcagcagagcaacgaaaaggcagcagtcacagaagcagacgaatcagtgatcggagaacagggcaacaacgtcgagagagaagcggaggctgaggaagcagagctcgagagcagcgccaccgccgcagccgccgccgacgcgacatcgaactccgacgagcaagcaaagccagctgcagccttggtgaaccagcagcggcaaccactgtgcgacctttcgggctcacgatctgatgtctgtgacttcaccggcgacatccgcttggatgccaacgcctcggcattcatcgtggtcgacccaacgggcgacgcaaacgcgccgacgtacaaggtccggccgtacgcacggaagggcgacgccacgagcatgagccgtgtcaccgaggtcaccgtgcggacgacgacggccgacgcgccgcgctgcacggcgacgcacgccgagccggcggtggtgttctccatcggcgggtacgcgggcaacctcttccacgacttcaccgacgtgatcgtgccgctctacggcaccgcgcagcgctacggcggcgtcgtccgcctagtcgtcgccgacgccggagcgggaccgtcccggtggctagccaagtacgacgccgtcctgcgcgggctctcgcgccacccgccgctcgacctcgccgccacggcgccgggggaagagacgcactgcttcggccacgtcgtggtcggcctgcgcgccgcgcaccgggagctcatgatcgacgagcgggatgagcgcagcagcggcccggacgcggtcggtgtcgggatggtcgacttcgcgcggttcctccggcgcgcgctctcgctgccccgggacgcggtcaccacgcgccccagcagcgacgccgtcgccacgggcacgaagaagccgaagcctcgcctgctgatcgtcgcccgccgcggcacccggcggctactgaacgcggacgccgtcgcgcgcgtggcggaggaggtggggttcgaggccgtggtgagcgagctggaggtgagcaagagcgacgacggcatcgcggaggtggggcggcgcatcaactcgttcgacgcggtggtgggcgtgcacggcgccgggctgaccaacatggtgttcctgccgcggggggcgacggtggtgcaggtggtgccgtggggcgggctgcagtggatcgcgcggatggacttcggcgacccggcggaggccatggggctccggtacgtccagtacgagatcgccgtgcacgagagctcgctcagggacaagtacccgagcgaccacgagatcttcaccaacccgactgcgttgcacaggaaagggttcaagttcttgaggcacaccttcttgatcggacaggatgtcacgctcgacgtcgaccgcttcagagtggtgctgctccaggcgttccagaacctcacgacgacgtag

SEQ ID NO: 1135 - protein, 542 aa, Sorghum bicolor
  misc_feature (140)..(404): Pfam Name: DUF563 Pfam Description: Protein of unknown function (DUF563)
  misc_feature: Ceres Annot ID no. 8659080
  misc_feature: Bit score of 739.5 for HMM based on sequences of Figure 24
  misc_feature: Functional Homolog Of SEQ ID NO. 1107
MKAGGGGGDKKQQQVGIRLLSVAVGCFLLFVVFTLSSRYNATFVVDTRRGDFRPSQGDRGGDGGEGELKQLAQQSNEKAAVTEADESVIGEQGNNVEREAEAEEAELESSATAAAAADATSNSDEQAKPAAALVNQQRQPLCDLSGSRSDVCDFTGDIRLDANASAFIVVDPTGDANAPTYKVRPYARKGDATSMSRVTEVTVRTTTADAPRCTATHAEPAVVFSIGGYAGNLFHDFTDVIVPLYGTAQRYGGVVRLVVADAGAGPSRWLAKYDAVLRGLSRHPPLDLAATAPGEETHCFGHVVVGLRAAHRELMIDERDERSSGPDAVGVGMVDFARFLRRALSLPRDAVTTRPSSDAVATGTKKPKPRLLIVARRGTRRLLNADAVARVAEEVGFEAVVSELEVSKSDDGIAEVGRRINSFDAVVGVHGAGLTNMVFLPRGATVVQVVPWGGLQWIARMDFGDPAEAMGLRYVQYEIAVHESSLRDKYPSDHEIFTNPTALHRKGFKFLRHTFLIGQDVTLDVDRFRVVLLQAFQNLTTT

SEQ ID NO: 1136 - DNA, 663 bp, Panicum virgatum
  misc_feature: Ceres Clone ID no. 1775942
  misc_feature: Encodes the peptide sequence at SEQ ID NO. 1137
acaagccacacaggccaagcgagcgatcaagagccagccatcagctctcgcgcgctcagtttagctagctgcttcttctgagagaaattaaagatacatatagctagtaggagatagatggcgtcgatgtcaatgagatcgtcgagggcgcagtggacgaagaagcaggacaagctgttcgagcaggcgctggcggtgtacgacaaggacacgccggaccggtggcacaacatcgcgcgcgccgtggggggcaagtcggcggaggaggtcaggcgctactacgagctgctggaagaggacgtcaagcgcatcgaggccggcaaggtgcccttccccgtctataggtgcccgccggcgccgcccccaattactagctaggcccacaggctgaagcaccagaagatctacgtacgtacttcggcaacaatcatgacatacagtgggtttggctacaaaacagtaactcaaccaagtggccggagcatccgtgcacatatatgaataactaccgctacctctagttaccgcagatcaatcgatctcccatgtatgtagtagtatacgtgttcatctggattctcaatttctcatgtaagatcatctctgtatttgtattatgtatcttgagaaaaagtgaagtaaaaaagtccttcatttcccctt

SEQ ID NO: 1137 - protein, 86 aa, Panicum virgatum
  misc_feature (10)..(59): Pfam Name: Myb_DNA-binding Pfam Description: Myb-like DNA-binding domain
  misc_feature: Ceres Clone ID no. 1775942
  misc_feature: Bit score of 203.7 for HMM based on sequences of Figure 22
  misc_feature: Functional Homolog Of SEQ ID NO. 1137
  misc_feature: in Figure 22
MASMSMRSSRAQWTKKQDKLFEQALAVYDKDTPDRWHNIARAVGGKSAEEVRRYYELLEEDVKRIEAGKVPFPVYRCPPAPPPITS

SEQ ID NO: 1138 - DNA, 675 bp, Zea mays
  misc_feature: Ceres Clone ID no. 331755
  misc_feature: Encodes the peptide sequence at SEQ ID NO. 1139
agaatgcaaaccacaaaacaaagtcaaaccagctgcaacgatcaagagcgaggcttccttgtccagctctccgctcagccgacacacacagattgacagatggcgtctatgtcgctgagctcgtcgagggcgcagtggacggcgaagcagaacaagctgttcgagcaggcgttggcggtgtacgacagggacacgccggaccgctggcacaacatcgcgcgcgccgtgggtggcaagtcggcggacgaggtcaggcgctactacgagctgctggtgaaggacttggagcacatcgaggccggcaaggtggccttccccgcgtacaggtgccccggcggctacgacgacgccgacagcgacaggctgaagcacctgacctgaagatctaggcggcaggcaagcatcatgagaaccactgaacaagtacgtcctacatacgtacacttcgcgccatgtgagtgtagcacgtgtggctacaaaagaagcaagccaagcgagtgggtcggacggattatctgttcaagcacgcatgtgaattagaattactactagcaatagctataggatgttgatcaatcgatctccgttccccccgtgttgcgatgtaaaatctcagcatctgtagcatatatattctgaggagtgaaataaaatacattcactagtttgtggacc

SEQ ID NO: 1139 - protein, 93 aa, Zea mays
  misc_feature (10)..(59): Pfam Name: Myb_DNA-binding Pfam Description: Myb-like DNA-binding domain
  misc_feature: Ceres Clone ID no. 331755
  misc_feature: Bit score of 213.2 for HMM based on sequences of Figure 22
  misc_feature: Functional Homolog Of SEQ ID NO. 1137
  misc_feature: in Figure 22
MASMSLSSSRAQWTAKQNKLFEQALAVYDRDTPDRWHNIARAVGGKSADEVRRYYELLVKDLEHIEAGKVAFPAYRCPGGYDDADSDRLKHLT

SEQ ID NO: 1140 - DNA, 270 bp, Sorghum bicolor
  misc_feature: Ceres Annot ID no. 8667653
  misc_feature: Encodes the peptide sequence at SEQ ID NO. 1141
atgtcgctgagctcgacgagggcgcagtggacggcgaagcagaacaagctgttcgagcaggcgctggcggtgtacgacagggacacgccggaccggtggcacaacatcgcgcgcgccgtcgggggcggcaagtcggcggacgaggtcaggcgctactacgagctgctggtgaaggacgtggagcacatcgaggccggcaaggtgcccttcccggcctacaggtgccccgccggctacgacgccgacaggctgaagcacctgaagatctag

SEQ ID NO: 1141 - protein, 89 aa, Sorghum bicolor
  misc_feature (7)..(57): Pfam Name: Myb_DNA-binding Pfam Description: Myb-like DNA-binding domain
  misc_feature: Ceres Annot ID no. 8667653
  misc_feature: Bit score of 210.8 for HMM based on sequences of Figure 22
  misc_feature: Functional Homolog Of SEQ ID NO. 1137
  misc_feature: in Figure 22
MSLSSTRAQWTAKQNKLFEQALAVYDRDTPDRWHNIARAVGGGKSADEVRRYYELLVKDVEHIEAGKVPFPAYRCPAGYDADRLKHLKI

SEQ ID NO: 1142 - protein, 90 aa, Oryza sativa subsp. japonica
  misc_feature (6)..(56): Pfam Name: Myb_DNA-binding Pfam Description: Myb-like DNA-binding domain
  misc_feature: Public GI ID no. 115465643
  misc_feature: Bit score of 199.1 for HMM based on sequences of Figure 22
  misc_feature: Functional Homolog Of SEQ ID NO. 1137
  misc_feature: in Figure 22
MAQQARAQWPQKQNKLFEQALAVYDKETPDRWHNIARAVGGGKSAEDVKRYYEMLEEDIKHIESGKVPFPAYRCPAAAGYQAERLKHLKI

SEQ ID NO: 1143 - DNA, 258 bp, Populus balsamifera subsp. trichocarpa
  misc_feature: Ceres Annot ID no. 1487827
  misc_feature: Encodes the peptide sequence at SEQ ID NO. 1144
atggcatccaattctctcaactcttcacgtaactgtagttcctcttggacccccaagcaaaacaaactattcgaaaaggccctggctttgtatgacaaggacacccctgaccgctggcataatgttgccaaagctgtgggtgggaaatctgcagaggaagtggagaggcactatgaaattctcatcaaggatgtcagggaaattgagtctggtcgggttccattccctaattacaggtcaagtggaaacagcaactaa

SEQ ID NO: 1144 - protein, 85 aa, Populus balsamifera subsp. trichocarpa
  misc_feature (13)..(62): Pfam Name: Myb_DNA-binding Pfam Description: Myb-like DNA-binding domain
  misc_feature: Ceres Annot ID no. 1487827
  misc_feature: Bit score of 182.3 for HMM based on sequences of Figure 22
  misc_feature: Functional Homolog Of SEQ ID NO. 1137
  misc_feature: in Figure 22
MASNSLNSSRNCSSSWTPKQNKLFEKALALYDKDTPDRWHNVAKAVGGKSAEEVERHYEILIKDVREIESGRVPFPNYRSSGNSN

SEQ ID NO: 1145 - DNA, 517 bp, Brassica napus
  misc_feature: Ceres Clone ID no. 1069222
  misc_feature: Encodes the peptide sequence at SEQ ID NO. 1146
aaaatcaactcatacatacatctttcttcttttactccctccaaagaaaccagatttccattttcaaaacactcttttcgatcttttactaaatggcttccaactccatgagttctaacacttcttggacgcgtaaggagaacaaactatttgaaagggctttggctatatatgagcaggacactcctgaccgatggcataacgttgctagagcagttggtgggaaatcggctgaagaagtaaggagacactacgagctcctcgtaagggatgtcaatgacattgagtcagggcgttatccgcatcctacttaccgttcaaatggaaactgaaagcatttaagctactcaaaaaggttcctctgaaaccaacatgattcgaaaaccagaaacaaacagagaggatctaaacaaagatatatcaaatgtatttacgtctattgtgttatatgtatacgactatgtaagaattttatgctttcatgctaatattaatgaatcaacgtgagtttcacatg

SEQ ID NO: 1146 - protein, 79 aa, Brassica napus
  misc_feature (9)..(58): Pfam Name: Myb_DNA-binding Pfam Description: Myb-like DNA-binding domain
  misc_feature: Ceres Clone ID no. 1069222
  misc_feature: Bit score of 175.7 for HMM based on sequences of Figure 22
  misc_feature: Functional Homolog Of SEQ ID NO. 1137
  misc_feature: in Figure 22
MASNSMSSNTSWTRKENKLFERALAIYEQDTPDRWHNVARAVGGKSAEEVRRHYELLVRDVNDIESGRYPHPTYRSNGN

SEQ ID NO: 1147 - DNA, 776 bp, Panicum virgatum
  misc_feature: Ceres Clone ID no. 1722230
  misc_feature: Encodes the peptide sequence at SEQ ID NO. 1148
atcagctcatcacaactcttgatctctagctagctaaagagataagcttcctctcttcctctcggtcgaaggagtgatcctctctcactctcaccaggagctcagctcgggtagctcaaggaggccagaagaagaaatggcgtcgctgtcgatgaccagcagctcggtgcgggcgcagtggacgaagaagcagaacaagctcttcgagcaggcgttggccgtgtacgacaaggacacccccgaccggtggcacaacatcgcccgcgccgtcggcggcaagtccgccgaggaggtcaggcgctactacgagctgctggaggaggatgtcaagcacatcgagtccggcaaggtgcccttccccgcctaccgctgccccggcggcgccggcgccggcgccctcggctacgaggccgacaggatgaagcatctgaagatctaggcgaacttcagagtatggtcgagaagaggctgcgcaggcacgtgtattagtgtatatatgattgggacagcatgcatgtccatgctactcctacgcaagtggtctggaagaagcaagaagaatcagatgagatgcatgcatgtcataattaattaattaattaattaattaataattagtatgggatgatcgagtagtatcctagcctgtcacgcgagatcgaccgacccatcgatctcccagcatgtgtccttcgtacccacgcgcgtatgtgtattatatcctagctgcatctgtgtaccataccaatcaagaaacatgaacttgatattgatgc

SEQ ID NO: 1148 - protein, 100 aa, Panicum virgatum
  misc_feature (12)..(61): Pfam Name: Myb_DNA-binding Pfam Description: Myb-like DNA-binding domain
  misc_feature: Ceres Clone ID no. 1722230
  misc_feature: Bit score of 207.2 for HMM based on sequences of Figure 22
  misc_feature: Functional Homolog Of SEQ ID NO. 1137
MASLSMTSSSVRAQWTKKQNKLFEQALAVYDKDTPDRWHNIARAVGGKSAEEVRRYYELLEEDVKHIESGKVPFPAYRCPGGAGAGALGYEADRMKHLKI

SEQ ID NO: 1149 - DNA, 776 bp, Panicum virgatum
  misc_feature: Ceres Clone ID no. 1763593
  misc_feature: Encodes the peptide sequence at SEQ ID NO. 1150
atcagctcatcacagctctcttgatctctagctagagataagcaagcttcctcttcctctcggtcgagcgagcgagtgatcctctctcactcccaccaggagctcgggtaactcaaggaggccagaagaagaaatggcgtcgctgtcgatgaccagtagctcggtgcgggcgcagtggacgaagaagcagaacaagctgttcgagcaggctctggccgtgtacgacaaggacacgcccgaccggtggcacaacatcgcccgcgccgtcggcggcaagtccgccgaggaggtcaggcgctactacgagctgctggaggaggacgtcaagcacatcgagtccggcaaggtgcccttccccgcctaccgctgccccggcggcgccggcgccggcgccggcgccctcggctacgaggccgacaggatgaagcatctgaagatctaggcgaacttcagaggatgatgatggtcgagaagaggctgctcagtgctcacgcacgtgtatatatgattgggacagcatgcatgtccatgctactcttagcaagtggtctggagaagcaagaagaatcagatgagatgcatgcatgttacaatcaattaataatttgtatggggtgatcgagtagtatcctagcctgtcacgcacgcgagatcgaccgacccatcgatctcccagcatgtgtccttcgtacccacgcgtatctgtattatatcctagctgcatctgtgtaccataccaatcaagaaacatgaacttgatattgatgcatttctac

SEQ ID NO: 1150 - protein, 102 aa, Panicum virgatum
  misc_feature (12)..(61): Pfam Name: Myb_DNA-binding Pfam Description: Myb-like DNA-binding domain
  misc_feature: Ceres Clone ID no. 1763593
  misc_feature: Bit score of 205.7 for HMM based on sequences of Figure 22
  misc_feature: Functional Homolog Of SEQ ID NO. 1137
MASLSMTSSSVRAQWTKKQNKLFEQALAVYDKDTPDRWHNIARAVGGKSAEEVRRYYELLEEDVKHIESGKVPFPAYRCPGGAGAGAGALGYEADRMKHLKI

SEQ ID NO: 1151 - DNA, 749 bp, Panicum virgatum
  misc_feature: Ceres Clone ID no. 1910072
  misc_feature: Encodes the peptide sequence at SEQ ID NO. 1152
atcagctcatcagctcttgatctctagctagctagagagataagcttcctctcttcctctcggtcgagggagtgatcctctctcactctcaccaggagctcagctcgggtagctcaaggaggccagaagaagaaatggcgtcgctgtcgatgaccagcagctcggtgcgggcgcagtggacgaagaagcagaacaagctcttcgagcaggcgttggccgtgtacgacaaggacacccccgaccggtggcacaacatcgcccgcgccgtcggcggcaagtcagccgaggaggtcaggcgctactacgagatgctggaggaggatgtcaagcacatcgagtccggcaaggtgcccctccccgcctaccgctgccccggcggcgccggcgccggcgccctcggctacgaggccgacaggatgaagcatctgaagatctaggcgaacttcagaggatggtcaagaagaggctgcgcaggcacacgtgtatatatgattgggatagcatgcatgtccatgctactcctacgcaagtggtctggaagaagcaagaagaatcagatgagatgcatgcatgtcataattaattaattaattaattaataattagtatggggatgatcgagtagtatcctagcctgtcacgcgagatcgaccgacccatcgatctcccagcatgtgtccttcgtacccacgcgcgtatgtgtattatatcctagctgcatctgtgtaccataccaatcagaaacatga

SEQ ID NO: 1152 - protein, 100 aa, Panicum virgatum
  misc_feature (12)..(61): Pfam Name: Myb_DNA-binding Pfam Description: Myb-like DNA-binding domain
  misc_feature: Ceres Clone ID no. 1910072
  misc_feature: Bit score of 203.3 for HMM based on sequences of Figure 22
  misc_feature: Functional Homolog Of SEQ ID NO. 1137
MASLSMTSSSVRAQWTKKQNKLFEQALAVYDKDTPDRWHNIARAVGGKSAEEVRRYYEMLEEDVKHIESGKVPLPAYRCPGGAGAGALGYEADRMKHLKI

SEQ ID NO: 1153 - DNA, 752 bp, Panicum virgatum
  misc_feature: Ceres Clone ID no. 1761808
  misc_feature: Encodes the peptide sequence at SEQ ID NO. 1154
atcagctcatcacagctcttgatctctagctagctagagagataagcttcctctcttcctctcggtcgagggagtgatcctctctcactctcaccaggagctcagctcgggtagctcaaggaggccagaagaagaaatggcgtcgctgtcgatgaccagcagctcggtgcgggcgcagaggacgaagaagcagaacaagctcttcgagcaggcgttggccgtgtacgacaaggacacccccgaccggtggcacaacatcgcccgcgccgtcggcggcaagtccgccgaggaggtcaggcgctactacgagctgctggaggaggatgtcaagcacatcgagtccggcaaggtgcccctccccgcctaccgctgccccggcggcgccggcgccggcgccctcggctacgaggccgacaggatgaagcatctgaagatctaggcgaacttcaaaggatggtcgagaagaggctgcgcaggcacgtgtatatatgattgggatagcatgcatgtccatgctactcctacgcaagtggtctggaagaagcaagaagaatcagatgagatgcatgcatgtcataattaattaataattagtatgggatgatcgagtagtatcctagcctgtcacgcgagatcgaccgacccatcgatctcccagcatgtgtccttcgtacccacgcgcgtatgtgtattatatcctagctgcatctgtgtaccataccaatcaagaaacatgaacttgatattgatgc

SEQ ID NO: 1154 - protein, 100 aa, Panicum virgatum
  misc_feature (12)..(61): Pfam Name: Myb_DNA-binding Pfam Description: Myb-like DNA-binding domain
  misc_feature: Ceres Clone ID no. 1761808
  misc_feature: Bit score of 195.8 for HMM based on sequences of Figure 22
  misc_feature: Functional Homolog Of SEQ ID NO. 1137
MASLSMTSSSVRAQRTKKQNKLFEQALAVYDKDTPDRWHNIARAVGGKSAEEVRRYYELLEEDVKHIESGKVPLPAYRCPGGAGAGALGYEADRMKHLKI

SEQ ID NO: 1155 - DNA, 267 bp, Sorghum bicolor
  misc_feature: Ceres Annot ID no. 8734209
  misc_feature: Encodes the peptide sequence at SEQ ID NO. 1156
atggcgtcgatgcagtcgatgacgagcgcagcggcgcgcgcgcagtggacgccgaagcagaacaagctgttcgagcaggcgctggccgtttacgacaaggacacgccggaccggtggcacaacatcgcccgcgccgtcggcggcggcaagtccgccgaggacgtcaggcgctactacgacctgctggaggaggacgtcggccacatcgagtccggcaaggtgcccttcccggcctaccgctgcgccaccggctacggggccgcctga

SEQ ID NO: 1156 - protein, 88 aa, Sorghum bicolor
  misc_feature (13)..(63): Pfam Name: Myb_DNA-binding Pfam Description: Myb-like DNA-binding domain
  misc_feature: Ceres Annot ID no. 8734209
  misc_feature: Bit score of 172.9 for HMM based on sequences of Figure 22
  misc_feature: Functional Homolog Of SEQ ID NO. 1137
MASMQSMTSAAARAQWTPKQNKLFEQALAVYDKDTPDRWHNIARAVGGGKSAEDVRRYYDLLEEDVGHIESGKVPFPAYRCATGYGAA

SEQ ID NO: 1157 - protein, 85 aa, Oryza sativa subsp. indica
  misc_feature (11)..(60): Pfam Name: Myb_DNA-binding Pfam Description: Myb-like DNA-binding domain
  misc_feature: Public GI ID no. 125526974
  misc_feature: Bit score of 159.4 for HMM based on sequences of Figure 22
  misc_feature: Functional Homolog Of SEQ ID NO. 1137
MASMSVSSSRAPQWTARQNEQFERALAVYDRDTPERWHNIARAVAGKSADEVKLYYDLLVEDVKRIETGKVPFPAYRCPPPAIAG

SEQ ID NO: 1158 - protein, 85 aa, Oryza sativa subsp. japonica
  misc_feature (11)..(60): Pfam Name: Myb_DNA-binding Pfam Description: Myb-like DNA-binding domain
  misc_feature: Public GI ID no. 115438765
  misc_feature: Bit score of 158.2 for HMM based on sequences of Figure 22
  misc_feature: Functional Homolog Of SEQ ID NO. 1137
MASMSVSSSRAPQWTARQNEQFERALAVYDRDTPERWHNIARAVAGKSADEVKLYYDLLVEDVKRIETGKVPFPAYRCPQPAIAG

SEQ ID NO: 1159 - DNA, 747 bp, Zea mays
  misc_feature: Ceres Clone ID no. 1523182
  misc_feature: Encodes the peptide sequence at SEQ ID NO. 1160
gctcagcatacacaacatcatcatcatcatcttctcgctagtcgagcgagcccttatagttaattaagctagtcgatcgatccaagagaagaagaagcagcagacaggaatggcgtcgctctcgatgacgacgagcgcagcggcccgcgcgcagtggacgcctaggcagaacaagctgttcgagcaggcgctggcggtgtacgacaaggacacgcccgaccgctggcacaacatcgcctgcgccgtcggcggcgggaagtccgcggacgacgtcaggcgctactacgagctgctggaggaggacgtcggccacatcgagtccggcaaggtgcccttccccgcctaccgctaccccgccggctacggggccgccgacaggctgaaacagctgaagatctaggaggtcaattgaacatataggacgaacgatcgatgatccagaagatgcaaacatgtgtgtatataggattaatgggacagtatcagtatgcatgcaatggtccatgctgcaagtgcatgcaagtggtgtgtgaaagcaagaatcagattagatgcatgcatatgcatgtgttaatttagtagtaataattgtagtatgggatgagtcctatactagccagtcacgcgcgatcgaccgaccgacccatcgatctccaatgcttctgttccctctccctcctacttgtccacttgtgtgtatatataaatattatgtatttttattattatatatactctacctgttct

SEQ ID NO: 1160 - protein, 96 aa, Zea mays
  misc_feature (13)..(63): Pfam Name: Myb_DNA-binding Pfam Description: Myb-like DNA-binding domain
  misc_feature: Ceres Clone ID no. 1523182
  misc_feature: Bit score of 187.3 for HMM based on sequences of Figure 22
  misc_feature: Functional Homolog Of SEQ ID NO. 1137
MASLSMTTSAAARAQWTPRQNKLFEQALAVYDKDTPDRWHNIACAVGGGKSADDVRRYYELLEEDVGHIESGKVPFPAYRYPAGYGAADRLKQLKI

SEQ ID NO: 1161 - DNA, 297 bp, Populus balsamifera subsp. trichocarpa
  misc_feature: Ceres Annot ID no. 1450327
  misc_feature: Encodes the peptide sequence at SEQ ID NO. 1162
atggcatcaagctccgtgtcctctcgcggttcgggctcgtggactgctcagcagaacaaagcctttgaaagggctttggctgtttatgacagggacacacccgaccgttggcataatgtagccagggcagttggtggaaaaactgctgaagaagtgaaaaggcattacgaaatcctcgtggaggatgtcaagcatattgagtcaggccgagttcccttccctaattacaggactaccggggcaaatggccactcaaagactggtgaggaaaagatgtatatatatagcagtttataa

SEQ ID NO: 1162 - protein, 98 aa, Populus balsamifera subsp. trichocarpa
  misc_feature (11)..(60): Pfam Name: Myb_DNA-binding Pfam Description: Myb-like DNA-binding domain
  misc_feature: Ceres Annot ID no. 1450327
  misc_feature: Bit score of 169.6 for HMM based on sequences of Figure 22
  misc_feature: Functional Homolog Of SEQ ID NO. 1137
MASSSVSSRGSGSWTAQQNKAFERALAVYDRDTPDRWHNVARAVGGKTAEEVKRHYEILVEDVKHIESGRVPFPNYRTTGANGHSKTGEEKMYIYSSL

SEQ ID NO: 1163 - DNA, 508 bp, Arabidopsis thaliana
  misc_feature: Ceres Clone ID no. 143475
  misc_feature: Encodes the peptide sequence at SEQ ID NO. 1164
aaaatcaagtcctttttcatcaagtcatacatacatcttccttcttctttttttctccctcccaagaagcagatcttgtactctcgatatacaaacttattcgtgatatggcttccaactcaatgagctctagcgcttcttggacacgtaaggagaacaaattatttgaaagggcgttggctacatatgaccaggacactcctgaccgttggcataacgttgcaagagccgttggcggcaaatcagctgaagaagtaaggcgacactacgagctcctcattagggatgtcaatgacattgagtcagggcgttatccacatcccaattaccgttcaaatggaaacaatcactgaaagcattgaaggaactccaaaaggctctactgaagtggacatggttccaaaaccattcacaaagcacatctaagcaaagatatctaaatgtatttacttgtttttgtgttacgaatatgtaagaattatctaaatcaatcaatgtggtttcatat

SEQ ID NO: 1164 - protein, 81 aa, Arabidopsis thaliana
  misc_feature (9)..(58): Pfam Name: Myb_DNA-binding Pfam Description: Myb-like DNA-binding domain
  misc_feature: Ceres Clone ID no. 143475
  misc_feature: Bit score of 175.7 for HMM based on sequences of Figure 22
  misc_feature: Functional Homolog Of SEQ ID NO. 1137
MASNSMSSSASWTRKENKLFERALATYDQDTPDRWHNVARAVGGKSAEEVRRHYELLIRDVNDIESGRYPHPNYRSNGNNH

SEQ ID NO: 1165 - DNA, 273 bp, Populus balsamifera subsp. trichocarpa
  misc_feature: Ceres Annot ID no. 1514100
  misc_feature: Encodes the peptide sequence at SEQ ID NO. 1166
atggcatcaagctcaatgtcctctcgcggttcgggctcgtggactgttcagcagaacaaagcctttgaaagggctttggctgtgtatgacagagacacgcccgatcgctggtacaatgtagccagggcagtcggtggaaaaaccgcagaagaagtgaaaaggcactatgaactgcttgtggaggatgtgaagcatattgagtcgggccatgttcccttccctaattacaggactaccggggcaaatggccacgcaagagacgggattgtttag

SEQ ID NO: 1166 - protein, 90 aa, Populus balsamifera subsp. trichocarpa
  misc_feature (11)..(60): Pfam Name: Myb_DNA-binding Pfam Description: Myb-like DNA-binding domain
  misc_feature: Ceres Annot ID no. 1514100
  misc_feature: Bit score of 162.5 for HMM based on sequences of Figure 22
  misc_feature: Functional Homolog Of SEQ ID NO. 1137
MASSSMSSRGSGSWTVQQNKAFERALAVYDRDTPDRWYNVARAVGGKTAEEVKRHYELLVEDVKHIESGHVPFPNYRTTGANGHARDGIV

SEQ ID NO: 1167 - DNA, 336 bp, Populus balsamifera subsp. trichocarpa
  misc_feature: Ceres Annot ID no. 1460832
  misc_feature: Encodes the peptide sequence at SEQ ID NO. 1168
atggcatcaagctcaatgtcctctcgcggttcgggctcgtggactgttcagcagaacaaagcctttgaaagggctttggctgtgtatgacagagacacgcccgatcgctggtacaatgtagccagggcagtcggtggaaaaaccgcagaagaagtgaaaaggcactatgaactgcttgtggaggatgtgaagcatattgagtcgggccatgttcccttccctaattacaggactaccggggcaaatggccacgcaagagctaaccatatcatgccacaattaaaggtagctaaatctaatcaagtggggtgtcatggagtcactgctactgtctaa

SEQ ID NO: 1168 - protein, 111 aa, Populus balsamifera subsp. trichocarpa
  misc_feature (11)..(60): Pfam Name: Myb_DNA-binding Pfam Description: Myb-like DNA-binding domain
  misc_feature: Ceres Annot ID no. 1460832
  misc_feature: Bit score of 170.2 for HMM based on sequences of Figure 22
  misc_feature: Functional Homolog Of SEQ ID NO. 1137
MASSSMSSRGSGSWTVQQNKAFERALAVYDRDTPDRWYNVARAVGGKTAEEVKRHYELLVEDVKHIESGHVPFPNYRTTGANGHARANHIMPQLKVAKSNQVGCHGVTATV

SEQ ID NO: 1169 - protein, 96 aa, Vitis vinifera
  misc_feature (7)..(56): Pfam Name: Myb_DNA-binding Pfam Description: Myb-like DNA-binding domain
  misc_feature: Public GI ID no. 147767321
  misc_feature: Bit score of 150.6 for HMM based on sequences of Figure 22
  misc_feature: Functional Homolog Of SEQ ID NO. 1137
MSSRSSGSSWTAKQNKAFEEALAVYDKDTPDRWYNVARAVGGKTVEEVKRHYEILVEDIKSIDSDKVPFPNYKTTGASSRSNMSDQEKRMMNLKLR

SEQ ID NO: 1170 - DNA, 563 bp, Musa acuminata
  misc_feature: Ceres Clone ID no. 1723374
  misc_feature: Encodes the peptide sequence at SEQ ID NO. 1171
acacagatcagctagctccaccagagaagcaaagcaaacccttcttccctgagatggcatccggttcgatgagctcctcctggaccgcgaaggagaacaagatgttcgagaaggcactggcggtgtacgacagggacacccccgaccgctggcacaagatcgcccgggccatcggcgggaagacggcggacgaagtgaagcgctactacgacctgctcgtggaggacgtgcgccgcatcgaggctggccaaatgccgtacgccaattaccggtcctctaatggcagaggttgagagtgtttggagctcaaccggagaacgaacaagaagcaaggagcatttcactgttctggatatcagttaccacaatcttaattataggactatatgaactctacatgtctgtggacttacaagtagtttcttctatgcagtcttctttctcccttctatcgtgtactcccagatatatcgaagactgccatcataaacatatatatggctagtcttcttgtaatcggttatcttgcttgctaatgaacgcttagtattgttctattctag

SEQ ID NO: 1171 - protein, 79 aa, Musa acuminata
  misc_feature (7)..(56): Pfam Name: Myb_DNA-binding Pfam Description: Myb-like DNA-binding domain
  misc_feature: Ceres Clone ID no. 1723374
  misc_feature: Bit score of 145.4 for HMM based on sequences of Figure 22
  misc_feature: Functional Homolog Of SEQ ID NO. 1137
MASGSMSSSWTAKENKMFEKALAVYDRDTPDRWHKIARAIGGKTADEVKRYYDLLVEDVRRIEAGQMPYANYRSSNGRG

SEQ ID NO: 1172 - DNA, 237 bp, Populus balsamifera subsp. trichocarpa
  misc_feature: Ceres Annot ID no. 1510450
  misc_feature: Encodes the peptide sequence at SEQ ID NO. 1173
atgtcttccaattctctcacctcttggacacctaagcaaaacaaactattcgaaaaggccctggctttacatgacaaggacacccctgaccgctggcataatgttgccaaagctgtgggtgggaaatctgcagaggaagtgaagaggcactatgagattctcatcaaggatgtcagggaaattgagtctggcagagttccattccctaattacaggtcaagtggaaacggcaactaa

SEQ ID NO: 1173 - protein, 78 aa, Populus balsamifera subsp. trichocarpa
  misc_feature (6)..(55): Pfam Name: Myb_DNA-binding Pfam Description: Myb-like DNA-binding domain
  misc_feature: Ceres Annot ID no. 1510450
  misc_feature: Bit score of 164.2 for HMM based on sequences of Figure 22
  misc_feature: Functional Homolog Of SEQ ID NO. 1137
MSSNSLTSWTPKQNKLFEKALALHDKDTPDRWHNVAKAVGGKSAEEVKRHYEILIKDVREIESGRVPFPNYRSSGNGN

SEQ ID NO: 1174 - DNA, 339 bp, Populus balsamifera subsp. trichocarpa
  misc_feature: Ceres Annot ID no. 1457249
  misc_feature: Encodes the peptide sequence at SEQ ID NO. 1175
atgtcttccaattctctcacctcttggacacctaagcaaaacaaactattcgaaaaggccctggctttacatgacaaggacacccctgaccgctggcataatgttgccaaagctgtgggtgggaaatctgcagaggaagtgaagaggcactatgagattctcatcaaggatgtcagggaaattgagtctggcagagttccattccctaattacagattaatgtcatatacaagtattaaagcatcatttaagccaggatacaggcaacgtagatttctgatctttcaggacaaattccatgggaatggtcaatcaaattctgcaccgtcattcgcctaa

SEQ ID NO: 1175 - protein, 112 aa, Populus balsamifera subsp. trichocarpa
  misc_feature (6)..(55): Pfam Name: Myb_DNA-binding Pfam Description: Myb-like DNA-binding domain
  misc_feature: Ceres Annot ID no. 1457249
  misc_feature: Bit score of 160.6 for HMM based on sequences of Figure 22
  misc_feature: Functional Homolog Of SEQ ID NO. 1137
MSSNSLTSWTPKQNKLFEKALALHDKDTPDRWHNVAKAVGGKSAEEVKRHYEILIKDVREIESGRVPFPNYRLMSYTSIKASFKPGYRQRRFLIFQDKFHGNGQSNSAPSFA

SEQ ID NO: 1176 - protein, 102 aa, Vitis vinifera
  misc_feature (13)..(62): Pfam Name: Myb_DNA-binding Pfam Description: Myb-like DNA-binding domain
  misc_feature: Public GI ID no. 157335318
  misc_feature: Bit score of 160.9 for HMM based on sequences of Figure 22
  misc_feature: Functional Homolog Of SEQ ID NO. 1137
MASHAFSSSCYSSSSWTQKQNKLFEEALALYDKNTPDRWANIAKAVGGKSAEEVKRHYEILEQDVMHIENGQVPLPIYRSTGSSSGGSVDEQRHLLKNLKLR

SEQ ID NO: 1177 - protein, 92 aa, Medicago truncatula
  misc_feature (9)..(58): Pfam Name: Myb_DNA-binding Pfam Description: Myb-like DNA-binding domain
  misc_feature: Public GI ID no. 124360540
  misc_feature: Bit score of 152.0 for HMM based on sequences of Figure 22
  misc_feature: Functional Homolog Of SEQ ID NO. 1137
MASSSMSASGSWSVKENKAFERALAVYDKDTPDRWYNVAHAVGGKTPEEVKKHYELLVEDIKHIESGKVPFPNYKKISVSHEEKRMRNMSLH

SEQ ID NO: 1178 - DNA, 505 bp, Gossypium hirsutum
  misc_feature: Ceres Clone ID no. 100002959
  misc_feature: Encodes the peptide sequence at SEQ ID NO. 1179
  misc_feature (24)..(24): n is a, c, t, g, unknown, or other
cattccaaattttgattattttcnttcttttttattttttttatttaaaatttgaaactgctaacattattacattttcattagcctcaagagaagaaaaaaaaatgtcatcgaattcaatgtctgcttcatggacagccaagcaaaacaaagatttcgaaagggctttagctgtttacgacaaggacacaccagatcgttggtacaatgttgctaaagctgtgggagggaaaactgttgaggaagtgaagaagcactatgagcttcttctggaagatgttagacacatcgagtcgggtcgggttcctttccccgactattggaccgttaccgggaatcgtcaagcatgaaagattccgaagctcaaatgaagaagaaaaaatggtggacttgcatggatctcacccttatatgtgtgtgtgtgtgtgtggcagtaattgtagtacttaagaatagccataaatgtatttaggaagaggaagaagagcttaatgggtgatcattg

SEQ ID NO: 1179 - protein, 81 aa, Gossypium hirsutum
  misc_feature (7)..(56): Pfam Name: Myb_DNA-binding Pfam Description: Myb-like DNA-binding domain
  misc_feature: Ceres Clone ID no. 100002959
  misc_feature: Bit score of 144.7 for HMM based on sequences of Figure 22
  misc_feature: Functional Homolog Of SEQ ID NO. 1137
MSSNSMSASWTAKQNKDFERALAVYDKDTPDRWYNVAKAVGGKTVEEVKKHYELLLEDVRHIESGRVPFPDYWTVTGNRQA

SEQ ID NO: 1180 - protein, 75 aa, Vitis vinifera
  misc_feature (9)..(58): Pfam Name: Myb_DNA-binding Pfam Description: Myb-like DNA-binding domain
  misc_feature: Public GI ID no. 147784500
  misc_feature: Bit score of 137.4 for HMM based on sequences of Figure 22
  misc_feature: Functional Homolog Of SEQ ID NO. 1137
MASTSLKSSGSWTPKQNKLFEKALALYDRDTPDRWQNVANAVGGKSAEEVKQHYEILIRDLKHIESGRVPIPNYK

SEQ ID NO: 1181 - protein, 96 aa, Vitis vinifera
  misc_feature (9)..(58): Pfam Name: Myb_DNA-binding Pfam Description: Myb-like DNA-binding domain
  misc_feature: Public GI ID no. 157340812
  misc_feature: Bit score of 153.5 for HMM based on sequences of Figure 22
  misc_feature: Functional Homolog Of SEQ ID NO. 1137
MASGSRMGSGLWTSKQNKLFEKALALYDKDTPDRWQNVAKAVGGKSAEEVKRHYEILIEDLKHIESGHVPIPNYKSTGSNSIGDQEQRLLKCIKLQ

SEQ ID NO: 1182 - DNA, 729 bp, Glycine max
  misc_feature: Ceres Clone ID no. 477814
  misc_feature: Encodes the peptide sequence at SEQ ID NO. 1183
atcaactcttccttgagtctgatcactatatacacactactcttcagccttttcatatttcataacacccctttgctaccaaaccaattcagtgatctttttgctttgctctttcctgagtttgaaaaccttagaaccatttcagtacacaacactttctgttccttaatggcatccagttcaatctcagcctctggctcatggagtgttaaggacaacaaggcctttgaaaaggctttagctgtttatgacaaggacactcctgaccgttggtacaatgttgctcatgctgttggtggcaaaactccagaggaagtgaaaaggcactacgaactccttgttcaggatgttaagcatattgagtctggacgtgtgccattcccaaattacaagaaaactacttcagggtcaactgatcaggaggaaaaaaggctgaggaatttgaatttgaacctccagtgacccccctcaagaacaacaaattgattttctaattttcatatcaaccaacatcattaatttccagcatccctggtagtactacgtggtgttatgtcacacataattgctagtgcaatagcatcttaggctatattagtcatcataagaatcatatgtcccgtgattccatctggtactttcttgtcgttgaagcttcctcttgaaagggtcaacgaccgtttcagttcctcatcgtcctaaataaatttataattttataatatgctg

SEQ ID NO: 1183 - protein, 97 aa, Glycine max
  misc_feature (9)..(58): Pfam Name: Myb_DNA-binding Pfam Description: Myb-like DNA-binding domain
  misc_feature: Ceres Clone ID no. 477814
  misc_feature: Bit score of 153.1 for HMM based on sequences of Figure 22
  misc_feature: Functional Homolog Of SEQ ID NO. 1137
MASSSISASGSWSVKDNKAFEKALAVYDKDTPDRWYNVAHAVGGKTPEEVKRHYELLVQDVKHIESGRVPFPNYKKTTSGSTDQEEKRLRNLNLNLQ

SEQ ID NO: 1184 - DNA, 602 bp, Panicum virgatum
  misc_feature: Ceres Clone ID no. 1785685
  misc_feature: Encodes the peptide sequence at SEQ ID NO. 1185
atcgcaaccatttcaaaacttcctttccctccaccagttacatcactagctagactagacgcacacacctccgagggagacaatcaaggaccctgctgccatggcgtccaactcgaccaagctgggctcttcgtcgtcgtccgagtggacgcggggggaggacaagatgttcgagcgcgccctggcggtgtacgacacggacaccccggaccggtggcacaacgtggcgcgctacatgggcggcaccaagtccgtcgaggaggtgcgccgccactaccagctgctcgtccgcgacgtcgcgcagatcgagtccggcagggtgccgttccactggtacgccgccgcgccgccgccgcggacactgcagcgaggttgaaggcttgaagtatatatctgagcttcaatgaagaaggggacggattgcacagtggctagctgtgctcctcgaagaaaaagatttataaattttgcatgtatatgtgcatgtgtgcgcgttgaatggaaatggcaaagctagctaggacatcgagattaatgtccggtctgctgctctttaatcttgtgtaccaagtccagcttttgatctatatggatcgaattat

SEQ ID NO: 1185 - protein, 91 aa, Panicum virgatum
  misc_feature (13)..(63): Pfam Name: Myb_DNA-binding Pfam Description: Myb-like DNA-binding domain
  misc_feature: Ceres Clone ID no. 1785685
  misc_feature: Bit score of 129.1 for HMM based on sequences of Figure 22
  misc_feature: Functional Homolog Of SEQ ID NO. 1137
MASNSTKLGSSSSSEWTRGEDKMFERALAVYDTDTPDRWHNVARYMGGTKSVEEVRRHYQLLVRDVAQIESGRVPFHWYAAAPPPRTLQRG

SEQ ID NO: 1186 - DNA, 469 bp, Glycine max
  misc_feature: Ceres Clone ID no. 1653552
  misc_feature: Encodes the peptide sequence at SEQ ID NO. 1187
aacacatcagctcttccttgagtctgatcactacacactactcttcagccttttcatatcaccctttgctaccaaaccaattcagtctctttgcttgttctacctgagtttgaaacgtaaccttagaaccatttcacacaacactttctgttccttaattcctgaaagaaaatggcatcttgttcaatctcagcctcaggctcatggagtgttaaggacaacaaggcctttgaaaaggctctagctgtttatgacaaggacacccctgaccgttggtacaatgttgctcatgctgttggcggcaaaactccagaggaagtgaagaggcactacgaactccttgttcaggatgttaagcatattgagtcaggacgtgttccattcccaaattacaagaaaactacttcagagtcaactgatcaggaggaaaaaaggctgaggaatttgaatttgaacctccagtgacccc

SEQ ID NO: 1187 - protein, 97 aa, Glycine max
  misc_feature (9)..(58): Pfam Name: Myb_DNA-binding Pfam Description: Myb-like DNA-binding domain
  misc_feature: Ceres Clone ID no. 1653552
  misc_feature: Bit score of 153.3 for HMM based on sequences of Figure 22
  misc_feature: Functional Homolog Of SEQ ID NO. 1137
MASCSISASGSWSVKDNKAFEKALAVYDKDTPDRWYNVAHAVGGKTPEEVKRHYELLVQDVKHIESGRVPFPNYKKTTSESTDQEEKRLRNLNLNLQ

SEQ ID NO: 1188 - protein, 97 aa, Glycine max
  misc_feature (9)..(58): Pfam Name: Myb_DNA-binding Pfam Description: Myb-like DNA-binding domain
  misc_feature: Public GI ID no. 110931736
  misc_feature: Bit score of 153.9 for HMM based on sequences of Figure 22
  misc_feature: Functional Homolog Of SEQ ID NO. 1137
  misc_feature (94)..(94): Xaa is any aa, unknown, or other
MASCSISASGSWSVKDNKAFEKALAVYDKDTPDRWYNVAHAVGGKTPEEVKRHYELLVQDVKHIESGRVPFPNYKKTTSESTDQEEKRLRNLNXNLQ

SEQ ID NO: 1189 - DNA, 458 bp, Glycine max
  misc_feature: Ceres Clone ID no. 638126
  misc_feature: Encodes the peptide sequence at SEQ ID NO. 1190
tttatcagtcatggcgtcaagctctctcagcaaacaaaaggcttctgactcctcttggacaccaaaacagaacaagctgtttgaaaaagcacttgcaaaatatgacaaggatacccctgaccgatggcagaatgtagccaaagcagtaggtggaaaatctgcagatgaagttaagagacactatgaaatcctcttggaggatctgagacacattgagtctggtcatgttcctcttcccaagtacaagtccacaggaagcagcaccaatgttgaggaagaagagaggcttctgaagtatcttaaactgaattgatggaagcaatgtttatgttatcctcagctattggcagaatttatgtggccatccttgaatctgcggaaatatcttccctctctgttctatttcctgccattgtaatttagattgtttcaaatttcaatgaattatcctattctag

SEQ ID NO: 1190 - protein, 100 aa, Glycine max
  misc_feature (13)..(62): Pfam Name: Myb_DNA-binding Pfam Description: Myb-like DNA-binding domain
  misc_feature: Ceres Clone ID no. 638126
  misc_feature: Bit score of 157.6 for HMM based on sequences of Figure 22
  misc_feature: Functional Homolog Of SEQ ID NO. 1137
MASSSLSKQKASDSSWTPKQNKLFEKALAKYDKDTPDRWQNVAKAVGGKSADEVKRHYEILLEDLRHIESGHVPLPKYKSTGSSTNVEEEERLLKYLKLN

SEQ ID NO: 1191 - DNA, 381 bp, Arabidopsis thaliana
  misc_feature: Ceres Annot ID no. 838426
  misc_feature: Encodes the peptide sequence at SEQ ID NO. 1192
atggcgtcaaactcaagaagttcaatctcaccatggacgtttagtcaaaacaagatgttcgagagggccttggcagtttacgacaaggacacacccgaccgatggcacaatgtggcaaaagctgtcggagggaaaactgtagaagaagtgaagcgccactatgacattctcgtcgaggatctcatcaacatcgagactggtcgtgtccctttgcccaattacaagaccttcgaatctaactcaagaagcatcaatgactttgacacaaggtatataactaaatatctatatatgatgctctcgatatattttgataatcattctagtgattttgagaaattctctcaaaaagttcttgtaagttatatttctttggtttaa

SEQ ID NO: 1192 - protein, 126 aa, Arabidopsis thaliana
  misc_feature (9)..(58): Pfam Name: Myb_DNA-binding Pfam Description: Myb-like DNA-binding domain
  misc_feature: Ceres Annot ID no. 838426
  misc_feature: Bit score of 141.1 for HMM based on sequences of Figure 22
  misc_feature: Functional Homolog Of SEQ ID NO. 1137
MASNSRSSISPWTFSQNKMFERALAVYDKDTPDRWHNVAKAVGGKTVEEVKRHYDILVEDLINIETGRVPLPNYKTFESNSRSINDFDTRYITKYLYMMLSIYFDNHSSDFEKFSQKVLVSYISLV

SEQ ID NO: 1193 - protein, 97 aa, Arabidopsis thaliana
  misc_feature (9)..(58): Pfam Name: Myb_DNA-binding Pfam Description: Myb-like DNA-binding domain
  misc_feature: Public GI ID no. 145327247
  misc_feature: Bit score of 144.4 for HMM based on sequences of Figure 22
  misc_feature: Functional Homolog Of SEQ ID NO. 1137
MASNSRSSISPWTFSQNKMFERALAVYDKDTPDRWHNVAKAVGGKTVEEVKRHYDILVEDLINIETGRVPLPNYKTFESNSRSINDFDTRKMKNLKI

SEQ ID NO: 1194 - protein, 85 aa, Bournea leiophylla
  misc_feature (5)..(54): Pfam Name: Myb_DNA-binding Pfam Description: Myb-like DNA-binding domain
  misc_feature: Public GI ID no. 124264312
  misc_feature: Bit score of 136.7 for HMM based on sequences of Figure 22
  misc_feature: Functional Homolog Of SEQ ID NO. 1137
MSSRSRNWTAKENKAFEQALAVYDKDTPDRWVNVAKAVPGRTVEEVKRHYEILVEDVKSIESGKVPFPNYRTIRESGSMKNDEQR

SEQ ID NO: 1195 - DNA, 1123 bp, Gossypium hirsutum
  misc_feature: Ceres Clone ID no. 1847251
  misc_feature: Encodes the peptide sequence at SEQ ID NO. 1196
ataccactcccttaacttcaaacaaaatcttcttttaagagtcccttccatcaccttgctttcacattcaggcacctgcatacttcttttaacttttcagccctataattctctcacttaagattttcaccaatggcatctaattctctcacttcctcacgtacctctggctcgtcctggacggcaaagcaaaacaaactgttcgagaaggctctggctaaatatgacaaagacactcctgaccgctggcataacattgccaaggctgtgggtggaaagtcagttgaggaagtcaagctgcactatgagatcctagtcagggatctcaaagacattgagtctggccgctacccttatccatatccaaccaactaaagcgctatgagtttactacttactattcactacctatccacaatcactatagataaccaagaagtgaaggccactttcatatgcatgaatcacattcctaaaaatgcagctgtcatgcttttttgttgatgtagttgtggatttaaagaaaacgtggttcttagaattatcatacatgcgcatatccatgacgtccttgtccttccagctccacacacccacaaccccaaagtccttaagcattgaaaactctcaagtacccaagtgggtccataaaagaaaatccagaaaagtagggaatcttcatgtgcctcccccccccccccccaaatttctttctgtggtctatcactttaaatttttttcctttttccactgagcatatacagttcatttgcatttaatgttcttatagacctaattccttacaattactcaatcctaatctcaaatctttcgactctttttgtctttttggattttggacaacatgccgatggtacttttgtcatttccaacatattttatcttaattatctgcatttgtttttctcacaggagcaaatcaataaattccgtttctagagacttaacttgtcctacttgtctttcaggttagctgaagactatgaatatatatatgcatctagagacctcagttgctgagagactagcctagttccccacctaaagaaatccatacaaaactaattatcccattggtgtaatactaaatgctgttactacc

SEQ ID NO: 1196 - protein, 80 aa, Gossypium hirsutum
  misc_feature (13)..(62): Pfam Name: Myb_DNA-binding Pfam Description: Myb-like DNA-binding domain
  misc_feature: Ceres Clone ID no. 1847251
  misc_feature: Bit score of 140.8 for HMM based on sequences of Figure 22
  misc_feature: Functional Homolog Of SEQ ID NO. 1137
MASNSLTSSRTSGSSWTAKQNKLFEKALAKYDKDTPDRWHNIAKAVGGKSVEEVKLHYEILVRDLKDIESGRYPYPYPTN

SEQ ID NO: 1197 - DNA, 303 bp, Arabidopsis thaliana
  misc_feature: Ceres Annot ID no. 543794
  misc_feature: Encodes the peptide sequence at SEQ ID NO. 1198
atggcctctagttctatgagctcgagctcttcttggacgtctaagcaaaacaagatgttcgagagggctttagccgtttacgataaagacactcccgaccgttggcaaaacgtggctaaagcagttggaagtaaatctgcagaggaagttaaacgtcactacgacatcctcgttgaagatctcatgaacatcgaacaagacttagtacctttgcctaaatacaaaaccgtcgatgttggaagtaaatctagaggcatcgatgattttgatttgaggttaatgaagaatatgagaatccagtga

SEQ ID NO: 1198 - protein, 100 aa, Arabidopsis thaliana
  misc_feature (9)..(58): Pfam Name: Myb_DNA-binding Pfam Description: Myb-like DNA-binding domain
  misc_feature: Ceres Annot ID no. 543794
  misc_feature: Bit score of 138.7 for HMM based on sequences of Figure 22
  misc_feature: Functional Homolog Of SEQ ID NO. 1137
MASSSMSSSSSWTSKQNKMFERALAVYDKDTPDRWQNVAKAVGSKSAEEVKRHYDILVEDLMNIEQDLVPLPKYKTVDVGSKSRGIDDFDLRLMKNMRIQ

SEQ ID NO: 1199 - DNA, 294 bp, Arabidopsis thaliana
  misc_feature: Ceres Annot ID no. 850366
  misc_feature: Encodes the peptide sequence at SEQ ID NO. 1200
atggcatcaagctcaatgtcttctcagagctctggctcgtggactgctaagcagaacaaagcctttgagcaggctctagcaacctatgaccaggacactcctaaccgttggcaaaatgttgccaaagtcgtgggtggaaaaacaacagaggaggtaaagagacactacgaactcttagtgcaagacatcaacagcatagagaacggtcatgttccattcccaaactacaggactagtggaggctgcactaatggcaggcttagtcaggaggaaaaaaggtatgtattgtcctaa

SEQ ID NO: 1200 - protein, 97 aa, Arabidopsis thaliana
  misc_feature (11)..(60): Pfam Name: Myb_DNA-binding Pfam Description: Myb-like DNA-binding domain
  misc_feature: Ceres Annot ID no. 850366
  misc_feature: Bit score of 152.5 for HMM based on sequences of Figure 22
  misc_feature: Functional Homolog Of SEQ ID NO. 1137
MASSSMSSQSSGSWTAKQNKAFEQALATYDQDTPNRWQNVAKVVGGKTTEEVKRHYELLVQDINSIENGHVPFPNYRTSGGCTNGRLSQEEKRYVLS

SEQ ID NO: 1201 - protein, 100 aa, Arabidopsis thaliana
  misc_feature (11)..(60): Pfam Name: Myb_DNA-binding Pfam Description: Myb-like DNA-binding domain
  misc_feature: Public GI ID no. 145356202
  misc_feature: Bit score of 152.5 for HMM based on sequences of Figure 22
  misc_feature: Functional Homolog Of SEQ ID NO. 1137
MASSSMSSQSSGSWTAKQNKAFEQALATYDQDTPNRWQNVAKVVGGKTTEEVKRHYELLVQDINSIENGHVPFPNYRTSGGCTNGRLSQEEKRMRNMRLQ

SEQ ID NO: 1202 - DNA, 312 bp, Sorghum bicolor
  misc_feature: Ceres Annot ID no. 8734211
  misc_feature: Encodes the peptide sequence at SEQ ID NO. 1203
atggcttccggcgggtcgtcgtcgtcgtcgtcccgggcgtggacgcagcggcagaacaagcagttcgagtgcgcgctggcggtgtatgaccgggagacaccggaccggtggcacaacatcgcccgctacatgggcggcaccaagtccgccgacgaggtgcgccgccacttcgagcagctcgtccacgacgtcacccagatcgaggccggccgcgtccccttcccccgctacggctacggcagcgcgccgcccgccggcggcggcggccttgacgacaccagtgatgagctttattattggaaaggtagctag

SEQ ID NO: 1203 - protein, 103 aa, Sorghum bicolor
  misc_feature (11)..(61): Pfam Name: Myb_DNA-binding Pfam Description: Myb-like DNA-binding domain
  misc_feature: Ceres Annot ID no. 8734211
  misc_feature: Bit score of 127.4 for HMM based on sequences of Figure 22
  misc_feature: Functional Homolog Of SEQ ID NO. 1137
MASGGSSSSSSRAWTQRQNKQFECALAVYDRETPDRWHNIARYMGGTKSADEVRRHFEQLVHDVTQIEAGRVPFPRYGYGSAPPAGGGGLDDTSDELYYWKGS

SEQ ID NO: 1204 - DNA, 551 bp, Glycine max
  misc_feature: Ceres Clone ID no. 857342
  misc_feature: Encodes the peptide sequence at SEQ ID NO. 1205
aaaatcacagctctttaatttgtaacacttaattttcattgattgagtgtgtgttgctacaacaatggcctcaagccagggttggactccgaagcagaacaagagatttgagaatgcccttgccatcttcgacaaggacaccccagataggtggcacacggtggccagggccgtcggaggaaaaacggtggaggaagtgaaaaggcattatgagaagctcgtggaagatgtgaagaagatagaggaaggtcacgtgcccctccccaattaccgaagtgctgcaagaggctacggttacatggatgaagaaaccaggatgaaggctctgagtctgcagtgaagtgtgatttaccaataaataatatatgttggatgcttggcttagtaccataagatattttattcacttttttgttttttctttccatataatatataggcaaagcatcgttgccttgtgtttctgtttctataaatgtaaagatgaaattgtcccaaagacgggcccactagttaatagtaaaaacagccattgaatatcatattttcac

SEQ ID NO: 1205 - protein, 91 aa, Glycine max
  misc_feature (4)..(53): Pfam Name: Myb_DNA-binding Pfam Description: Myb-like DNA-binding domain
  misc_feature: Ceres Clone ID no. 857342
  misc_feature: Bit score of 132.6 for HMM based on sequences of Figure 22
  misc_feature: Functional Homolog Of SEQ ID NO. 1137
MASSQGWTPKQNKRFENALAIFDKDTPDRWHTVARAVGGKTVEEVKRHYEKLVEDVKKIEEGHVPLPNYRSAARGYGYMDEETRMKALSLQ

SEQ ID NO: 1206 - DNA, 306 bp, Arabidopsis thaliana
  misc_feature: Ceres Annot ID no. 827713
  misc_feature: Encodes the peptide sequence at SEQ ID NO. 1207
atggcatcaggctcaatgtcttcttatggctctggctcatggactgttaagcagaacaaagcctttgagcgtgctctagcagtctatgaccaagacactccggaccgttggcacaatgttgctagagctgttggtggtaaaacaccagaagaagctaagagacagtatgaccttctagttcgtgacatcgaaagcatcgagaatggtcacgtgccattccctgactacaagactactacaggaaacagcaacagaggcaggctgcgtgatgaggaaaagaggatgagaagcatgaagctgcagtga

SEQ ID NO: 1207 - protein, 101 aa, Arabidopsis thaliana
  misc_feature (11)..(60): Pfam Name: Myb_DNA-binding Pfam Description: Myb-like DNA-binding domain
  misc_feature: Ceres Annot ID no. 827713
  misc_feature: Bit score of 146.0 for HMM based on sequences of Figure 22
  misc_feature: Functional Homolog Of SEQ ID NO. 1137
MASGSMSSYGSGSWTVKQNKAFERALAVYDQDTPDRWHNVARAVGGKTPEEAKRQYDLLVRDIESIENGHVPFPDYKTTTGNSNRGRLRDEEKRMRSMKLQ

SEQ ID NO: 1208 - DNA, 518 bp, Glycine max
  misc_feature: Ceres Clone ID no. 1113584
  misc_feature: Encodes the peptide sequence at SEQ ID NO. 1209
aatcacacctctttaattagtaacacttaattttcattaccgtcgttttattaagtgtgtgttgctacaacaatggcctcaagtcagggttggactccgaagcagaacaagagatttgagaatgcccttgccatcttcgacaaggacaccccagacaggtggcacacggtggccagggccgtcggaggaaaaacggtggaggaagtgaaaaggcattatgagaagctcgtggaagatgtgaaggagattgaggaaggtcacgtgcccctccccaattaccgaagtgctgcaagaggccacggttacatggatgaagaaaacaggatgaaggttctgagtctgcagtgaagtgtgatttatcaataatatatataatatatgctggatgcttggcttagaactactataaaatattttatttgctttttcgttttttctttccatatatatatatattcaaagcatcgatgccttgtatttctgtttctataaatgtaaagatgaaatgaaattgtccc

SEQ ID NO: 1209 - protein, 91 aa, Glycine max
  misc_feature (4)..(53): Pfam Name: Myb_DNA-binding Pfam Description: Myb-like DNA-binding domain
  misc_feature: Ceres Clone ID no. 1113584
  misc_feature: Bit score of 134.0 for HMM based on sequences of Figure 22
  misc_feature: Functional Homolog Of SEQ ID NO. 1137
MASSQGWTPKQNKRFENALAIFDKDTPDRWHTVARAVGGKTVEEVKRHYEKLVEDVKEIEEGHVPLPNYRSAARGHGYMDEENRMKVLSLQ

SEQ ID NO: 1210 - protein, 93 aa, Antirrhinum majus
  misc_feature (8)..(57): Pfam Name: Myb_DNA-binding Pfam Description: Myb-like DNA-binding domain
  misc_feature: Public GI ID no. 118137433
  misc_feature: Bit score of 143.6 for HMM based on sequences of Figure 22
  misc_feature: Functional Homolog Of SEQ ID NO. 1137
MASTRGSGRPWSAKENKAFERALAVYDKDTPDRWANVARAVEGRTPEEVKKHYEILVEDIKYIESGKVPFPNYRTTGGNMKTDEKRFRNLKIR

SEQ ID NO: 1211 - DNA, 375 bp, Populus balsamifera subsp. trichocarpa
  misc_feature: Ceres Annot ID no. 1460824
  misc_feature: Encodes the peptide sequence at SEQ ID NO. 1212
atgtcttcaagctatcaagcttccagaaattctagatccgcttggacaccaagggaaaacaaactgtttgaaaaggcactagccttgtttgataaggacacaccggacaggtggcaaaatatagccaaagctgttggtggtgtgaaatctgccgaggaagtgaagaaacactatgaaatccttattgaagatcttcaacatatcgagtctggccgcattcctattcctaagtacaagtctagtggaagctgcaacaacacaaacgaagaggaaagtgaagttaataagaacaaactgcagatggcaactggcaatctccatattgactcattgagagtcctccaggatttcatggcagggtgtaatcaacattaa

SEQ ID NO: 1212 - protein, 124 aa, Populus balsamifera subsp. trichocarpa
  misc_feature (12)..(62): Pfam Name: Myb_DNA-binding Pfam Description: Myb-like DNA-binding domain
  misc_feature: Ceres Annot ID no. 1460824
  misc_feature: Bit score of 138.1 for HMM based on sequences of Figure 22
  misc_feature: Functional Homolog Of SEQ ID NO. 1137
MSSSYQASRNSRSAWTPRENKLFEKALALFDKDTPDRWQNIAKAVGGVKSAEEVKKHYEILIEDLQHIESGRIPIPKYKSSGSCNNTNEEESEVNKNKLQMATGNLHIDSLRVLQDFMAGCNQH

SEQ ID NO: 1213 - DNA, 279 bp, Populus balsamifera subsp. trichocarpa
  misc_feature: Ceres Annot ID no. 1503394
  misc_feature: Encodes the peptide sequence at SEQ ID NO. 1214
atgtcttccagccatcaaactccaaggaattctagctcctcttggacaccaagggaaaacaaactgtttgaaaaggctctagccttgtttgataaggacacaccggaccggtggcaaaatatagccaaagctgttggtggcgtgaaatcagctgaggaaatgaagagacactacgaaatcctcattgaagatcttaaacatatcgagtccggccgtgttcctattcctaattacaagtccagtagaagctacagcaatacaaacgaagaagaaaggtaa

SEQ ID NO: 1214 - protein, 92 aa, Populus balsamifera subsp. trichocarpa
  misc_feature (12)..(62): Pfam Name: Myb_DNA-binding Pfam Description: Myb-like DNA-binding domain
  misc_feature: Ceres Annot ID no. 1503394
  misc_feature: Bit score of 134.2 for HMM based on sequences of Figure 22
  misc_feature: Functional Homolog Of SEQ ID NO. 1137
MSSSHQTPRNSSSSWTPRENKLFEKALALFDKDTPDRWQNIAKAVGGVKSAEEMKRHYEILIEDLKHIESGRVPIPNYKSSRSYSNTNEEER

SEQ ID NO: 1215 - DNA, 665 bp, Gossypium hirsutum
  misc_feature: Ceres Clone ID no. 1916884
  misc_feature: Encodes the peptide sequence at SEQ ID NO. 1216
acacaccgcaccttgacttgaagtaaccttttgagagaaaaagtccatctattcccttccatcatcgtttcaatttattcaacctttctctcaaattcagtcacaggcatatttattttaagttttagcctgccattcacccgagcttgtcgataaatcctctgttttcaatagttgcatttggattttcatcaaatggcatcccattctctcagttcttcacgtagctctaactcctcctggacacctaagcaaaacaaaatgttcgagaaggctctggctgaatttgaccaggacactcctgagcgctggattaatattgctaaagctgtgggtggaaagtcagctgaggaagtcaagcagcactatgagatcctagtcagggatgtcaaagagatcgagtctggacggtacccttatccatatccaagtgggagcagcaactaaagcagtgagttatcagcttaccgtatccaaagggttctctgaagggtcaaagatcatagtgaaagaacattatattatgcaaccagagacctcaattgcaggaagactattatagaatattccccaggaaaatattattatttgctttatttatctttttgtatttttctttgaccttgtctagttagattaaatgttaaatatattttattgatatt

SEQ ID NO: 1216 - protein, 83 aa, Gossypium hirsutum
  misc_feature (13)..(62): Pfam Name: Myb_DNA-binding Pfam Description: Myb-like DNA-binding domain
  misc_feature: Ceres Clone ID no. 1916884
  misc_feature: Bit score of 137.3 for HMM based on sequences of Figure 22
  misc_feature: Functional Homolog Of SEQ ID NO. 1137
MASHSLSSSRSSNSSWTPKQNKMFEKALAEFDQDTPERWINIAKAVGGKSAEEVKQHYEILVRDVKEIESGRYPYPYPSGSSN

SEQ ID NO: 1217 - DNA, 489 bp, Gossypium hirsutum
  misc_feature: Ceres Clone ID no. 100068619
  misc_feature: Encodes the peptide sequence at SEQ ID NO. 1218
ctctttttcttttcttctcttttctttggcctcagacccttaatttcgattgttaattatcactgttctgcaatggcgtcaggttcgaactggacgccaaagcaaaacaagttgttcgagaacgctttagctatctacgacaaggatacaccagaccggtggcacaagctagccagggctgtcggggggaagaccgtggaggaagtgaagttgcattaccagaaccttgtggatgacatcaagcagatagagtctgggcacgtgcctttgcccccttataagaaagctggagggaaccaaggatacaacaatttcatggacgatgaagaaccaaggatgaggaatctcaggctttagtgaagtatgaaccagaaatagctgtagaatatcaacctttcaataaaaggaaatgcaaagcagcaaacatataaattatctcttaatttcgtttacatttcctgctcatatatatgttttttgtgtgcttga

SEQ ID NO: 1218 - protein, 94 aa, Gossypium hirsutum
  misc_feature (4)..(53): Pfam Name: Myb_DNA-binding Pfam Description: Myb-like DNA-binding domain
  misc_feature: Ceres Clone ID no. 100068619
  misc_feature: Bit score of 123.5 for HMM based on sequences of Figure 22
  misc_feature: Functional Homolog Of SEQ ID NO. 1137
MASGSNWTPKQNKLFENALAIYDKDTPDRWHKLARAVGGKTVEEVKLHYQNLVDDIKQIESGHVPLPPYKKAGGNQGYNNFMDDEEPRMRNLRL

SEQ ID NO: 1219 - protein, 126 aa, Oryza sativa subsp. japonica
  misc_feature (24)..(74): Pfam Name: Myb_DNA-binding Pfam Description: Myb-like DNA-binding domain
  misc_feature: Public GI ID no. 5091605
  misc_feature: Bit score of 137.0 for HMM based on sequences of Figure 22
  misc_feature: Functional Homolog Of SEQ ID NO. 1137
MASAAGSKQQQAMMSLPSSRGGGGGGWTQRQNKQFECALAVYDKETPDRWHNIARYMGGAKSADEVRRHFDHLVEDVSRIESGRVPFPRYSSSSSSRGADDGNRLLTVFHLSSVPRTRNANHKFNT

SEQ ID NO: 1220 - DNA, 574 bp, Gossypium hirsutum
  misc_feature: Ceres Clone ID no. 1897493
  misc_feature: Encodes the peptide sequence at SEQ ID NO. 1221
cttctacacctctttttcttttctttttttggcctcagaccctgaatttcgattgttaattatcactgttctgcaatggcgtcaggttcgaactggacgccaaagcaaaacaagttgttcgagaacgctttagctatctacgacaaggatacaccagaccggtggcacaagctagccagggctgttggggggaagaccgtggaggaagtgaagttgcattaccagaaccttttggatgacatcaagcagatagagtctgggcacgtgcctttgcccccttacaagaaagctggaggaacaaaggatacaacaatttcatggacgatgaagaaccaaggatgaggaatctcaggctttagtgaagtatgaaccagaaatagcctgtagaatatcaacctttcaataaaaggaaatgcaaagcagcaaacatataaattattgctcttaatttcgtttacatttcccgctcatatatatatatatgttttttgtgtgcttgaatgtaacaagcagccacaacgttcctatacttgcatgtatcaagtatgaaattatagcattggtgccttgtttt

SEQ ID NO: 1221 - protein, 88 aa, Gossypium hirsutum
  misc_feature (4)..(53): Pfam Name: Myb_DNA-binding Pfam Description: Myb-like DNA-binding domain
  misc_feature: Ceres Clone ID no. 1897493
  misc_feature: Bit score of 125.1 for HMM based on sequences of Figure 22
  misc_feature: Functional Homolog Of SEQ ID NO. 1137
MASGSNWTPKQNKLFENALAIYDKDTPDRWHKLARAVGGKTVEEVKLHYQNLLDDIKQIESGHVPLPPYKKAGGTKDTTISWTMKNQG

SEQ ID NO: 1222 - protein, 111 aa, Oryza sativa subsp. indica
  misc_feature (24)..(74): Pfam Name: Myb_DNA-binding Pfam Description: Myb-like DNA-binding domain
  misc_feature: Public GI ID no. 125553458
  misc_feature: Bit score of 138.5 for HMM based on sequences of Figure 22
  misc_feature: Functional Homolog Of SEQ ID NO. 1137
MASAAGSKQQQAMMSLPSSRGGGGGGWTQRQNKQFECALAVYDKETPDRWHNIARYMGGAKSADEVRRHFDHLVEDVARIESGRVPFPRYSSSSSSRGADDGNRSRYLKYQ

SEQ ID NO: 1223 - DNA, 327 bp, Populus balsamifera subsp. trichocarpa
  misc_feature: Ceres Annot ID no. 1495620
  misc_feature: Encodes the peptide sequence at SEQ ID NO. 1224
atgtcttatttcacatcttcaaatggctccggctcctcttggacagccaaacaaaataagctattcgagaaggccctggctgtatacgacaaagacaccccagaccgctggcaaaatgtggccaaggccgtgggtggcaagtctcctgaagaagttaagaggcactatgatcgtctcgtggaagatctcgtgtacatagaatccggccaagcccctctgccgaattacaagccctctggcagcaatggtaggggacttgttgaagagcaaagaccatttaatccaactccaaaaagttttgaatttgtacgatccctgtttgcctag

SEQ ID NO: 1224 - protein, 108 aa, Populus balsamifera subsp. trichocarpa
  misc_feature (11)..(60): Pfam Name: Myb_DNA-binding Pfam Description: Myb-like DNA-binding domain
  misc_feature: Ceres Annot ID no. 1495620
  misc_feature: Bit score of 132.2 for HMM based on sequences of Figure 22
  misc_feature: Functional Homolog Of SEQ ID NO. 1137
MSYFTSSNGSGSSWTAKQNKLFEKALAVYDKDTPDRWQNVAKAVGGKSPEEVKRHYDRLVEDLVYIESGQAPLPNYKPSGSNGRGLVEEQRPFNPTPKSFEFVRSLFA

SEQ ID NO: 1225 - DNA, 315 bp, Populus balsamifera subsp. trichocarpa
  misc_feature: Ceres Annot ID no. 1442707
  misc_feature: Encodes the peptide sequence at SEQ ID NO. 1226
atgtcttatttcacatcttcaaatggctccggctcctcttggacagccaaacaaaataagctattcgagaaggccctggctgtatacgacaaagacaccccagaccgctggcaaaatgtggccaaggccgtgggtggcaagtctcctgaagaagttaagaggcactatgatcgtctcgtggaagatctcgtgtacatagaatccggccaagcccctctgccgaattacaagccctctggcagcaatggtaggggacttgttgaagagcaaaggctagctatggtctatccatcatcgatctattcaacttcctaa

SEQ ID NO: 1226 - protein, 104 aa, Populus balsamifera subsp. trichocarpa
  misc_feature (11)..(60): Pfam Name: Myb_DNA-binding Pfam Description: Myb-like DNA-binding domain
  misc_feature: Ceres Annot ID no. 1442707
  misc_feature: Bit score of 134.3 for HMM based on sequences of Figure 22
  misc_feature: Functional Homolog Of SEQ ID NO. 1137
MSYFTSSNGSGSSWTAKQNKLFEKALAVYDKDTPDRWQNVAKAVGGKSPEEVKRHYDRLVEDLVYIESGQAPLPNYKPSGSNGRGLVEEQRLAMVYPSSIYSTS

SEQ ID NO: 1227 - DNA, 276 bp, Solanum lycopersicum
  misc_feature: Ceres Annot ID no. 8461532
  misc_feature: Encodes the peptide sequence at SEQ ID NO. 1228
atggcctcgtggactgcaaggcaaaacaagaagttcgaagaggctttggcgttatatgacagagacacacctgatcgttggcataacattgcaaggtgtgtaggtggaaaatcagctgcagaagtgaagaggcattatgaagtacttgtgaaggatatcatgcaaatagaaaatggtcaagtacctttaccaaattacaaagccgcggctgaaaccaataacagatcaggttatgccaatgaacataggcttctgaagaacctgaagttacagtga

SEQ ID NO: 1228 - protein, 91 aa, Solanum lycopersicum
  misc_feature (1)..(50): Pfam Name: Myb_DNA-binding Pfam Description: Myb-like DNA-binding domain
  misc_feature: Ceres Annot ID no. 8461532
  misc_feature: Bit score of 132.3 for HMM based on sequences of Figure 22
  misc_feature: Functional Homolog Of SEQ ID NO. 1137
MASWTARQNKKFEEALALYDRDTPDRWHNIARCVGGKSAAEVKRHYEVLVKDIMQIENGQVPLPNYKAAAETNNRSGYANEHRLLKNLKLQ

SEQ ID NO: 1229 - DNA, 565 bp, Gossypium hirsutum
  misc_feature: Ceres Clone ID no. 100067803
  misc_feature: Encodes the peptide sequence at SEQ ID NO. 1230
cggacgcgtgggtttttggcctcagaccctgaatttcgattgttaattatcactgttctgcaatggcgtcaggttcgaactggacgccaaagcaaaacaagttgttcgagaactctttagctatctacgacaaggatacaccagaccggtggcacaagctagccagggctgttggggggaagaccgtggaggaagtgaagttgcattaccagaaccttgtggatgacatcaagcagatagagtctgggcacgtgcctttgcccccttacaagaaagctggaggaacaaaggatacaacaatttcatggacgatgaagaaccaaggatgaggaatctcaggctttagtgaagtatgaaccagaaatagcctgtagaatatcaacctttcaataaaaggaaatgcaaagcagcaaacatataaattattgctcttaatttcgtttacatttcccgctcatatatatatatatgttttttgtgtgcttgaatgtaacaagcagccacaacgttcctatacttgcatgtatcaagtatgaaattatagcattggtgccttgtttttatt

SEQ ID NO: 1230 - protein, 88 aa, Gossypium hirsutum
  misc_feature (4)..(53): Pfam Name: Myb_DNA-binding Pfam Description: Myb-like DNA-binding domain
  misc_feature: Ceres Clone ID no. 100067803
  misc_feature: Bit score of 124.0 for HMM based on sequences of Figure 22
  misc_feature: Functional Homolog Of SEQ ID NO. 1137
MASGSNWTPKQNKLFENSLAIYDKDTPDRWHKLARAVGGKTVEEVKLHYQNLVDDIKQIESGHVPLPPYKKAGGTKDTTISWTMKNQG

SEQ ID NO: 1231 - DNA, 282 bp, Oryza sativa
  misc_feature: Ceres Annot ID no. 1679467
  misc_feature: Encodes the peptide sequence at SEQ ID NO. 1232
atggcatccagctccaaggcctcgtcctcgtcgtcggcgtcggcggcgtcgtcggagtggacgaagcagcagaacaagcagttcgagcgcgccctggcggtgtacgacaccgacgccccggaccggtggcacaacgtcgcccgctacatgggcggcgccaagtccgccgaggaggtgcgccgccactacgagcggctccaggcggatgtcgagcagattgaggccggcggcgtgccgttctccttgggctacggcgccacgccacaggccggccgccgctag

SEQ ID NO: 1232 - protein, 93 aa, Oryza sativa
  misc_feature (17)..(67): Pfam Name: Myb_DNA-binding Pfam Description: Myb-like DNA-binding domain
  misc_feature: Ceres Annot ID no. 1679467
  misc_feature: Bit score of 109.9 for HMM based on sequences of Figure 22
  misc_feature: Functional Homolog Of SEQ ID NO. 1137
MASSSKASSSSSASAASSEWTKQQNKQFERALAVYDTDAPDRWHNVARYMGGAKSAEEVRRHYERLQADVEQIEAGGVPFSLGYGATPQAGRR

SEQ ID NO: 1233 - DNA, 481 bp, Arabidopsis thaliana
  misc_feature: Ceres Clone ID no. 41695
  misc_feature: Encodes the peptide sequence at SEQ ID NO. 1234
aattcaagtcatctctatccgtcaacaatacaaaccaaccttctcaattcctctcttttcatccacattttcactagctaatggcttctagttcaatgagcacctcatcatggacagctagagaggacaagcaattcgaaatggcgttggcgaaattcgacaaggacactcctgaccgttggcaaaaaattgcaagggcagttggtgggaaatcaactgaagaagtaaagcgacactatgaattgctccttagggatgtgaatgacattgagtcaggacgctatccacaacctaggtaccgtaacactaattgaagccattaataaaatgcctttctatcaagaagaggacatttgagagaatctataaagaactaagaatttcgatgtatttcttatattctatttgctttctttttttgttttttttttaatttctgtttggttttcagatatataataatctctctcaatatccatcc

SEQ ID NO: 1234 - protein, 77 aa, Arabidopsis thaliana
  misc_feature (8)..(57): Pfam Name: Myb_DNA-binding Pfam Description: Myb-like DNA-binding domain
  misc_feature: Ceres Clone ID no. 41695
  misc_feature: Bit score of 125.2 for HMM based on sequences of Figure 22
  misc_feature: Functional Homolog Of SEQ ID NO. 1137
MASSSMSTSSWTAREDKQFEMALAKFDKDTPDRWQKIARAVGGKSTEEVKRHYELLLRDVNDIESGRYPQPRYRNTN

SEQ ID NO: 1235 - protein, 83 aa, Antirrhinum majus
  misc_feature (13)..(62): Pfam Name: Myb_DNA-binding Pfam Description: Myb-like DNA-binding domain
  misc_feature: Public GI ID no. 112292440
  misc_feature: Bit score of 115.8 for HMM based on sequences of Figure 22
  misc_feature: Functional Homolog Of SEQ ID NO. 1137
MASSSMTSSRGSSSLWTPKQNRQFEEALTMFDKDTPDRWQNIARRIDGKSAEQVRRYYEELLKDITRIENDQVPIPNYKTNNR

SEQ ID NO: 1236 - protein, 78 aa, Arabidopsis thaliana
  misc_feature (8)..(57): Pfam Name: Myb_DNA-binding Pfam Description: Myb-like DNA-binding domain
  misc_feature: Public GI ID no. 116830269
  misc_feature: Bit score of 125.5 for HMM based on sequences of Figure 22
  misc_feature: Functional Homolog Of SEQ ID NO. 1137
MASSSMSTSSWTAREDKQFEMALAKFDKDTPDRWQKIARAVGGKSTEEVKRHYELLLRDVNDIESGRYPQPRYRNTNG

SEQ ID NO: 1237 - DNA, 735 bp, Gossypium hirsutum
  misc_feature: Ceres Clone ID no. 1914387
  misc_feature: Encodes the peptide sequence at SEQ ID NO. 1238
accatcatccccttgacttcagtcttctcccttgacgggggcggcaatctcttcttcttcttcttccttcttagctactttctcttttgtcggttactcttcctttaagatctcatcttgaaagtcttacattcccttttttattcacccccaacgtaaaaaatggcatcctctattacgctttcacgtgattctaactcctactggactccaaagcaaaacaagctatttgaaagggcacttgctgtatatgacaaggacactccagaccgctggcaaaaggtggctgcagctgtgggggagaaatcagtcgaggaagtaagaaggcattatgagatcctagtgagggatctcatgtatatagaatctggtcaaatccctatacccaattacaaaagcactgggagtaacagaagatgaattgctggggtgcaaaggtttatgaagaatctaaggctccaatgaagcacaagtttcagctgcactgtcagagaatctgtaaaaactaaaataaaaagaataaattataaagaactggagaatttgcatcgtgattctccctgtcttattttacattgagtgatcgagtcagtttggttttttctttttgtgtgtgtgtgtcagtttgttaatatgacaacaaaagttgaactctacaattattaaatttgtgagtattgtactgaagttaccagttttaaattaaaaaaaaaaggtattactactaaatgctgg

SEQ ID NO: 1238 - protein, 85 aa, Gossypium hirsutum
  misc_feature (12)..(61): Pfam Name: Myb_DNA-binding Pfam Description: Myb-like DNA-binding domain
  misc_feature: Ceres Clone ID no. 1914387
  misc_feature: Bit score of 130.0 for HMM based on sequences of Figure 22
  misc_feature: Functional Homolog Of SEQ ID NO. 1137
MASSITLSRDSNSYWTPKQNKLFERALAVYDKDTPDRWQKVAAAVGEKSVEEVRRHYEILVRDLMYIESGQIPIPNYKSTGSNRR

SEQ ID NO: 1239 - DNA, 291 bp, Populus balsamifera subsp. trichocarpa
  misc_feature: Ceres Annot ID no. 1445878
  misc_feature: Encodes the peptide sequence at SEQ ID NO. 1240
atggcttcaggttctagtaattggacttcaaagcaaaacaaactgttcgaaaatgccttggccatctatgatcaagaatctcctgatcgctggcacaatcttgccagggctgttggaaaaacagtggaggaagtgaagaagcattatcagatgcttgttgaagacgtccagcagattgaagctggtgaaatccctttgcccaactacactagaagatctggagctagcaacaagagctaccattgcaatgatgatcaagcacaaagggtgaagaatcttaatctcaactga

SEQ ID NO: 1240 - protein, 96 aa, Populus balsamifera subsp. trichocarpa
  misc_feature (5)..(53): Pfam Name: Myb_DNA-binding Pfam Description: Myb-like DNA-binding domain
  misc_feature: Ceres Annot ID no. 1445878
  misc_feature: Bit score of 124.0 for HMM based on sequences of Figure 22
  misc_feature: Functional Homolog Of SEQ ID NO. 1137
MASGSSNWTSKQNKLFENALAIYDQESPDRWHNLARAVGKTVEEVKKHYQMLVEDVQQIEAGEIPLPNYTRRSGASNKSYHCNDDQAQRVKNLNLN

SEQ ID NO: 1241 - protein, 88 aa, Solanum lycopersicum
  misc_feature (11)..(60): Pfam Name: Myb_DNA-binding Pfam Description: Myb-like DNA-binding domain
  misc_feature: Public GI ID no. 7981380
  misc_feature: Bit score of 130.2 for HMM based on sequences of Figure 22
  misc_feature: Functional Homolog Of SEQ ID NO. 1137
MSSMSSQHGSSGSWTAKQNKAFEKALAVYDKETRDRWSNVAKAVGGKTAEEVKRHYEILLRDVFFIDNGMVPFPKYKTTGGSHNSTSD

SEQ ID NO: 1242 - DNA, 656 bp, Gossypium hirsutum
  misc_feature: Ceres Clone ID no. 1927753
  misc_feature: Encodes the peptide sequence at SEQ ID NO. 1243
aagtaattttctttgagagaaataaccccatcttttccctttatacaagtttcaatttattcactctttcaaattcaggaactgacatagttctctaaatttttagcctgtcattctgatccgaagcttgttaaaaagaccctctgttttcagttgtacttattttcacttatgtcatccaattttctcaataattcacgctgctctagctcttcctggacacctaaacaaaacaaaacgttcgagaaggctctggctaaatatgaccaggacactcctgaccgctggcacaatgttgccaaggctgtgggtggaaagtctgctgaggaagtcaagctgcactatgatgccctagtcagggatctcaaagacattgagtctggccgctacccttatccatatccaagtggaagcaacagctaaagtggttcccaaagagtcaagtactaaaatgaaaaagaacatgatactcacaaaaccagagacctcagtcgcacagtcgcagaaatctagcattggatgatattcccccagaaaaaaagaaaatccctactgtaattgtacatgctgctattactattttctgtattatcactttgtattttcctttgaccttgtctagttaaattaaaatattaaatatttatatagtaatt

SEQ ID NO: 1243 - protein, 83 aa, Gossypium hirsutum
  misc_feature (13)..(62): Pfam Name: Myb_DNA-binding Pfam Description: Myb-like DNA-binding domain
  misc_feature: Ceres Clone ID no. 1927753
  misc_feature: Bit score of 132.5 for HMM based on sequences of Figure 22
  misc_feature: Functional Homolog Of SEQ ID NO. 1137
MSSNFLNNSRCSSSSWTPKQNKTFEKALAKYDQDTPDRWHNVAKAVGGKSAEEVKLHYDALVRDLKDIESGRYPYPYPSGSNS

SEQ ID NO: 1244 - DNA, 237 bp, Solanum lycopersicum
  misc_feature: Ceres Annot ID no. 8456508
  misc_feature: Encodes the peptide sequence at SEQ ID NO. 1245
atggcatcaaattcactcactgcttggactccaagagaaaacaagaaattcgagcaggcactcgcggtctacgataaggacacatctgatcgatggcaaaacattgctagatacgttggtgggaaatcagttgaagaagttaaacatcactatgctatacttgtagaggatcttaagcacattgaatctggtgacgtcccattcccaaaatacaagtcaggtggaaagtctcgttaa

SEQ ID NO: 1245 - protein, 78 aa, Solanum lycopersicum
  misc_feature (6)..(55): Pfam Name: Myb_DNA-binding Pfam Description: Myb-like DNA-binding domain
  misc_feature: Ceres Annot ID no. 8456508
  misc_feature: Bit score of 127.1 for HMM based on sequences of Figure 22
  misc_feature: Functional Homolog Of SEQ ID NO. 1137
MASNSLTAWTPRENKKFEQALAVYDKDTSDRWQNIARYVGGKSVEEVKHHYAILVEDLKHIESGDVPFPKYKSGGKSR

SEQ ID NO: 1246 - DNA, 408 bp, Brassica napus
  misc_feature: Ceres Clone ID no. 1086604
  misc_feature: Encodes the peptide sequence at SEQ ID NO. 1247
gcaaatcaacattttcatcgttaatacaaaccaacttctctaacgtcgctcttttgttattctacattttcacactaatggcttccaactcaattatcagcacttcccggagctctacctcgtcatggacagcgaaacaggacaaacagttcgaaatggctttggctaagttcgagaaggacactcctgaccgatggcaaaatgtggcaagagtagttggtggaaaatcagctgaagaggtaaaaagacgctatgaattgctcgttagagatgttaatgacattgaatcaggacgttacgacccacaacctaggtaccgtaacactaattgaagccattgagattctttgtgagctccggaaaaaataactatgtgcctttaaactctattgagatggagacattaag

SEQ ID NO: 1247 - protein, 84 aa, Brassica napus
  misc_feature (14)..(63): Pfam Name: Myb_DNA-binding Pfam Description: Myb-like DNA-binding domain
  misc_feature: Ceres Clone ID no. 1086604
  misc_feature: Bit score of 122.5 for HMM based on sequences of Figure 22
  misc_feature: Functional Homolog Of SEQ ID NO. 1137
MASNSIISTSRSSTSSWTAKQDKQFEMALAKFEKDTPDRWQNVARVVGGKSAEEVKRRYELLVRDVNDIESGRYDPQPRYRNTN

SEQ ID NO: 1248 - DNA, 655 bp, Panicum virgatum
  misc_feature: Ceres Clone ID no. 1787372
  misc_feature: Encodes the peptide sequence at SEQ ID NO. 1249
atagctagatcgatcggtctcaacagaccccggccgatcagtgctccagatcgaacgacgacgacaatggcttccggcggcgggtcgtcgtcgtctaacagcagcaggggctcgtcgtcgtcccgcgggtggacgcagcggcagaacaagcagttcgagtgcgcgctggcggtgtacgacagggagaccccggaccggtggcacaacgtcgcccgctacatgggcggcgccaagtccgccgacgaggtgcgccgccacttcgagcagctcgtcgccgacgtcgcccagatcgaggccggccgcgtccccttcccacgctacgccgccgacgacgacgcggcggcggccaccagcagcaggaccaagtatctcaagttccagtgatgatcaagacaaaatgacggcgccagatcgagaccatgtccccgagtctccgagatgacacgacgcatgcatatatagtgatagattataggtgtgtagggtgtaataatcactgtgtggctggatatattggatccaaatatggatgtaatttagggaagaaaagtacttttcaacctcatgttgtgtaaattagctaattattaagctggttttcatcggtactatatgctcgttatatcacaagaagcaatgtaaaatgtttcggggg

SEQ ID NO: 1249 - protein, 105 aa, Panicum virgatum
  misc_feature (19)..(69): Pfam Name: Myb_DNA-binding Pfam Description: Myb-like DNA-binding domain
  misc_feature: Ceres Clone ID no. 1787372
  misc_feature: Bit score of 129.9 for HMM based on sequences of Figure 22
  misc_feature: Functional Homolog Of SEQ ID NO. 1137
MASGGGSSSSNSSRGSSSSRGWTQRQNKQFECALAVYDRETPDRWHNVARYMGGAKSADEVRRHFEQLVADVAQIEAGRVPFPRYAADDDAAAATSSRTKYLKFQ

SEQ ID NO: 1250 - DNA, 734 bp, Panicum virgatum
  misc_feature: Ceres Clone ID no. 2034321
  misc_feature: Encodes the peptide sequence at SEQ ID NO. 1251
aaaaacatcgagcattggaagagctaaaactccagtccagctatccaacaagtgtctacacataagacatcagcactagttgggttcccaagaaacaaagtccagtccaaagatgtctgggtcgaggagctcttcttcccgcagcgttaacgtggactccacgtggagcaagaaagagaacaagctgtttgaagaggccctcgcccactacggcgaggacacacccgaccgctggcacaaggtgtcccgcgccattggaggcagcaagacggccgacgaggtgcgccgccattatgagttactcgatgatgacatcaagctcattttgtccggcaatgttccgttccccaagtacaacacacagggagcttggaactaagagtgaagcatgtgaagaaccaccgacgacagacactgctgctacataaacagatacagatatcttagctattcaaggaaacatgctgatatattgttgttttcttatgaagttaatgatcgcttggtcaaaaataaaaggagccagtaaccatacgtatgtgtgttaatgtgtgtgtatataacgataggttgtacgcaaatcagctgttatgctacagaatttagggtacactatctgcccatagtgtgtagttatggtcccctagcagggactacttgtgcagtaaacagtattgtaaataaataaaactcatgtaccggtttgctaattatatataaattgtgcttggttg

SEQ ID NO: 1251 - protein, 88 aa, Panicum virgatum
  misc_feature (15)..(65): Pfam Name: Myb_DNA-binding Pfam Description: Myb-like DNA-binding domain
  misc_feature: Ceres Clone ID no. 2034321
  misc_feature: Bit score of 113.3 for HMM based on sequences of Figure 22
  misc_feature: Functional Homolog Of SEQ ID NO. 1137
MSGSRSSSSRSVNVDSTWSKKENKLFEEALAHYGEDTPDRWHKVSRAIGGSKTADEVRRHYELLDDDIKLILSGNVPFPKYNTQGAWN

SEQ ID NO: 1252 - protein, 90 aa, Antirrhinum majus
  misc_feature (8)..(57): Pfam Name: Myb_DNA-binding Pfam Description: Myb-like DNA-binding domain
  misc_feature: Public GI ID no. 112292438
  misc_feature: Bit score of 122.8 for HMM based on sequences of Figure 22
  misc_feature: Functional Homolog Of SEQ ID NO. 1137
MASSSMTSSSWTQKQNKQFEEALAMYGNDTPDCWQNIARKVGGKSAEEIRRHYEVLVKEIMKIETDQVPIPNYNKVKGSNSRGYGNYRGF

SEQ ID NO: 1253 - protein, 96 aa, Populus x generosa
  misc_feature (5)..(53): Pfam Name: Myb_DNA-binding Pfam Description: Myb-like DNA-binding domain
  misc_feature: Public GI ID no. 118489684
  misc_feature: Bit score of 115.9 for HMM based on sequences of Figure 22
  misc_feature: Functional Homolog Of SEQ ID NO. 1137
MASGSSNWTSKQNKLFENALAICDQESPDRWHNLARAVGKTVEEVKKHYQMLVEDVQQIEAGEIPLPNYTRRSGASNKSYHCIDDQAPRVKNLNLN

SEQ ID NO: 1254 - DNA, 264 bp, Sorghum bicolor
  misc_feature: Ceres Annot ID no. 8667941
  misc_feature: Encodes the peptide sequence at SEQ ID NO. 1255
atgtctgggtccaggaactcttcccgcaacgttaacattgattccaactggagcaaaaaggagaacaagctgttcgaggaggccctagcctgctatggtgagggcacacctgaccgctggcacaaggtggcccgtgccatgggtggcatcaagacagccgatgaagttcgccgccattatgagatccttaatgatgatgtcacgctcattgaatccggcggagttccattccccaactacaacacacagggagcttggaactaa

SEQ ID NO: 1255 - protein, 87 aa, Sorghum bicolor
  misc_feature (14)..(64): Pfam Name: Myb_DNA-binding Pfam Description: Myb-like DNA-binding domain
  misc_feature: Ceres Annot ID no. 8667941
  misc_feature: Bit score of 113.9 for HMM based on sequences of Figure 22
  misc_feature: Functional Homolog Of SEQ ID NO. 1137
MSGSRNSSRNVNIDSNWSKKENKLFEEALACYGEGTPDRWHKVARAMGGIKTADEVRRHYEILNDDVTLIESGGVPFPNYNTQGAWN

SEQ ID NO: 1256 - DNA, 748 bp, Zea mays
  misc_feature: Ceres Clone ID no. 100965215
  misc_feature: Encodes the peptide sequence at SEQ ID NO. 1257
acgtgaacagcaagcagttcacgtttgccaagtgcctataaatagtagccaccctatagcagcaacgagatcaaaacagcagagcttgcaagagctaaaaacgacttcagtccagccatccaacaagaagatcagtctacacataaaaccagagatgtctgggtccaggagctcttcgtctcacaacgttaccattgattccgagtggagcaaaaaggagaacaagctgttcgaggaggccctagcctgctacggcgcgggcacacccgaccgctggcacaaggtggcccgtgccatgggtggcatcaagacagccgacgaggttygccgccatcacgagatccttaatgaggatgtcacgctcatcgaatccggcagagttccattccccaactacaacacgcagggagcttggaactaaggagtgaaggatgatgtgaagaaccmccagacaggaactactgctacgcatgaaatagatatyttagccattgaagtaaatgtgctgatatattgtgttaagaagtttatgattgctcaggtaataaataagaggagctagagaatacacataagtgtgttatgtgtaaatagctatatataggctgtgagcaaatcatcagttatgctatagaaaccagggaaccctatctgcccatagtgtgtactgtgaagttatagtcccctcccctatggatgaatacttgtatagtaaagtgtggtgtaaaactcttgtaccagtttgtta

SEQ ID NO: 1257 - protein, 88 aa, Zea mays
  misc_feature (15)..(65): Pfam Name: Myb_DNA-binding Pfam Description: Myb-like DNA-binding domain
  misc_feature: Ceres Clone ID no. 100965215
  misc_feature: Bit score of 110.3 for HMM based on sequences of Figure 22
  misc_feature: Functional Homolog Of SEQ ID NO. 1137
  misc_feature (58)..(58): Xaa is any aa, unknown, or other
MSGSRSSSSHNVTIDSEWSKKENKLFEEALACYGAGTPDRWHKVARAMGGIKTADEVXRHHEILNEDVTLIESGRVPFPNYNTQGAWN

SEQ ID NO: 1258 - DNA, 282 bp, Solanum lycopersicum
  misc_feature: Ceres Annot ID no. 8461540
  misc_feature: Encodes the peptide sequence at SEQ ID NO. 1259
atggccacaaattcaacgtggagtcatcatcaaaacaagttatttgagaatgcattggccatttacgacatcgatacaccagatcgatggcgtaaattagccaatgcagttggtggaaaaacagaagaagaagtgaaaaatcactatgaaaaacttgttgaagatattaagcgtatcgaatctggaaatattccattacctaattataatggtggtcgtaataataaaggctacaatttcatggatgaagaacaaaggctgaagtatttgaagctccaatga

SEQ ID NO: 1259 - protein, 93 aa, Solanum lycopersicum
  misc_feature (4)..(53): Pfam Name: Myb_DNA-binding Pfam Description: Myb-like DNA-binding domain
  misc_feature: Ceres Annot ID no. 8461540
  misc_feature: Bit score of 115.2 for HMM based on sequences of Figure 22
  misc_feature: Functional Homolog Of SEQ ID NO. 1137
MATNSTWSHHQNKLFENALAIYDIDTPDRWRKLANAVGGKTEEEVKNHYEKLVEDIKRIESGNIPLPNYNGGRNNKGYNFMDEEQRLKYLKLQ

SEQ ID NO: 1260 - DNA, 273 bp, Populus balsamifera subsp. trichocarpa
  misc_feature: Ceres Annot ID no. 1457231
  misc_feature: Encodes the peptide sequence at SEQ ID NO. 1261
atgggatccagttctttcccacagcctaactcaaattggtcagaacagaaaaacaagttgttcgaaaatgctcttgctatatatgacaaggatagcccagatcgttggcgaaacatagccagttttgtcggagaaacaaccgaagaggaagtgaagaagcagtatgagatccttctagacgatatcaagagaatcgagtcagaccaagtgccactgccaaattacaagaatcatgaagaaagcatcaaggaaaacagcaacatgagcaattaa

SEQ ID NO: 1261 - protein, 90 aa, Populus balsamifera subsp. trichocarpa
  misc_feature (10)..(59): Pfam Name: Myb_DNA-binding Pfam Description: Myb-like DNA-binding domain
  misc_feature: Ceres Annot ID no. 1457231
  misc_feature: Bit score of 106.0 for HMM based on sequences of Figure 22
  misc_feature: Functional Homolog Of SEQ ID NO. 1137
MGSSSFPQPNSNWSEQKNKLFENALAIYDKDSPDRWRNIASFVGETTEEEVKKQYEILLDDIKRIESDQVPLPNYKNHEESIKENSNMSN

SEQ ID NO: 1262 - DNA, 285 bp, Populus balsamifera subsp. trichocarpa
  misc_feature: Ceres Annot ID no. 1457230
  misc_feature: Encodes the peptide sequence at SEQ ID NO. 1263
atggcatcaagttctttcccgcagcccagcacaaattggtcagccgaacaaaacaagttgttcgaaaatgctcttgcgatatatgataaggacactccggatcgttgggggaaaatagccaagattgtcaaaggaacaaccgaggatgaagtaaagcagcaatacgagatccttcttgatgatataaagagcattgagtcggacaaagtcccgctaccgaattacaagaacgaaggaagcagcaaggaaaacatcatcggtaatgaagaggagaggctgcagtaa

SEQ ID NO: 1263 - protein, 94 aa, Populus balsamifera subsp. trichocarpa
  misc_feature (10)..(59): Pfam Name: Myb_DNA-binding Pfam Description: Myb-like DNA-binding domain
  misc_feature: Ceres Annot ID no. 1457230
  misc_feature: Bit score of 113.1 for HMM based on sequences of Figure 22
  misc_feature: Functional Homolog Of SEQ ID NO. 1137
MASSSFPQPSTNWSAEQNKLFENALAIYDKDTPDRWGKIAKIVKGTTEDEVKQQYEILLDDIKSIESDKVPLPNYKNEGSSKENIIGNEEERLQ

SEQ ID NO: 1264 - DNA, 255 bp, Populus balsamifera subsp. trichocarpa
  misc_feature: Ceres Annot ID no. 1510435
  misc_feature: Encodes the peptide sequence at SEQ ID NO. 1265
atggcatcaagttctttcccgcagcccagcacaaattggtcagccgaacaaaacaagttgttcgaaaatgctcttgcgatatatgataaggacactccggatcgttgggggaaaatagccaagattgtcaaaggaacaaccgaggatgaagtaaagcagcaatacgagatccttcttgatgatataaagagcattgagtcggacaaagtcccgctaccgaattacaagaacgaaggaagcagctgcagtaactaa

SEQ ID NO: 1265 - protein, 84 aa, Populus balsamifera subsp. trichocarpa
  misc_feature (10)..(59): Pfam Name: Myb_DNA-binding Pfam Description: Myb-like DNA-binding domain
  misc_feature: Ceres Annot ID no. 1510435
  misc_feature: Bit score of 108.7 for HMM based on sequences of Figure 22
  misc_feature: Functional Homolog Of SEQ ID NO. 1137
MASSSFPQPSTNWSAEQNKLFENALAIYDKDTPDRWGKIAKIVKGTTEDEVKQQYEILLDDIKSIESDKVPLPNYKNEGSSCSN

SEQ ID NO: 1266 - protein, 85 aa, Oryza sativa subsp. indica
  misc_feature (12)..(62): Pfam Name: Myb_DNA-binding Pfam Description: Myb-like DNA-binding domain
  misc_feature: Public GI ID no. 125553354
  misc_feature: Bit score of 95.3 for HMM based on sequences of Figure 22
  misc_feature: Functional Homolog Of SEQ ID NO. 1137
MSGSRSSSPNSKSEWSRKENKMFEEALAYYGEDTPNRWDKVASAMGGIKSAEEIRCHYEDLTDDVKTIESGRVQFPKYKTQGYWT

SEQ ID NO: 1267 - DNA, 643 bp, Zea mays
  misc_feature: Ceres Clone ID no. 343607
  misc_feature: Encodes the peptide sequence at SEQ ID NO. 1268
caaacagacacaggcagcagccattgcttgccctgcatctctcctagctaggtgtcttctcttgctgagtgaagataaaacaatgagttcgtcctggaccgagagtcaaaacaatctcttcgagcgtgcgctggcagtatatgacaaggacacaccagaccgctggcacaacgttgcgcgggcagtcggctgcggcaagacagccgaggacgtgaagaggcactacaagtacctgaagacggacgtgaagcacatcgaaaccgaagaaggcggccgaggatcccagtccagcagccctgctggtgctggtgctggtggcagtggaagcagcagcagcagttcttggggcagggacaacggtgacaagaggatgacgaggcaccccaacatgccgcagtgaagtggatgtgatcttggagagagccttatctctagagcctagagcagcaataggtccacataacaaacaaacaaacaaaaagagacatgatgattggtgcgctctctagagatgttaactaactatgctatttcgtggcttccattccgatccatccaagtgtacgtcgtcgtcaggccggtttgctgtattctgctacctatatatgctacggtgaaagtgaaataaatctgtggttccttg

SEQ ID NO: 1268 - protein, 105 aa, Zea mays
  misc_feature (2)..(52): Pfam Name: Myb_DNA-binding Pfam Description: Myb-like DNA-binding domain
  misc_feature: Ceres Clone ID no. 343607
  misc_feature: Bit score of 98.7 for HMM based on sequences of Figure 22
  misc_feature: Functional Homolog Of SEQ ID NO. 1137
MSSSWTESQNNLFERALAVYDKDTPDRWHNVARAVGCGKTAEDVKRHYKYLKTDVKHIETEEGGRGSQSSSPAGAGAGGSGSSSSSSWGRDNGDKRMTRHPNMPQ

SEQ ID NO: 1269 - DNA, 516 bp, Zea mays
  misc_feature: Ceres Clone ID no. 100865050
  misc_feature: Encodes the peptide sequence at SEQ ID NO. 1270
taggtgtcttctcttgctgagtgaagataaaacaatgggttcgtcctggaccgagagtcaaaacaatctcttcgagcgtgcgctggcagtatatgacaaggacacaccagaccgctggcacaacgttgcgcgggcagtcggctgcggcaagacagccgaggacgtgaagaggcactacaagtacctgaagacggacgtgaagcacatcgaaaccgaagaaggcggccgaggatcccagtccagcagccctgctggtgctggtgctggtggcagtggaagcagcagcagcagttcttggggcagggacaacggtgacaagaggatgacgaggcaccccaaccagccgcagtgaagtggatgtgatcttggagagagccttatctctagagcctagagcagcaataggtccacataagaaacaccccctacctatgctatttcgtggcttccattccatccaagtgtacgtcgtcgtcaggccggtttgctgtattctgctacctggtagcgtttgcg

SEQ ID NO: 1270 - protein, 105 aa, Zea mays
  misc_feature (2)..(52): Pfam Name: Myb_DNA-binding Pfam Description: Myb-like DNA-binding domain
  misc_feature: Ceres Clone ID no. 100865050
  misc_feature: Bit score of 97.4 for HMM based on sequences of Figure 22
  misc_feature: Functional Homolog Of SEQ ID NO. 1137
MGSSWTESQNNLFERALAVYDKDTPDRWHNVARAVGCGKTAEDVKRHYKYLKTDVKHIETEEGGRGSQSSSPAGAGAGGSGSSSSSSWGRDNGDKRMTRHPNQPQ

SEQ ID NO: 1271 - DNA, 489 bp, Panicum virgatum
  misc_feature: Ceres Clone ID no. 1764605
  misc_feature: Encodes the peptide sequence at SEQ ID NO. 1272
acatgcgtacaagcagagaaccactcggccacggagatttctcttgccccttcctcccctctctcctccctccccgaatcacgcgcagtcccatccggcaccagccgccatggcaagaaccactccgttcggtctcgccgtcgcggcggcgctcgtcttcgccgtcgccatgccggccctcgccgccgcgcaggcccccgcgccggcgcccacaagcgacggcacgtcgattgaccagggcatcgcctacctcctgatgatcgtcgccctcgtgctcacctacctcatccaccctctcgacgcctcctccccgtacaagctcttctgagagcagagcagaaatcttttttccttccttgttttgatagggtagtggattatttgagtgagggagaggcatcattggtggtcggtccggtccgtattcatttgtggcgagttctattgggttctgcatgcatgtgtataatattactcctaccttcatgc

SEQ ID NO: 1272 - protein, 72 aa, Panicum virgatum
  misc_feature (8)..(61): Pfam Name: DUF1070 Pfam Description: Protein of unknown function (DUF1070)
  misc_feature: Ceres Clone ID no. 1764605
  misc_feature: Bit score of 148.2 for HMM based on sequences of Figure 18
  misc_feature: Functional Homolog Of SEQ ID NO. 1272
  misc_feature: in Figure 18
MARTTPFGLAVAAALVFAVAMPALAAAQAPAPAPTSDGTSIDQGIAYLLMIVALVLTYLIHPLDASSPYKLF

SEQ ID NO: 1273 - DNA, 219 bp, Sorghum bicolor
  misc_feature: Ceres Annot ID no. 8726250
  misc_feature: Encodes the peptide sequence at SEQ ID NO. 1274
atggcaagaactccactactgggtctcgccatcgccgcggcgctcgtcttcgccgtcgccatgccggccgtcgccgatgcgcaggcccccgccccggcgcccaccagcgacgggacgtcgattgaccagggcattgcgtacctgctgatgatcgtggcgctggtgctcacctacctcatccatcctctggacgcctcctccccatacaggctcttctga

SEQ ID NO: 1274 - protein, 72 aa, Sorghum bicolor
  misc_feature (8)..(61): Pfam Name: DUF1070 Pfam Description: Protein of unknown function (DUF1070)
  misc_feature: Ceres Annot ID no. 8726250
  misc_feature: Bit score of 146.9 for HMM based on sequences of Figure 18
  misc_feature: Functional Homolog Of SEQ ID NO. 1272
  misc_feature: in Figure 18
MARTPLLGLAIAAALVFAVAMPAVADAQAPAPAPTSDGTSIDQGIAYLLMIVALVLTYLIHPLDASSPYRLF

SEQ ID NO: 1275 - DNA, 506 bp, Triticum aestivum
  misc_feature: Ceres Clone ID no. 899059
  misc_feature: Encodes the peptide sequence at SEQ ID NO. 1276
aaatataatggcacaagaggcggcagaacgtgaggacaaggcaaagagtcaaggagagagatagaggcatctattctcacaagatacgcggctgccatggcgagaaccctctttggtttcgtcgtcgccgcagcgctcgtcctcgccgtcttcatgccggccctcgccgccgcgcaggcccccgcgccggcgcccaccagcgacgcatcctcggtcgaccaaggcgttgcctattttctgatgatcctggcgctggtgctcacctacctcatccacccgttggacgcctcctccccgtacaagctcttctgagcctgtatatgcgcagaggcttctcattcttttgttcttctttctgttgttcgttggtcgataagctagtggattcttgagagattggttgtgtgagattcgatttggattcattaatttgttgctcttgtactctggtggattcgcacgcacgcgtgcatatttttgttccaatgcttctcaggtctgttgcc

SEQ ID NO: 1276 - protein, 71 aa, Triticum aestivum
  misc_feature (6)..(60): Pfam Name: DUF1070 Pfam Description: Protein of unknown function (DUF1070)
  misc_feature: Ceres Clone ID no. 899059
  misc_feature: Bit score of 140.5 for HMM based on sequences of Figure 18
  misc_feature: Functional Homolog Of SEQ ID NO. 1272
  misc_feature: in Figure 18
MARTLFGFVVAAALVLAVFMPALAAAQAPAPAPTSDASSVDQGVAYFLMILALVLTYLIHPLDASSPYKLF

SEQ ID NO: 1277 - DNA, 415 bp, Zea mays
  misc_feature: Ceres Clone ID no. 945132
  misc_feature: Encodes the peptide sequence at SEQ ID NO. 1278
aggcctaggcttttttgaggagcgcggactagggaggacgggacgggggggagagagaggcgcgtgcgttcgtggtcggtgccggtgcgtgcgtgcgtggcgtggtggccgctgccgtacgtgatccgtccaccccctctcctcttccgacgccggcgacagcgggaggtactcccggggaggaatggccgtggcaagggctccgctcggcgcggttgcgatggcggtggccgctctcgtcttcgccatactcatgcccgccgccgctgcggcgcaggcaccggcgcccgcgcccaccagcgacggcacatcaatcgacctggggattgcgtacatccttatgctggttgccctagtgctcacctacctgatccacccgcttgacgcgtcctccccctacaagctcttctgatcc

SEQ ID NO: 1278 - protein, 75 aa, Zea mays
  misc_feature (11)..(64): Pfam Name: DUF1070 Pfam Description: Protein of unknown function (DUF1070)
  misc_feature: Ceres Clone ID no. 945132
  misc_feature: Bit score of 144.5 for HMM based on sequences of Figure 18
  misc_feature: Functional Homolog Of SEQ ID NO. 1272
  misc_feature: in Figure 18
MAVARAPLGAVAMAVAALVFAILMPAAAAAQAPAPAPTSDGTSIDLGIAYILMLVALVLTYLIHPLDASSPYKLF

SEQ ID NO: 1279 - protein, 67 aa, Oryza sativa subsp. japonica
  misc_feature (2)..(56): Pfam Name: DUF1070 Pfam Description: Protein of unknown function (DUF1070)
  misc_feature: Public GI ID no. 115462673
  misc_feature: Bit score of 133.2 for HMM based on sequences of Figure 18
  misc_feature: Functional Homolog Of SEQ ID NO. 1272
  misc_feature: in Figure 18
MARIPFAAIVVAILSFAIAAAAQAPAPSPTSDGTSVDQGIAYLLMIVALVLTYLIHPLDASSAYKLF

SEQ ID NO: 1280 - DNA, 589 bp, Arabidopsis thaliana
  misc_feature: Ceres Clone ID no. 16400
  misc_feature: Encodes the peptide sequence at SEQ ID NO. 1281
cacttcttgctttattcctctcataccgttttctctctctcctccgtcgtctctgcagaatcactctctcgccggagtttttcacctgcagagctctcgattttttctctcgagcatcatcattttcgtcggatcaatcaccaagagatggcgtcgagaaactccgtcaccggattcgcgttgttcagttttgtattcgccgtcatcttatctctcgccggcgctcaatccctggctccagctcctgctcccaccagcgatggaacatcgatagatcaagggatagcgtatttgctaatggtggtggcgttagtgctgacttacctaattcatcctcttgatgcttcttcttcctactccttcttctaatctctctctctctttcttctgtttttttttatttctttgcaacttcttattagtttcttcaatttgccttttttcttcttcttgtggataaaattttcaagagttaatttcatcatcatgttctcgattatgatttctggagattgattgattgatgataatctctactgtttgttcttttttgtttattctcttccatattaaatttattcytcttccc

SEQ ID NO: 1281 - protein, 73 aa, Arabidopsis thaliana
  misc_feature (8)..(62): Pfam Name: DUF1070 Pfam Description: Protein of unknown function (DUF1070)
  misc_feature: Ceres Clone ID no. 16400
  misc_feature: Bit score of 136.1 for HMM based on sequences of Figure 18
  misc_feature: Functional Homolog Of SEQ ID NO. 1272
  misc_feature: in Figure 18
MASRNSVTGFALFSFVFAVILSLAGAQSLAPAPAPTSDGTSIDQGIAYLLMVVALVLTYLIHPLDASSSYSFF

SEQ ID NO: 1282 - DNA, 477 bp, Musa acuminata
  misc_feature: Ceres Clone ID no. 1712201
  misc_feature: Encodes the peptide sequence at SEQ ID NO. 1283
atagaggaggaaatcgattcgaagcacattgcctcccgcagatctctctcctcctcctctctgctccgctcagagaaggaagagagagatctcaggtttgtctgtctgttccagtctttttcgaagcggaggaagatcacggccgagatggcggcaatccctaaagttttagtggccgttttggttctcgccttggcgactgttgtgccgtccgtccaggctcaggctcccgccccatcacctaccagcgacggcacatcaatcgaccaggggattgcttatttgctaatgcttgtggccctggtcctcacctacctcatccaccccttggatgcctccccctacaagctcttctaagcctttctaggtttacatttatgtctgtgaggaagggattggtggtttgtcttgcttgtacttgcatgatcatggtgtgggatttggacattttttaatggaactatcatgttgatttag

SEQ ID NO: 1283 - protein, 69 aa, Musa acuminata
  misc_feature (7)..(59): Pfam Name: DUF1070 Pfam Description: Protein of unknown function (DUF1070)
  misc_feature: Ceres Clone ID no. 1712201
  misc_feature: Bit score of 134.7 for HMM based on sequences of Figure 18
  misc_feature: Functional Homolog Of SEQ ID NO. 1272
  misc_feature: in Figure 18
MAAIPKVLVAVLVLALATVVPSVQAQAPAPSPTSDGTSIDQGIAYLLMLVALVLTYLIHPLDASPYKLF

SEQ ID NO: 1284 - DNA, 231 bp, Populus balsamifera subsp. trichocarpa
  misc_feature: Ceres Annot ID no. 1524669
  misc_feature: Encodes the peptide sequence at SEQ ID NO. 1285
atggcagtttgtgcttcattcaaggcttttattgccgttttggctgttgtttctcttattttggctgttgtctccccttctgttgaggcccagtctcccgctcccgctcctgcacctaccagcgatgggacttcaatcgaccaaggaatcgcatacctgctgatgcttgtggctctggtgctcacatacctgatccacccgctggatgcttcatcctacactttcttttga

SEQ ID NO: 1285 - protein, 76 aa, Populus balsamifera subsp. trichocarpa
  misc_feature (12)..(66): Pfam Name: DUF1070 Pfam Description: Protein of unknown function (DUF1070)
  misc_feature: Ceres Annot ID no. 1524669
  misc_feature: Bit score of 137.2 for HMM based on sequences of Figure 18
  misc_feature: Functional Homolog Of SEQ ID NO. 1272
  misc_feature: in Figure 18
MAVCASFKAFIAVLAVVSLILAVVSPSVEAQSPAPAPAPTSDGTSIDQGIAYLLMLVALVLTYLIHPLDASSYTFF

SEQ ID NO: 1286 - DNA, 222 bp, Sorghum bicolor
  misc_feature: Ceres Annot ID no. 8672987
  misc_feature: Encodes the peptide sequence at SEQ ID NO. 1287
atggctgggatgagggctccgctcggcgtggtggcggtggccgccctcgtcgtcgccatcttcatgcccgccgccgccgcggcgcaggcaccggcgcccgcgcccaccagtgacggcacatcaatcgacctggggatcgcgtacatccttatgctggtggccctggtgctcacctacctgatccacccgctggacgcgtcctctccctacaagctcttgtaa

SEQ ID NO: 1287 - protein, 73 aa, Sorghum bicolor
  misc_feature (9)..(62): Pfam Name: DUF1070 Pfam Description: Protein of unknown function (DUF1070)
  misc_feature: Ceres Annot ID no. 8672987
  misc_feature: Bit score of 131.5 for HMM based on sequences of Figure 18
  misc_feature: Functional Homolog Of SEQ ID NO. 1272
MAGMRAPLGVVAVAALVVAIFMPAAAAAQAPAPAPTSDGTSIDLGIAYILMLVALVLTYLIHPLDASSPYKLL

SEQ ID NO: 1288 - DNA, 467 bp, Triticum aestivum
  misc_feature: Ceres Clone ID no. 1434951
  misc_feature: Encodes the peptide sequence at SEQ ID NO. 1289
aagcccggagtttgtgggagaggaggatttgtcgagagggagggccgcgattcgttgctcttccttcctcctcctgctcgcctccggtgtgggggtgcgctgcggtgcggtgggcggaggggaggtcgagggatcaggagggcgaatcgagggggcgggaggagctagaaggagaggcggcggaaatggcggcgtggacctccgtcggcctggtggcggtggccgtgctggtcgtcggcatcgcaatgccggcctccgccgccgtgcagccgcccgcgcccgcgccctccagcgacggcacgtcgattgaccagggtatcgcatacgtgctgatgctggtggcccttgtgctcacctacctcatccatccgctggacgcctcctccccatacaggctctttctatctaatcaataattcgggttgcacctgtagaggtagctagcagctatgcgatgatgatgattt

SEQ ID NO: 1289 - protein, 76 aa, Triticum aestivum
  misc_feature (8)..(61): Pfam Name: DUF1070 Pfam Description: Protein of unknown function (DUF1070)
  misc_feature: Ceres Clone ID no. 1434951
  misc_feature: Bit score of 127.3 for HMM based on sequences of Figure 18
  misc_feature: Functional Homolog Of SEQ ID NO. 1272
MAAWTSVGLVAVAVLVVGIAMPASAAVQPPAPAPSSDGTSIDQGIAYVLMLVALVLTYLIHPLDASSPYRLFLSNQ

SEQ ID NO: 1290 - DNA, 615 bp, Zea mays
  misc_feature: Ceres Clone ID no. 299745
  misc_feature: Encodes the peptide sequence at SEQ ID NO. 1291
attcagatgcgcagccacgtcgtagcaggcctaggcttttttgaggagcgcggactagggagtagggaggacgggacgggagagagagagagaggcgcgtgcgttcgtggtcggtgccggtgcgtgcgtggcgtggtggccgctgccgtacgtgatccgtccaccccctctcctcttccgacgccggcgacagcgggaggtactcccggggaggaatggccgtggcaagggctccgctcggcgcggttgctgcgatggcggtggccgctctcgtcttcgccatactcatgaccgccgccgctgcggcgcaggcaccggcgcccgcgcccaccagcgacggcacatcaatcgacctggggattgcgtacatccttatgctggttgccctagtgctcacctacctgatccacccgcttgacgcgtcctccccctacaagctcttctgatccctgcgcctttccgtttggtcatgcggttaagggcgcgataggattttgagttaggcaacgtgcttaggtgaggctgggaggtttaggatgatgattgcggtcatctggtcttgcttggtatgatgtattggaggctcgaagctgttggtgttctgattggttttgt

SEQ ID NO: 1291 - protein, 76 aa, Zea mays
  misc_feature (12)..(65): Pfam Name: DUF1070 Pfam Description: Protein of unknown function (DUF1070)
  misc_feature: Ceres Clone ID no. 299745
  misc_feature: Bit score of 138.6 for HMM based on sequences of Figure 18
  misc_feature: Functional Homolog Of SEQ ID NO. 1272
MAVARAPLGAVAAMAVAALVFAILMTAAAAAQAPAPAPTSDGTSIDLGIAYILMLVALVLTYLIHPLDASSPYKLF

SEQ ID NO: 1292 - DNA, 824 bp, Zea mays
  misc_feature: Ceres Clone ID no. 323696
  misc_feature: Encodes the peptide sequence at SEQ ID NO. 1293
agagttgatcgggattcctcgtctctggtctgtctgtgctccacctgactgmatgctgccatggccatgggtagtctcgccttcgccacggcgctcgtcttcgtcttcgccatcgccgtgccggccgtcgcggccgccgcgcaggcccccgccccggcgcccaccagcgacgggacgtcgattgaccagggcatcgcgtacctgctgatgatcatggcgctggtgctcacctacctcatccaccctctggacgcctccgccccgtacaagctcttctgagcgagcagattttttctcctccattttttggtaggctttagtggtggtggtgtgggtgtgggtrarattcggtccctattcattgccatgaattacattcggtttcgcgcgcgtgtgtatattattactcctatatgtcttcaggttcatgctttgatgtccattggttgtcgctttgtgttgcatcgtggagacctcgaggagtagttcttgttcagtagtgcgcatctgacctgacctgaccttccacacgcgaagccttgtggtgtgtgttattggggctttcgcatgatctgaattagtcaaaccgttaaggcactatttcctgatagcaatcgagatcatccattcctgatagcaatcgagatcgtccattcctgatagcaatggagatctttctacccttcagaatacatcccaatccgggagttggaaaccgatccggacggccaagtggagaacttacgtgagctgcggctgagtgttatctacaccgttacgagtttttttttttctattataagactcatttacgcttctctctt

SEQ ID NO: 1293 - protein, 72 aa, Zea mays
  misc_feature (7)..(61): Pfam Name: DUF1070 Pfam Description: Protein of unknown function (DUF1070)
  misc_feature: Ceres Clone ID no. 323696
  misc_feature: Bit score of 131.6 for HMM based on sequences of Figure 18
  misc_feature: Functional Homolog Of SEQ ID NO. 1272
MAMGSLAFATALVFVFAIAVPAVAAAAQAPAPAPTSDGTSIDQGIAYLLMIMALVLTYLIHPLDASAPYKLF

SEQ ID NO: 1294 - protein, 74 aa, Zea mays
  misc_feature (9)..(63): Pfam Name: DUF1070 Pfam Description: Protein of unknown function (DUF1070)
  misc_feature: Public GI ID no. 194695666
  misc_feature: Bit score of 134.3 for HMM based on sequences of Figure 18
  misc_feature: Functional Homolog Of SEQ ID NO. 1272
MAMGSLAFATALVFVFVFAIAVPAVAAAAQAPAPAPTSDGTSIDQGIAYLLMIMALVLTYLIHPLDASAPYKLF

SEQ ID NO: 1295 - DNA, 654 bp, Panicum virgatum
  misc_feature: Ceres Clone ID no. 1771257
  misc_feature: Encodes the peptide sequence at SEQ ID NO. 1296
gagagagagagagaggcgtctgcgtgcgtggtcggtgccggtgcgtggcgtggtggccgtgcggtcccctcttcctctcggcgccggcggacgtgtcggggggaggaatggccgcgccgagggctccgctcggggcggtcgcggtggccgcgctcgtcgtcgccatcttcatgccggccgcggcggcgcaggggccggcgccggctcccaccagcgacggcacatcaatcgacctgggaatcgcgtacatcttgatgctggtggccctggtgctcacctacctgatccacccgctggacgcgtcctctccctacaagctcttctaatccctgttcgttttgtttgttcgtcgatgatgttatgggtctgataggatttttagccatgcaagacgtttaggtgaggtttggagatttagaatgaacgtcaacgtctgatctgatcttggcatgtatggtaagttttttggtggtctgaatgcctgattggttgtatcggattccatgatcttgtgcccagttgtgcttgctgttggccgttgctggattctatttccgctggtcccgcccgggtgctcattgacatgtgctctgccatggatgccgttgcaagttgcaacaccaaacatgtgaaggactgggtcatggctgtgcc

SEQ ID NO: 1296 - protein, 72 aa, Panicum virgatum
  misc_feature (9)..(61): Pfam Name: DUF1070 Pfam Description: Protein of unknown function (DUF1070)
  misc_feature: Ceres Clone ID no. 1771257
  misc_feature: Bit score of 130.1 for HMM based on sequences of Figure 18
  misc_feature: Functional Homolog Of SEQ ID NO. 1272
MAAPRAPLGAVAVAALVVAIFMPAAAAQGPAPAPTSDGTSIDLGIAYILMLVALVLTYLIHPLDASSPYKLF

SEQ ID NO: 1297 - protein, 73 aa, Oryza sativa subsp. japonica
  misc_feature (10)..(62): Pfam Name: DUF1070 Pfam Description: Protein of unknown function (DUF1070)
  misc_feature: Public GI ID no. 115445433
  misc_feature: Bit score of 122.6 for HMM based on sequences of Figure 18
  misc_feature: Functional Homolog Of SEQ ID NO. 1272
MAVAARAPLGVVAVVAVLVVGIFMPAAAQAPAPAPVSDGTSIDLGIAYILMLVALVLTYLIHPLDASSPYKLF

SEQ ID NO: 1298 - DNA, 225 bp, Sorghum bicolor
  misc_feature: Ceres Annot ID no. 8667876
  misc_feature: Encodes the peptide sequence at SEQ ID NO. 1299
atggcgccgatctccagatccacggcggttgtccttgtgatgatggctgtcgtcgtcgccgtgctcgccgccgcggctaacgcccaggcccccgccccagcacccgctaccagtgacggaacaagtgtagaccagggaatcgcctacgtcctgatgctggtggcgcttgtcctcacctacctcatccacccattggacgcctcctccgcctacaagctcttttaa

SEQ ID NO: 1299 - protein, 74 aa, Sorghum bicolor
  misc_feature (10)..(63): Pfam Name: DUF1070 Pfam Description: Protein of unknown function (DUF1070)
  misc_feature: Ceres Annot ID no. 8667876
  misc_feature: Bit score of 117.2 for HMM based on sequences of Figure 18
  misc_feature: Functional Homolog Of SEQ ID NO. 1272
MAPISRSTAVVLVMMAVVVAVLAAAANAQAPAPAPATSDGTSVDQGIAYVLMLVALVLTYLIHPLDASSAYKLF

SEQ ID NO: 1300 - protein, 69 aa, Oryza sativa subsp. japonica
  misc_feature (6)..(58): Pfam Name: DUF1070 Pfam Description: Protein of unknown function (DUF1070)
  misc_feature: Public GI ID no. 115438957
  misc_feature: Bit score of 112.6 for HMM based on sequences of Figure 18
  misc_feature: Functional Homolog Of SEQ ID NO. 1272
MALISRASVLVMAIVAMLATLVNAQAPAPAPTSDGTSVDQGIAYVLMFVALALTYLIHPLDASSAYKLF

SEQ ID NO: 1301 - DNA, 370 bp, Brassica napus
  misc_feature: Ceres Clone ID no. 1100814
  misc_feature: Encodes the peptide sequence at SEQ ID NO. 1302
atacatcatcatcttcttcacaggccttctcatttcatctccgtctctgcagataactctctctctctcgccggatttttcatttcacctgcagagctcacgatcttattcaatggcgtcgagaaactccgtagccggattcgcgttattcacattcgtattcgccgtcttctcgtctctcgccggcgctcaaaccttagctcccgctcctgctcccaccagtgacgggacatcgatagatcaagggatagcgtatttgctaatggtggtggcgctcgtgctcacttacctaatccatcctctcgatgcatcttcttccctcagcttcttctgattttttttttttagtttcattttgagcgcyattatt

SEQ ID NO: 1302 - protein, 73 aa, Brassica napus
  misc_feature (8)..(62): Pfam Name: DUF1070 Pfam Description: Protein of unknown function (DUF1070)
  misc_feature: Ceres Clone ID no. 1100814
  misc_feature: Bit score of 128.0 for HMM based on sequences of Figure 18
  misc_feature: Functional Homolog Of SEQ ID NO. 1272
MASRNSVAGFALFTFVFAVFSSLAGAQTLAPAPAPTSDGTSIDQGIAYLLMVVALVLTYLIHPLDASSSLSFF

SEQ ID NO: 1303 - DNA, 483 bp, Arabidopsis thaliana
  misc_feature: Ceres Clone ID no. 1029710
  misc_feature: Encodes the peptide sequence at SEQ ID NO. 1304
aaaggggtttttggttgtccgtgtcgttcgtcgtctctctcgccggacttgttcattcagatttcgtctctctctctctctcgcactcttctttarttttgtcctccgtaaaatcttgagatggcgtcgaggaactccgttgccgtaatcgctttattcgctttcgttttcgccgtcatctctccattcgccggcgctcaatccttagctcctgctccttcccccactagcgacggaacatcgattgatcaaggaatcgcgtatttgctaatggtggtggcgttggtgctgacgtatctcattcatcctcttgatgcatcttcttcctcctacaccttcttctaatctcttgtatatccaatagtatttggatttctaaatttgagagagtttatgagttctttagtgtttcaacttttcctattttcagtgaacacaaacctctttcgctaatattcagaaattagagatatcttttttgtt

SEQ ID NO: 1304 - protein, 74 aa, Arabidopsis thaliana
  misc_feature (8)..(62): Pfam Name: DUF1070 Pfam Description: Protein of unknown function (DUF1070)
  misc_feature: Ceres Clone ID no. 1029710
  misc_feature: Bit score of 130.6 for HMM based on sequences of Figure 18
  misc_feature: Functional Homolog Of SEQ ID NO. 1272
MASRNSVAVIALFAFVFAVISPFAGAQSLAPAPSPTSDGTSIDQGIAYLLMVVALVLTYLIHPLDASSSSYTFF

SEQ ID NO: 1305 - DNA, 452 bp, Brassica napus
  misc_feature: Ceres Clone ID no. 969326
  misc_feature: Encodes the peptide sequence at SEQ ID NO. 1306
acttcatcatcatcctcacactgtctctctttcctccttctctatcctgcagatactccggcaaacttcctttttcgtcgtatcaaaacaccrgrgagagagagatggcgtcaaggagttacgtagctggtttcgcgttrttcacatttgttttcgccgtcgtctcttctctcgccggcgctcaatccctagctcccgctcctgctcccaccagtgatggtaagcatcatcatattcaacgatatcacattcccttcttcttctctctagtctctccagatctgaatccgagagtgttttttttgtttaatccagggacatcgatagatcaagggattgcgtatctgctaatggtggtggcattggtgctgacatacctcattcatcctctcgatgcatcctcttcctacagcttcttctgatttgtctcttcatttcatcagttctttttt

SEQ ID NO: 1306 - protein, 105 aa, Brassica napus
  misc_feature (8)..(94): Pfam Name: DUF1070 Pfam Description: Protein of unknown function (DUF1070)
  misc_feature: Ceres Clone ID no. 969326
  misc_feature: Bit score of 94.6 for HMM based on sequences of Figure 18
  misc_feature: Functional Homolog Of SEQ ID NO. 1272
  misc_feature (12)..(12): Xaa is any aa, unknown, or other
MASRSYVAGFAXFTFVFAVVSSLAGAQSLAPAPAPTSDGKHHHIQRYHIPFFFSLVSPDLNPRVFFLFNPGTSIDQGIAYLLMVVALVLTYLIHPLDASSSYSFF

SEQ ID NO: 1307 - DNA, 660 bp, Zea mays
  misc_feature: Ceres Clone ID no. 100955392
  misc_feature: Encodes the peptide sequence at SEQ ID NO. 1308
ttctcgtcctgaccccccagagcgagagggaggggcacccagaggagcctgtcgttttgatcggtgtctctgcccccgttcccgcgaggagagaacaacctggagaaaatggcgccgatctccggagccacggcagtccttgtgatggccgtcgtcgccacgctcgccgccgcggctaacgccctggcccccgccccagcacctgctaccagtgacggaacaagtgtagaccagggaatcgcctacgtcctcatgctggtggcgcttgtcctcacctacctcatccacccattggacgcctcctccgcctacaagcagctcttttaaaaccatccgctttgtaatttggcgccaattgagggtgtcattaacggtgttcgattattaatcgatccagtttggccccacaactagaaaaggaaaaaaatgcacacatcttatccttgctacttctaggatcttttcatatgtcttaatttcaatcgagggcgaggccagaagaagccaaattattgcaaatactcgttaagccttgtttagttattttcatttcatttggattaaatgggattgaaagaagttagcaggaattttgacttgctatagatttaaagctacctaatcttgttcaatccacatggattgagattaaatcgaaaa

SEQ ID NO: 1308 - protein, 72 aa, Zea mays
  misc_feature (5)..(60): Pfam Name: DUF1070 Pfam Description: Protein of unknown function (DUF1070)
  misc_feature: Ceres Clone ID no. 100955392
  misc_feature: Bit score of 101.8 for HMM based on sequences of Figure 18
  misc_feature: Functional Homolog Of SEQ ID NO. 1272
MAPISGATAVLVMAVVATLAAAANALAPAPAPATSDGTSVDQGIAYVLMLVALVLTYLIHPLDASSAYKQLF

SEQ ID NO: 1309 - protein, 75 aa, Vitis vinifera
  misc_feature (10)..(65): Pfam Name: DUF1070 Pfam Description: Protein of unknown function (DUF1070)
  misc_feature: Public GI ID no. 225454450
  misc_feature: Bit score of 114.5 for HMM based on sequences of Figure 18
  misc_feature: Functional Homolog Of SEQ ID NO. 1272
MAGCSRVGIGAPGFFAFLFVVVSASFARAQSSAPAPAPTSDGTAIDQGIAYVLMLVALVLTYLIHPLDASSYSFF

SEQ ID NO: 1310 - protein, 73 aa, Picea sitchensis
  misc_feature (9)..(63): Pfam Name: DUF1070 Pfam Description: Protein of unknown function (DUF1070)
  misc_feature: Public GI ID no. 116779724
  misc_feature: Bit score of 102.3 for HMM based on sequences of Figure 18
  misc_feature: Functional Homolog Of SEQ ID NO. 1272
MAFSSLYVTLLVLSVAFLLINLFAPSANAQAPAPAPTSDGTSIDQGIAYVLMFLALALTYLIHPLDAFPYNLF

SEQ ID NO: 1311 - DNA, 210 bp, Populus balsamifera subsp. trichocarpa
  misc_feature: Ceres Annot ID no. 1447561
  misc_feature: Encodes the peptide sequence at SEQ ID NO. 1312
atggctggtgtttccagggttgttgcagctgtagttgctcttcttgttgtttttgccatcgttttgcccattgctcaggcccaagctcctgcccctgcccctaccagtgatgggacatcaattgaccaaggcattgcgtatgtgctgatgatggtggcactagcactcacgtacctcattcacgcggcagacttatcccacagcttctga

SEQ ID NO: 1312 - protein, 69 aa, Populus balsamifera subsp. trichocarpa
  misc_feature (9)..(61): Pfam Name: DUF1070 Pfam Description: Protein of unknown function (DUF1070)
  misc_feature: Ceres Annot ID no. 1447561
  misc_feature: Bit score of 96.0 for HMM based on sequences of Figure 18
  misc_feature: Functional Homolog Of SEQ ID NO. 1272
MAGVSRVVAAVVALLVVFAIVLPIAQAQAPAPAPTSDGTSIDQGIAYVLMMVALALTYLIHAADLSHSF

SEQ ID NO: 1313 - protein, 67 aa, Capsicum annuum
  misc_feature (3)..(57): Pfam Name: DUF1070 Pfam Description: Protein of unknown function (DUF1070)
  misc_feature: Public GI ID no. 20149060
  misc_feature: Bit score of 104.6 for HMM based on sequences of Figure 18
  misc_feature: Functional Homolog Of SEQ ID NO. 1272
MAAVVSMLLAIFSMAFFTVQAQDFAPAPAPTSDGISIDQGIAYVLMLVALVLTYLIHPMDASSYKLF

SEQ ID NO: 1314 - protein, 67 aa, Vitis vinifera
  misc_feature (9)..(63): Pfam Name: DUF1070 Pfam Description: Protein of unknown function (DUF1070)
  misc_feature: Public GI ID no. 225462683
  misc_feature: Bit score of 93.9 for HMM based on sequences of Figure 18
  misc_feature: Functional Homolog Of SEQ ID NO. 1272
MAVSRVSLVVVAIIALLYAVVLPSAHAQSLAPAPAPTSDGTAIDQGIACVLMLVALVLTYLIHPLDA

SEQ ID NO: 1315 - DNA, 532 bp, Glycine max
  misc_feature: Ceres Clone ID no. 595099
  misc_feature: Encodes the peptide sequence at SEQ ID NO. 1316
tccaagttgtcctcatttcaagtctgtgttggttatagaaaagcgcccaagttagagctgagtgtgagataataacaatggcatttctcagagcagcttctgaagttttggcaatctatacccttgtctttaccattttttcacctgctgttcttgaagcacagtctctttcccttgcagctgctcctgctccttccagagatggtacttcaatagaccaaggaattgcatacgtattgatggttgtggcgctggtgctcacgtacctcatccacccctttgacgcgtcttcccatcacttctgaattatctgtactaagaaytttgaacatagtattagtagggactggctggggttgaatttattacgtggataaatatcttctattttttttttgctttattctcttcttatccccctcccaattttacatctttcgtttacttgttaacgatagatgattgctagcggaggaaataatgtattaatataaatattttatttatttaaaggtcatgatctattttagat

SEQ ID NO: 1316 - protein, 75 aa, Glycine max
  misc_feature (12)..(66): Pfam Name: DUF1070 Pfam Description: Protein of unknown function (DUF1070)
  misc_feature: Ceres Clone ID no. 595099
  misc_feature: Bit score of 93.2 for HMM based on sequences of Figure 18
  misc_feature: Functional Homolog Of SEQ ID NO. 1272
MAFLRAASEVLAIYTLVFTIFSPAVLEAQSLSLAAAPAPSRDGTSIDQGIAYVLMVVALVLTYLIHPFDASSHHF

SEQ ID NO: 1317 - DNA, 1309 bp, Panicum virgatum
  misc_feature: Ceres Clone ID no. 1725400
  misc_feature: Encodes the peptide sequence at SEQ ID NO. 1318
attccatcactcgatcgctctcccactcacgtcacggctcacgggtcgccgtcgtcaacatggctcggagctgcagcggcatgatgagtccgacatcatcgtcgtcggtgccggcgacgctgctgctgctggtggtggtgctactgctggcgggcggctgccacggctcgccgccgctgaaggcgcacttctaccggcgcagctgcccggcgccggaggcggtggtgcgcgacatcgtggtggcccgcgtcgccgccgaccccgccgcgctccccgccaagctgctccgcctcttcttccacgactgcttcgtcagagggtgcgacgcgtcggtgctgatcgactcgacgccgggcacgggcggcggcgacggcggcgcggcggagaaggacgcggcgccgaacgcgtcgctgggcgggttcgacgtgatcgacaccgccaaggccgtgctggaggccgtgtgccccggcaccgtctcctgcgccgacatcgtcgcgctcgcggcccgcgacgccgtctccttccagttcgggcgggagctgtgggacgtgcagctggggcggcgcgacggcgtggtgtcgcgggcgtcggaggcggcggcgggcatcccctcgccgtcggacaacttcaccgccctcgaggccaacttcgccgccaagggcctcgacgtcaaggacctcgtcatcctctccggcgcgcacacgatcggcgtggcccactgcaacaccttcgcggcgcgcctgggcggcggctccggctccaactccgccgccggcgccgacccggcgctgaacgcggcgtacgcggcggagctccgggcgcggtgcggcccggcggcggcgtccaacaacgccacggcggtgcccatggaccccgggagccccgcccggttcgacgcgcactacttcgtcaacctcaagctcgggcggggcctcttcgcctccgacgccgcgctgctcgccgaccgccgcgccgcgggcatgatccaccgcctcactaggcaggcccacttcctccgcgagttcaggaacgccgtccgcaagatggggcgcgtcggcgtgctcaccggcgagcgcggggagatccgccgccactgcagggccgtcaaccgccgctgatggagatggacaccacccggcggccggggctctcgcttcgctcgtatgttcttggaagctgctggattttcgcttcgtttttgtttggttgcaggagattaaatataatacgtgtaatttatttggggcgcgattaagttttttttttgttgaagtcgtatatatataatatgtggcgcctattcttgtgg

SEQ ID NO: 1318 - protein, 352 aa, Panicum virgatum
  misc_feature (56)..(315): Pfam Name: peroxidase Pfam Description: Peroxidase
  misc_feature: Ceres Clone ID no. 1725400
  misc_feature: Bit score of 851.6 for HMM based on sequences of Figure 12
  misc_feature: Functional Homolog Of SEQ ID NO. 1318
  misc_feature: in Figure 12
MARSCSGMMSPTSSSSVPATLLLLVVVLLLAGGCHGSPPLKAHFYRRSCPAPEAVVRDIVVARVAADPAALPAKLLRLFFHDCFVRGCDASVLIDSTPGTGGGDGGAAEKDAAPNASLGGFDVIDTAKAVLEAVCPGTVSCADIVALAARDAVSFQFGRELWDVQLGRRDGVVSRASEAAAGIPSPSDNFTALEANFAAKGLDVKDLVILSGAHTIGVAHCNTFAARLGGGSGSNSAAGADPALNAAYAAELRARCGPAAASNNATAVPMDPGSPARFDAHYFVNLKLGRGLFASDAALLADRRAAGMIHRLTRQAHFLREFRNAVRKMGRVGVLTGERGEIRRHCRAVNRR

SEQ ID NO: 1319 - DNA, 1575 bp, Panicum virgatum
  misc_feature: Ceres Clone ID no. 1816881
  misc_feature: Encodes the peptide sequence at SEQ ID NO. 1320
ggcttcggatctagcatgccaccatgcatatgctcacattaaccccttgacaagggcgtccaacgctcccgtgcttcgtgccatgcatatgcccaggtagactagtcgtagtaagctgcaggtatagtactgtagtgtagatcgaccacgaagcaaatcgatctccgcaacaaacacatttatgatcctcaccagcacccactggtaggaatcatatataaagctagctatactaagaaagtgctcatgcatcttgattattgatactccatatatagcaataatcagagagttctattatctccttgtggtgacctgtgtaaaagttgcaagaagctagagcagtagctggtggctattggggtcgtcggtcgatcgatcgatcgatcagctgtccagatagacagatttataggtgatcgagcaagatggtggcgaagggcttgatcacattcacgggcgtgatgagctgggtgctggcggccctgctggtggtcgccgccgccgccggcgtcggcaccgcgtcggcgcaggcggcggggctgaagaaggggttctacaagaagagctgcccgcgggcggaggacatcgcgcgggaggtggtgtgggcgcgcgtcgccggcaaccgcgagctcgccgccaagttcctccgcatgttcttccacgactgcttcgtcaggggctgcgacgcgtcggtgctgctggactcgcggaccaacacggcggagaaggacgcggcgccgaacctgtcgctggccggcttcgacgtgatcgacgaggtgaaggcggcgctggagcgggcgtgccccggcgtcgtctcctgcgccgacatcgtcgcgctcgccgccagggactccgtctcgttccagtacaagaggaacctgtgggaggtggagacggggcggcgcgacggcacggtgtcgagcgaccaggaggcgctggacgacatcccggcgccgacctccaccttcgacatcctcctcgccaacttctccagcaaagggctcggcctccaggacctcgtcgtcctctcaggcggccacacgatcggcatcggacactgcaacctgttcagctcgaggctgttcaacttcaccggcaagaacaaccccagcgacatcgaccccgccctcaacccaccctacgccagattcctacaggggcagtgccggcgcaacctgcagaaccccaacgacaacacgacggtggtgcccatggaccccagcagcagcctctccttcgacaaccactacttcgtcaacctcaaggcgcaccagggcatgttcacctccgacgccacgctgctcaccgacggccgcgccgccaacatcgtcgacaagctgcaggacccgggcgtcttcttcgacgcattcaagaactccatcaagcgcatggggcagatcggcgtgctcaccggtgccaacggccagatcaggaagaaatgcaacgtcgtcaactgatgatctatgagagccatgcaacttaatttatatactatattattctgatgagtcatatatacttgaaattattggtgacatatatgattacctgtgcaacgtgcactgtaatagc

SEQ ID NO: 1320 - protein, 331 aa, Panicum virgatum
  misc_feature (55)..(308): Pfam Name: peroxidase Pfam Description: Peroxidase
  misc_feature: Ceres Clone ID no. 1816881
  misc_feature: Bit score of 840.6 for HMM based on sequences of Figure 12
  misc_feature: Functional Homolog Of SEQ ID NO. 1318
  misc_feature: in Figure 12
MSWVLAALLVVAAAAGVGTASAQAAGLKKGFYKKSCPRAEDIAREVVWARVAGNRELAAKFLRMFFHDCFVRGCDASVLLDSRTNTAEKDAAPNLSLAGFDVIDEVKAALERACPGVVSCADIVALAARDSVSFQYKRNLWEVETGRRDGTVSSDQEALDDIPAPTSTFDILLANFSSKGLGLQDLVVLSGGHTIGIGHCNLFSSRLFNFTGKNNPSDIDPALNPPYARFLQGQCRRNLQNPNDNTTVVPMDPSSSLSFDNHYFVNLKAHQGMFTSDATLLTDGRAANIVDKLQDPGVFFDAFKNSIKRMGQIGVLTGANGQIRKKCNVVN

SEQ ID NO: 1321 - DNA, 1293 bp, Zea mays
  misc_feature: Ceres Clone ID no. 100825990
  misc_feature: Encodes the peptide sequence at SEQ ID NO. 1322
tcgcccaatggctcggagctgcatcatgacggcgacggcgccgccaccactggtcggcgctggcgtccgcctcctggcagtcgtcgtggcgatgctggtggtcgcgggcggcggcggcggcggcggctgctgccacggcgcgctgctgaaggcgcacttctaccggcacagctgccccgcggcggaggcggtggtgcgcgacatcgtgctggcgcgcgtcgccgccgaccccgccaagctcccccccaagctgctccgcctcttcttccacgactgcttcgtcagggggtgcgacgcgtcggtgctgatcgactcgacgccgggcaacacggcggagaaggacgctgcgccgaacgggtcgctgggcggcttcgacgtgatcgacaccgtgaaggccgtgctggaggccgtgtgccccggcaccgtctcctgcgccgacatcgtggcgctcgccgccagggacgccgtctcgttccagttcgggcgggacctgtgggacgtgcagctggggcggcgcgacggcgtagtgtcgcgggcgtcggaggcgctggccaacctcccctcgccgtcgaacaacttcagcaccctcgaggccatcttctccagcaagggcctcgacgtcaaggacctcgtcatcctctcaggcgcgcacacgatcggcgtggcccactgcaacaccttcgcggcgcgcctgtcgggctccaccaccagcgccccgggcgggggcgcggacccggcgctgaacgcggcctacgcggcgcagctgcgggcgcggtgcgggccggcgtcaaccgcgtcgtccaacaacgtgaccgcggtgcccatggaccccggcagccccgcgcggttcgacgcgcactactacgtcaacctcaagctgggccgcggcctcttcgcctccgacgccgcgctgctcgccgaccgccgcgccgccggcatgatccaccgcctcaccaggcagggctacttcctccaggagttcaagaacgccgtgcgcaagatgggccgcgtcggcgtgcgaacgggcgccgcccgcggggagatccgccggaactgcagggccgtcaactagaatgcgccggtccgtcacgtcaacgttcccacctcttctttttctttttttttttgcttatttgtttgtttccatcgatcatcttgtttacattgtatttaggggagtgctaattagtatacatatatacatgtatacctggaactgtacgtcctcgtcatggatactctctcgtgttcatatgtaatgtatagatgtgcagctgtcaaaagtcagatcaa

SEQ ID NO: 1322 - protein, 354 aa, Zea mays
  misc_feature (63)..(318): Pfam Name: peroxidase Pfam Description: Peroxidase
  misc_feature: Ceres Clone ID no. 100825990
  misc_feature: Bit score of 889.2 for HMM based on sequences of Figure 12
  misc_feature: Functional Homolog Of SEQ ID NO. 1318
  misc_feature: in Figure 12
MARSCIMTATAPPPLVGAGVRLLAVVVAMLVVAGGGGGGGCCHGALLKAHFYRHSCPAAEAVVRDIVLARVAADPAKLPPKLLRLFFHDCFVRGCDASVLIDSTPGNTAEKDAAPNGSLGGFDVIDTVKAVLEAVCPGTVSCADIVALAARDAVSFQFGRDLWDVQLGRRDGVVSRASEALANLPSPSNNFSTLEAIFSSKGLDVKDLVILSGAHTIGVAHCNTFAARLSGSTTSAPGGGADPALNAAYAAQLRARCGPASTASSNNVTAVPMDPGSPARFDAHYYVNLKLGRGLFASDAALLADRRAAGMIHRLTRQGYFLQEFKNAVRKMGRVGVRTGAARGEIRRNCRAVN

SEQ ID NO: 1323 - DNA, 1041 bp, Sorghum bicolor
  misc_feature: Ceres Annot ID no. 8722479
  misc_feature: Encodes the peptide sequence at SEQ ID NO. 1324
atgacgccgacgtcgtcgccaccgctcgtcgtcgtccgcctccttgcgtcggccgtggcgacgatgctggtgctcgcgtccggcggcggcgtttgcgacggcgccgcgctgaaggcgcacttctaccggcgcagctgccccgcggcggaggctgtggtccgcgacatcgtggtggcgcgcgtcgccgccgaccccgccgcgctccccgccaagctgctccgcctcttcttccacgactgcttcgtcagggggtgcgacgcgtcggtgctgctggactcgacggcggggaacacggcggagaaggacgcggcgccgaacgggtcgctgggaggcttcgacgtgatcgacacggcgaaggccgtgctggaggccatctgcccaggcaccgtctcctgcgccgacatcgtggcgctcgccgccagggacgccgtgtcgctgcagctcgggcgggacctgtgggacgtgcagctggggcggcgcgacggcgtggtgtcgcgggcgtcggaggcgctggccgacatcccttcgccgtcggacaacttcaccaccctcgaggccagattcggcagcaaaggcctcgacgtcaaggacctcgtcatcctctcaggcgcgcacacgatcggcgtggcccactgcaacaccttcgcgtcacgcctctccggcttcggcagctccaactccggcgccgacccgacgctgaacgcggcgtacgcggcgcagctccggtcgcggtgcggtccggcgccggtggcctcgtcgaacaacgtgacggcggtgaccatggacccgggaagccccgcggggcggttcgacgcgcactactacgtgaacctgaagctggggcggggcctgttcgcgtccgacgccgcgctgctcgccgaccgccgcgccgccgccatgatccaccgcctcaccaggaagggctacttcctccaggagttcaggaacgccgttcgcaagatggggcgcgtcggcgtgcgcaccggcggccgcggggagatccgccggaactgcagggcggtcaactcagatgctatgtga

SEQ ID NO: 1324 - protein, 346 aa, Sorghum bicolor
  misc_feature (53)..(307): Pfam Name: peroxidase Pfam Description: Peroxidase
  misc_feature: Ceres Annot ID no. 8722479
  misc_feature: Bit score of 862.3 for HMM based on sequences of Figure 12
  misc_feature: Functional Homolog Of SEQ ID NO. 1318
  misc_feature: in Figure 12
MTPTSSPPLVVVRLLASAVATMLVLASGGGVCDGAALKAHFYRRSCPAAEAVVRDIVVARVAADPAALPAKLLRLFFHDCFVRGCDASVLLDSTAGNTAEKDAAPNGSLGGFDVIDTAKAVLEAICPGTVSCADIVALAARDAVSLQLGRDLWDVQLGRRDGVVSRASEALADIPSPSDNFTTLEARFGSKGLDVKDLVILSGAHTIGVAHCNTFASRLSGFGSSNSGADPTLNAAYAAQLRSRCGPAPVASSNNVTAVTMDPGSPAGRFDAHYYVNLKLGRGLFASDAALLADRRAAAMIHRLTRKGYFLQEFRNAVRKMGRVGVRTGGRGEIRRNCRAVNSDAM

SEQ ID NO: 1325 - protein, 344 aa, Oryza sativa subsp. japonica
  misc_feature (53)..(307): Pfam Name: peroxidase Pfam Description: Peroxidase
  misc_feature: Public GI ID no. 55701143
  misc_feature: Bit score of 875.9 for HMM based on sequences of Figure 12
  misc_feature: Functional Homolog Of SEQ ID NO. 1318
  misc_feature: in Figure 12
MVRRRPSPAVTTMPVVLVVVVFVGVVVGGASASAGPLKAHYYRHVCPAAEAVVRDIVTARVAADPAALPAKLLRLFFHDCFVRGCDASVLIDTVAGSGAAAAAEKDAAPNGSLGGYDVIDTAKAVLEAVCPGVVSCADIVALAARDAVSYQFGRDLWDVQLGRRDGVVSLASEALANLPAPSDNFTTLESNFAGKGLDVKDLVILSGAHTIGVGHCNLFGARLFNFTGAAAPSADPSLNAAYAAQLRAACGSPSNNATAVPMDPGSPARFDAHYFVNLKLGRGLFASDAALLADRRAAALVHGLTDQDYFLREFKNAVRKMGRVGVLTGDQGEIRKNCRAVNGK

SEQ ID NO: 1326 - protein, 325 aa, Cinnamomum micranthum f. kanehirae
  misc_feature (42)..(289): Pfam Name: peroxidase Pfam Description: Peroxidase
  misc_feature: Public GI ID no. 146335701
  misc_feature: Bit score of 906.3 for HMM based on sequences of Figure 12
  misc_feature: Functional Homolog Of SEQ ID NO. 1318
  misc_feature: in Figure 12
MRTIHLLFLVSVVVFGTLGGCNGGQLRKNFYKKSCPHAEDIVKNIIWKHVASNSSLPAKLLRMHFHDCFVRGCDASVLVNSTANNTAEKDAIPNLSLAGFDVIDEVKAQLETTCPGVVSCADILALSARDSVSFQFKKSMWKVRTGRRDGIVSLASEALANIPSPFSNFTTLTQDFANKGLNVTDLVVLSGAHTIGRGHCNLFSNRLYNFTGNGDADPSLNSTYAAFLKTECQSLSDTTTTVEMDPQSSLSFDSHYYTNLKLNQGLFQSDAALLTNDDASNIVDELRDSADFFTEFAESMKRMGAIGVLTGDSGEIRAKCSVVNS

SEQ ID NO: 1327 - DNA, 969 bp, Populus balsamifera subsp. trichocarpa
  misc_feature: Ceres Annot ID no. 1467253
  misc_feature: Encodes the peptide sequence at SEQ ID NO. 1328
atgaagactgcttttatttttgcttgtgtagcagtcttgacagttgttggggtttgtcaggctggtgatttgaggaaggacttctacaggacctcttgccctgcagctgagagcatcgtcaaaaatatcactgaaacacgtgctgcaagcaaccccaacttacctgcaaagttattgagaatgcattttcatgactgcttcgtaaggggttgcgatgcctccattttaataaactcagcaaatagcacagcggagaaagatgcaattccaaatctatctttggcaaacttcgatgttattgatgagattaaaacggagctagagaacaaatgtgcaggaaaagtatcctgtgctgacattttggctttggctgccagggatgcggtctcattccagttcaaaaaaccaatgtgggaagtgcttactggtagaagagatggtaatgtgtcagtagcttcggaggtcctgacaaacattccttccccattcttaaacttttccagcctcgttcaaagtttcaagagcaagggtctaactgttcatgatctcgttgtactatcaggggcacataccattggtgttggccactgcaacctgttcagcaatcgactctacaacttcacaggaaaagcagaccaggatccttctttgaactcaacatacgctgctttcttaaagaccaaatgccaaagtcttagcgacagaaccaccacagtagagatggaccctggcagctctcagaatttcgatgcttcctactttgttatccttaaacagcaaaagggtctcttccaatctgacgcagcccttctaacagacaaaacttcgagtaatattgttggagagctggttaaatcaactgattttttcaaagaattctcccagtcaatgaaaagaatgggagcaattggggttcttacgggcaactcaggggagatcagaaagacgtgcggcgttatcaattcctga

SEQ ID NO: 1328 - protein, 322 aa, Populus balsamifera subsp. trichocarpa
  misc_feature (40)..(286): Pfam Name: peroxidase Pfam Description: Peroxidase
  misc_feature: Ceres Annot ID no. 1467253
  misc_feature: Bit score of 875.8 for HMM based on sequences of Figure 12
  misc_feature: Functional Homolog Of SEQ ID NO. 1318
  misc_feature: in Figure 12
MKTAFIFACVAVLTVVGVCQAGDLRKDFYRTSCPAAESIVKNITETRAASNPNLPAKLLRMHFHDCFVRGCDASILINSANSTAEKDAIPNLSLANFDVIDEIKTELENKCAGKVSCADILALAARDAVSFQFKKPMWEVLTGRRDGNVSVASEVLTNIPSPFLNFSSLVQSFKSKGLTVHDLVVLSGAHTIGVGHCNLFSNRLYNFTGKADQDPSLNSTYAAFLKTKCQSLSDRTTTVEMDPGSSQNFDASYFVILKQQKGLFQSDAALLTDKTSSNIVGELVKSTDFFKEFSQSMKRMGAIGVLTGNSGEIRKTCGVINS

SEQ ID NO: 1329 - protein, 323 aa, Vitis vinifera
  misc_feature (41)..(287): Pfam Name: peroxidase Pfam Description: Peroxidase
  misc_feature: Public GI ID no. 225436825
  misc_feature: Bit score of 889.3 for HMM based on sequences of Figure 12
  misc_feature: Functional Homolog Of SEQ ID NO. 1318
  misc_feature: in Figure 12
MKANLPLLVSMVVLGVLGVCQGGSLRKKYYKSACPLAEEIVQKVTWRHVSSNPNLPAKLIRMHFHDCFVRGCDGSVLLNSTANSTAERDAAPNLSLAGFDVIDDIKSQLEKTCPGVVSCADILALASRDSVSFQFKKPMWEVLTGRRDGKVSLASEALANIPPPVFNFSSLKQSFASKGLTVHDLVVLSGAHTIGVGHCNGFSNRLYNFTGKGDADPSLNSTYAAFLKTKCRSLSDTTAVEMDPQSSRNFDSNYFAILKQNKGLFQSDAALLTNKGARKIALELQDSADFFTEFAQSMKRMGAIGVLTGRAGEIRKKCSIVNV

SEQ ID NO: 1330 - protein, 324 aa, Picea sitchensis
  misc_feature (44)..(289): Pfam Name: peroxidase Pfam Description: Peroxidase
  misc_feature: Public GI ID no. 116793602
  misc_feature: Bit score of 815.4 for HMM based on sequences of Figure 12
  misc_feature: Functional Homolog Of SEQ ID NO. 1318
  misc_feature: in Figure 12
MAKMATILFSAASFLIFACSLTDAAGGLELNFYDKTCPGVSNVVEAVIAHYISKAPTLAAPLLRMHFHDCFVRGCDGSVLLNSTKSRKAEKEAAPNLTLRGFQVIDAAKAAVEKVCPGVVSCADILALVARDAVHMLGGPFWNVPTGRRDGVVSIQNEAVAKLPPPNGTFSKLKSIFASNGLDVKDLVVLSGGHTIGMSHCNSFSSRLYNFTGKGDMDPSLDKSYAAHLKIKCKPGDNKTIVEMDPGSFRTFDTHYYVNVKKNRGLFQSDAALLTNNEAQSYINKGLESSSFLWDFARSMEKMGRIGVLTGTAGQIRRHCAFTN

SEQ ID NO: 1331 - DNA, 1188 bp, Gossypium hirsutum
  misc_feature: Ceres Clone ID no. 1922578
  misc_feature: Encodes the peptide sequence at SEQ ID NO. 1332
aaagttcttaattagtgatgaaaatgagggccggttatagcattttcatcctccttgtttctcttactttgatcggaatcgtcgatgtttgtaatgctggtaagttgagctataagttttacaaaagaacttgtccgcgagctgagcagatcgtaaaagagattatccaaaaccgaacccaaagtaatccatctttgggtgctcgacttattaggatgcaattccatgactgctttgttaggggatgcgatgcatcagtgctcttggacacagttaataattctacggctgagaaagtagcgataccgaactcatccttaagcggtttcgacgtgatcgacgatatcaagactgcaatcgaaagggcttgccctaaagttgtttcctgtgctgatattcttgccttggcagctcgtgatgctgtttctgcaccttttagtaagcccctgtgggacgttcaacttggaagaagagacggaatggtttcactggcaactgagaccaatggaaacctccctagtccctttgcaaacttcactagtttgattcaactgtttaataggaaaggccttgacgttaatgaccttgttgttctttcaggtgcgcacactattggagttgctcaatgtgcaactttctcaagtaggctttacaacttcacaggcaaaggtgatgctgatccgagcttggatccaacttacgccgaagccttaagaaagcaatgcccgaacccagcaagtccaacaataacagtggaaatggatcctacaagttcattatcattcgacaatcattactacgatatcttattacaaaagaaggggttgtttgtttcagatgctgcacttcttacgaacaggaattccaacaagatcgtgactcggttacagagatcgcgttcttcctttttccctgcatttgccaagtcggtgaagaaaatgggagccattgaagttctcactggaaatgctggagaaatcaggcaaaactgccgtgttgttgacccttgaaatagaatacgagattagtgataaatttgcatcaatttccccaaacaatgatttaattatgaaaaagaagttgaacaagtttttattttctgttttttaatgcccaattaactaatgttgtactgattctgatgcaaatgtaataaataattactcaagaaaagttaatgttttgagc

SEQ ID NO: 1332 - protein, 330 aa, Gossypium hirsutum
  misc_feature (46)..(293): Pfam Name: peroxidase Pfam Description: Peroxidase
  misc_feature: Ceres Clone ID no. 1922578
  misc_feature: Bit score of 870.8 for HMM based on sequences of Figure 12
  misc_feature: Functional Homolog Of SEQ ID NO. 1318
  misc_feature: in Figure 12
MKMRAGYSIFILLVSLTLIGIVDVCNAGKLSYKFYKRTCPRAEQIVKEIIQNRTQSNPSLGARLIRMQFHDCFVRGCDASVLLDTVNNSTAEKVAIPNSSLSGFDVIDDIKTAIERACPKVVSCADILALAARDAVSAPFSKPLWDVQLGRRDGMVSLATETNGNLPSPFANFTSLIQLFNRKGLDVNDLVVLSGAHTIGVAQCATFSSRLYNFTGKGDADPSLDPTYAEALRKQCPNPASPTITVEMDPTSSLSFDNHYYDILLQKKGLFVSDAALLTNRNSNKIVTRLQRSRSSFFPAFAKSVKKMGAIEVLTGNAGEIRQNCRVVDP

SEQ ID NO: 1333 - protein, 331 aa, Nicotiana tabacum
  misc_feature (49)..(296): Pfam Name: peroxidase Pfam Description: Peroxidase
  misc_feature: Public GI ID no. 575605
  misc_feature: Bit score of 854.0 for HMM based on sequences of Figure 12
  misc_feature: Functional Homolog Of SEQ ID NO. 1318
  misc_feature: in Figure 12
MGTAQLLLLSNIFLVFLSIVVCGVSGAGNNVPRKNFYKSTRCPNAEQFVRDITWSKAKNDSTLGAKLLRLHYHDCFVRGCDASILLDKVGTDQFEKEARPNLSLGGFDVIDDIKRQVEEKCPGIVSCADILALATRDAVSFRFKKSLWDVATGRKDGNVSLASEVNGNLPSPFSDFATLQQLFAKKGLNVNDLVALSGAHTIGVAHCGAFSRRLFNFTGKGDVDPSLSSTYAESLKQLCPNPANPATTVEMDPQSSTSFDSNYFNILTQNKGLFQSDAALLTDKKSAKVVKQLQKTNAFFSEFAKSMQKMGAIEVLTGNAGEIRKNCRVRN

SEQ ID NO: 1334 - protein, 329 aa, Nicotiana tabacum
  misc_feature (47)..(294): Pfam Name: peroxidase Pfam Description: Peroxidase
  misc_feature: Public GI ID no. 575603
  misc_feature: Bit score of 854.6 for HMM based on sequences of Figure 12
  misc_feature: Functional Homolog Of SEQ ID NO. 1318
  misc_feature: in Figure 12
MRTAQLLLLSFLVFLSIVVCGVSGAGNNVPRKNFYKNTRCPNAEQFVRDITWSKAKNDATLSAKLLRLHYHDCFVRGCDASILLDKVGTDQSEKEARPNLSLGGFDVIDDIKRQVEEKCPEIVSCADILALAARDAVSFPFKKSLWDVATGRKDGNVSFGSEVNGNLPSPFSDFATLQQLFAKKGLNVNDLVALSGAHTIGVAHCGAFSRRLFNFTGKGDMDPSLNPTYVESLKQLCPNPANPATTVEMDPQSSTSFDSNYFNILTQNKGLFQSDAVLLTDKKSAKVVKQLQKTNTFFSEFAKSMQKMGAIEVLTGNAGEIRKSCRVRN

SEQ ID NO: 1335 - DNA, 1407 bp, Panicum virgatum
  misc_feature: Ceres Clone ID no. 1725430
  misc_feature: Encodes the peptide sequence at SEQ ID NO. 1336
atcactcgatcgacacatccactcgatcgctctctcactcacgtcacggctcacgggtcgccgtcgatcgatatggctcggtgctgcagcggcatgacgagtccgacgtcgtcgtcggtgccgccggcgctgctcgtggcggcgacgctgctgctgctgctggcgggcggctgccacgtgcacggcgcgccgctgaaggcgcacttctaccggcgcagctgcccggcggcggaggcggtggtgcgcgacatcgtgctggccagcgtcgccgccgaccccgccgcgctgcccgccaagctgctccgcctcttcttccacgactgcttcgtcagagggtgcgacgcgtcgatgctgatcgactcgacgccgggcagcggcagcgcggcggcggagaaggacgcggcgccgaacgcgtcgctgggcgggttcgacgtgatcgacaccgccaaggccgtgctggaggccgtgtgccccggcaccgtctcctgcgccgacatcgtcgcgctcgccgcccgggacgccgtctccttccaattcgggcgggacctgtgggacgtgcagctggggcggcgcgacggcgtggtgtcgcgggcgtcggaggcgagggcgagcatcccctcgccgtcgggcaacttcaccgccctcgaggccaacttcgccgccaagggcctcgatgtcaaggacctcgtcatcctctccggagcgcacacgatcggcgtcgcccactgcaacaccttcgcggcgcgcctctccagcggctccggccccaactccgccgccagcgccgacccggcgctgaacgcggcgtacgctgcggagctccgggcgcggtgcggcccggcggcggcgtccaacaacgccaccgcggtgcccatggaccccgggagccccgcccggttcgacgcgcactacttcgtcaacctcaagctcgggcggggcctcttcgcctccgacgccgcgctgctcgccgaccgccgcgcggcggggatgatccacggcctcaccaggcaggaacacttcctccgcgagttcgggaacgccgtccgcaagatggggcgcgtcggcgtgctcaccggcgagcacggggagatccgccggcactgcagggccgtcaacagccgctgatgggcattggttggacacgacccggcggccgccggccggccgggctctcgttcgttcttggaagctgctggatgtgttacgtacttcgcttcgatttttgtttggttgcaggagattttaaatataatacgtgtaatttatttggggtgcgattaagtagttttttttctatcgaagtcgtaatttatttggagtatatcatatatgtggtgcccattgtggaagcacttttggcgccgtggtggagttgagaagggcaataaaaactatattaattaaccc

SEQ ID NO: 1336 - protein, 350 aa, Panicum virgatum
  misc_feature (57)..(313): Pfam Name: peroxidase Pfam Description: Peroxidase
  misc_feature: Ceres Clone ID no. 1725430
  misc_feature: Bit score of 819.0 for HMM based on sequences of Figure 12
  misc_feature: Functional Homolog Of SEQ ID NO. 1318
MARCCSGMTSPTSSSVPPALLVAATLLLLLAGGCHVHGAPLKAHFYRRSCPAAEAVVRDIVLASVAADPAALPAKLLRLFFHDCFVRGCDASMLIDSTPGSGSAAAEKDAAPNASLGGFDVIDTAKAVLEAVCPGTVSCADIVALAARDAVSFQFGRDLWDVQLGRRDGVVSRASEARASIPSPSGNFTALEANFAAKGLDVKDLVILSGAHTIGVAHCNTFAARLSSGSGPNSAASADPALNAAYAAELRARCGPAAASNNATAVPMDPGSPARFDAHYFVNLKLGRGLFASDAALLADRRAAGMIHGLTRQEHFLREFGNAVRKMGRVGVLTGEHGEIRRHCRAVNSR

SEQ ID NO: 1337 - DNA, 1315 bp, Zea mays
  misc_feature: Ceres Clone ID no. 1402519
  misc_feature: Encodes the peptide sequence at SEQ ID NO. 1338
atccaccggccccggccccgatcgctatctgggtcactctcacgtcacgaggtcgcccaatggctcggagctgcagcatgacggcgacggcgccgccaccactggtcggcgccggcgtccgcctcctggcagtcgtcgtggcgatactggtggtcgcgggcggcggcgggcgctgccacggcgcctgctgaaggcgcacttctaccggcacagctgccccgcggcggaggcggtggtgcgcgacatcgtgctggcgcgcgtcgccgccgaccccgccaagctccccgccaagctgctccgcctcttcttccacgactgcttcgtcagggggtgcgacgcgtcggtgctgatcgactcgacgccgggcaacacggcggagaaggacgctgcgccgaacgggtcgctgggcggcttcgacgtgatcgacaccgtgaaggccgtgctggaggccgtgtgccccggcaccgtctcctgcgccgacatcgtggcgctcgccgccagggacgccgtctcgttccagttcgggcgggacctgtgggacgtgcagctggggcggcgcgacggcgtggtgtcgcgggcgtcggaggcgctggccaacctcccctcgccgtcgaacaacttcagcaccctcgaggccatcttctccagcaagggcctcgacgtcaaggacctcgtcatcctctcaggcgcgcacacgatcggtgtggcccactgcaacaccttcgcggcgcgcctgtccggctccaccaccagctccggcgcggacccggcgctgaacgcggcctacgcggcgcagctgcgggcgcggtgcgggccggcgtcaaccgcgtcgtccaacaacgtgaccgcggtgcccatggaccccggcagccccgcgcggttcgacgcgcactactacgtcaacctcaagctgggccgcggcctcttcgcctccgacgccgcgctgctcgccgaccgccgcgccgccggcatgatccaccgcctcaccaggcagggctacttcctccaggagttcaagaacgccgtgcgcaagatgggccgcgtcggcgtgcgaacgggcgccgcccgcggggagatccgccggaactgcagggccgtcaactagaatgcgccggtccgtcacgtcaacgttcccacctcttcttcttcttttttttttttttgcttatttgtttgtttccatcgatcatcttgtttacattgtatttaggggagtgctaattagtatacatatatacatgtatacctggaactgtacgtcctcgtcatggatactctctcgtgttcatatgtaatgtatagatgtgcagctgtc

SEQ ID NO: 1338 - protein, 367 aa, Zea mays
  misc_feature (79)..(331): Pfam Name: peroxidase Pfam Description: Peroxidase
  misc_feature: Ceres Clone ID no. 1402519
  misc_feature: Bit score of 807.5 for HMM based on sequences of Figure 12
  misc_feature: Functional Homolog Of SEQ ID NO. 1318
STGPGPDRYLGHSHVTRSPNGSELQHDGDGAATTGRRRRPPPGSRRGDTGGRGRRRALPRRLLKAHFYRHSCPAAEAVVRDIVLARVAADPAKLPAKLLRLFFHDCFVRGCDASVLIDSTPGNTAEKDAAPNGSLGGFDVIDTVKAVLEAVCPGTVSCADIVALAARDAVSFQFGRDLWDVQLGRRDGVVSRASEALANLPSPSNNFSTLEAIFSSKGLDVKDLVILSGAHTIGVAHCNTFAARLSGSTTSSGADPALNAAYAAQLRARCGPASTASSNNVTAVPMDPGSPARFDAHYYVNLKLGRGLFASDAALLADRRAAGMIHRLTRQGYFLQEFKNAVRKMGRVGVRTGAARGEIRRNCRAVN

SEQ ID NO: 1339 - protein, 325 aa, Cinnamomum micranthum f. kanehirae
  misc_feature (42)..(289): Pfam Name: peroxidase Pfam Description: Peroxidase
  misc_feature: Public GI ID no. 146289957
  misc_feature: Bit score of 903.9 for HMM based on sequences of Figure 12
  misc_feature: Functional Homolog Of SEQ ID NO. 1318
MRTIHLLFLVSVVVFGTLGGCNGGQLRKNFYKKSCPHAEDIVKNIIWKHVASNSSLPAKLLRMHFHDCFVRGCDASVLVNSTANNTAEKDAIPNLSLAGFDVIDEVKAQLETTCPGVVSCADILALSARDSVSFQFKKSMWKVRTGRRDGIVSLASEALANIPSPFSNFTTLTQDFANKGLNVTDLVVLSGAHTIGRGHCNLFSNRLYNFTGNGDADPSLNSTYAAFLKTECQSLSDTTTTVEMDPQSSLSFDSHYYTNLKLKQGLFQSDAALLTNDDASNIVDELRDSADFFTEFAESMKRMGAIGVLTGDSGEIRTKCSVVNS

SEQ ID NO: 1340 - protein, 385 aa, Oryza sativa subsp. japonica
  misc_feature (96)..(349): Pfam Name: peroxidase Pfam Description: Peroxidase
  misc_feature: Public GI ID no. 115436654
  misc_feature: Bit score of 747.3 for HMM based on sequences of Figure 12
  misc_feature: Functional Homolog Of SEQ ID NO. 1318
MPPLSLAHLSPGARSLPRPALALSRVSLCLPSLLQRLPSEGGGGGGGSGLPNARSSERGGSALPFARSAAALRRRRRPGLKKGFYKKSCPKAEEIAQRVVWNRVAGNPELAAKFLRMFFHDCFVRGCDASVLLDSASNTAEKNAAPNLSLAGFEVIEEVKAAVERECAGVVSCADIVALAARDSVSYQYRRSLWEVETGRRDGTVSSDQEALADIPAPTSTFPILLANFSAKGLGLQDLVVLSGGHTIGIGHCNLFSSRLFNFTGKNNPSDVDPSLNPSYARFLQGQCRRNQQDPNDNSTVVPMDPGSSVSFDSHYFVNLKARQGMFTSDATLLTDGRAAALVDKLRDPGVFLDHFKNSIKRMGQIGVLTGAAGQIRKRCNAVNS

SEQ ID NO: 1341 - protein, 325 aa, Cinnamomum micranthum f. kanehirae
  misc_feature (42)..(289): Pfam Name: peroxidase Pfam Description: Peroxidase
  misc_feature: Public GI ID no. 122726082
  misc_feature: Bit score of 894.6 for HMM based on sequences of Figure 12
  misc_feature: Functional Homolog Of SEQ ID NO. 1318
MRFIHLLFLVSVVVFGTLGGCNGGQLRKNFYRKSCPHAEDIVKNIIWKHVASNSSLPAKLLRMHFHDCFVRGCDASVLVNSTANNTAERDAIPNLSLAGFDVIDEVKAQLETTCPGVVSCADILALSARDSVSFQFKKSMWKVRTGRRDGIVSLASEALANIPSPFSNFTTLTQDFANKGLNVTDLVVLSGAHTIGRGHCNLFSNRLYNFTGNGDADPSLNSTYAAFLKTECQSLSDTTTTVEMDPQSSLSFDSHYYTNLKLNQGLFQSDAALLTNDDASNIVDELRDSADFFTKFAESMKRMGAIGVLTGDSGEIRAKCSVVNS

SEQ ID NO: 1342 - protein, 328 aa, Vitis vinifera
  misc_feature (46)..(293): Pfam Name: peroxidase Pfam Description: Peroxidase
  misc_feature: Public GI ID no. 225432418
  misc_feature: Bit score of 768.4 for HMM based on sequences of Figure 12
  misc_feature: Functional Homolog Of SEQ ID NO. 1318
MRSARECLLILLVSLLVFGVVRICNADGLRKNFYKQTSCPQAENVVRNLTRIKVQANPALAAKLIRMQFHDCFVRGCDASILLDRVGTDQTEKDARPNLSLSGYDEINDIKSKLEQACPGVVSCADILALAARDAVSFPSRTPLWDVLTGRRDGNVSLASEVNGNIPSPFSDFSTLKQLFVKKGLNVNDLVALSGAHTIGFAHCGTFSRRLYNFTGKGDADPSLNATYIESLKAQCPNPANAQTTVEMDPQSSGSFDSSYFNILVQNKGLFQSDAALLTDKASSKTVQQLRKPRAFLDEFGKSMKKMAAIGVLTGKAGEIRKQCGVVN

SEQ ID NO: 1343 - protein, 315 aa, Vitis vinifera
  misc_feature (43)..(279): Pfam Name: peroxidase Pfam Description: Peroxidase
  misc_feature: Public GI ID no. 157336355
  misc_feature: Bit score of 669.3 for HMM based on sequences of Figure 12
  misc_feature: Functional Homolog Of SEQ ID NO. 1318
MRPSFVSMLLTLVVCTVVGVCNGQDQLRMKFYHKSCPSVETIVRDITWSKVAASSILPAKLLRLHFHDCFVRGCDASKEALPNRSLSGYDVIDDIKAKIEEECPGVVSCADILALAARDAVSYQFQRPMWQVLTGRKDGRVSLASDIPGNLPPPTADFTSLQQLFASKGLDVMDLVALSGAHTIGVSHCSVIARRLYNFTGKGDADPSLEPDYANKLWRECGSPLNPSTTVDMDPDQSSLSFDSHYFKIVSQNKGLFQSDATLLTNPQSAQMVEMLQHGRLFFVRFAQSMKKMGGIGVLTGDEGEIRKHCSLVNA

SEQ ID NO: 1344 - protein, 337 aa, Oryza sativa subsp. japonica
  misc_feature (46)..(296): Pfam Name: peroxidase Pfam Description: Peroxidase
  misc_feature: Public GI ID no. 115469560
  misc_feature: Bit score of 614.1 for HMM based on sequences of Figure 12
  misc_feature: Functional Homolog Of SEQ ID NO. 1318
MAMAAPLTLVVVAAAVAVVFVGGGVEGWVLKEGFYEQSCPRAEALVKHYVEQHVPLAPSVAATLIRTHFHDCFVRGCDASVLLNGTDGAEAEKDAAPNLTLRGFAFIDRIKSVVESECPGVVSCADILALATRDAISVIGGPFWRVATGRRDGRVSIKQEALDQIPAPTMNFTDLLSSFQSKGLDLADLIWLSGAHTIGIAHCNSFSKRLYNFTGKGGPGDADPSLDAEYAANLRRSKCAAPSDNTTIVEMDPGSFLTFDLGYYRGLLRRRGLFQSDAALVTDAAAEANIASVVSSPPEVFFQVFARSMAKLGMVGVKTGSEGEIRKHCALVNDIHY

SEQ ID NO: 1345 - protein, 335 aa, Oryza sativa subsp. japonica
  misc_feature (44)..(294): Pfam Name: peroxidase Pfam Description: Peroxidase
  misc_feature: Public GI ID no. 55701045
  misc_feature: Bit score of 608.7 for HMM based on sequences of Figure 12
  misc_feature: Functional Homolog Of SEQ ID NO. 1318
MAAPLTLVVVAAAVAVVFVGGGVEGWVLKEGFYEQSCPRAEALVKHYVEQHVPLAPSVAATLIRTHFHDCFVRGCDASVLLNGTDGAEAEKDAAPNLTLRGFAFIDRIKSVVESECPGVVSCADILALATRDAISVIGGPFWRVATGRRDGRVSIKQEALDQIPAPTMNFTDLLSSFQSKGLDLADLIWLSGAHTIGIAHCNSFSKRLYNFTGKGGPGDADPSLDAEYAANLRRSKCAAPSDNTTIVEMDPGSFLTFDLGYYRGLLRRRGLFQSDAALVTDAAAEANIASVVSSPPEVFFQVFARSMAKLGMVGVKTGSEGEIRKHCALVNDIHY

SEQ ID NO: 1346 - DNA, 1516 bp, Zea mays
  misc_feature: Ceres Clone ID no. 1528781
  misc_feature: Encodes the peptide sequence at SEQ ID NO. 1347
gtcatcaccaaacgccggtggagtcactcgagcccgcccgggtctcttcctcttccattgattccattcaagatcactactgttaccagccagccagtcgttcgttaagaagagagcgagcgagcaagagagagagagagggagaagggggaagatcagaacgaagagagggagatgagggggcaaacgcagacagcttccgcggggggccggtggcgaggcgacggcgctgcggcgtggtgttggtggtgggtggccgtggtcctcctgcttggccatttaccgagctgcgcgcgcgcggggctgctggagtccaacccgggcctggcctacaacttctacaagaacagctgccccagcgtggactccatcgtccgcagcgtcacctgggcgcaggtcgccgccaaccctgccctcccggctcgcctcctccgcctccacttccatgactgcttcgtcaagggctgcgacgcgtcgatcctgctggacaccgcgcagagcgagaagacggcggcgccgaacctgtcggtgggcgggtacgaggtgatcgacgcgatcaaggcgcagctggagagggcgtgcccgggcgtggtgtcgtgcgccgacatcgtggcgctggcggcgcgcgacgccgtgtcgtaccagttcaaggcgtcgctgtggcaggtggagacggggcggcgcgacggcacggtgtcgctggcgtccaacacgggggcgctgccgtcgcccttcgcgggcttcgcgggcctgctgcagagcttctcggaccgggggctgaacctgacggacctcgtggcgctgtcgggggcgcacaccatcggcgtggcaagctgctccagcgtcaccccgcgcctgtaccaggggaacgccagcagcgtggacccgctgctggactcggcctacgcgcggacgctcatgtcgtcgtgccccaacccgtcgccggcgtcggccaccgtggcgctggacggaggcacgccgttccggttcgacagcagttactactccagggtgcagcagaagcagggcacgctggcctccgacgccgcgctggcgcagaacgccgccgccgcgcagatggtggccgatctcaccaaccccatcaagttctacgccgccttctccatgtccatgaagaagatgggccgcgtcgacgtgctcaccggcgccaacggccagatcaggaagcagtgccgccaggtcaacacctcctgatcaacaaggcgtcacagggaggggccatggtttttccctcttcgttcttctctttttctgcaccgcctggtattattgttccatgcatccggtttcggctcggcttcggctcggcgcgcatcaaatatatttcgcccccgcgccgtgattgagggccctcctccgacgaaagaaatccattgctttctttgttatttatattagtttactcactgtcctgtgttccattgtcttgccttgcaaaaatgtaagaaagattaaagatgtaagcaaaaaaaaaacaatgcggatcatccactct

SEQ ID NO: 1347 - protein, 346 aa, Zea mays
  misc_feature (67)..(309): Pfam Name: peroxidase Pfam Description: Peroxidase
  misc_feature: Ceres Clone ID no. 1528781
  misc_feature: Bit score of 534.7 for HMM based on sequences of Figure 12
  misc_feature: Functional Homolog Of SEQ ID NO. 1318
MRGQTQTASAGGRWRGDGAAAWCWWWVAVVLLLGHLPSCARAGLLESNPGLAYNFYKNSCPSVDSIVRSVTWAQVAANPALPARLLRLHFHDCFVKGCDASILLDTAQSEKTAAPNLSVGGYEVIDAIKAQLERACPGVVSCADIVALAARDAVSYQFKASLWQVETGRRDGTVSLASNTGALPSPFAGFAGLLQSFSDRGLNLTDLVALSGAHTIGVASCSSVTPRLYQGNASSVDPLLDSAYARTLMSSCPNPSPASATVALDGGTPFRFDSSYYSRVQQKQGTLASDAALAQNAAAAQMVADLTNPIKFYAAFSMSMKKMGRVDVLTGANGQIRKQCRQVNTS

SEQ ID NO: 1348 - DNA, 1014 bp, Sorghum bicolor
  misc_feature: Ceres Annot ID no. 8632045
  misc_feature: Encodes the peptide sequence at SEQ ID NO. 1349
atggctgcttgtacccgcaccagcaccggcagcaacaagccgccgtcgctgtgcctgctcctcctcgtccacgcgctgctgctcgccatcgcgtcgtctcctgccggcggtctccaggtgggcttctaccagcagacctgcccccaggcggagtccatcgttcggaacgtgacctgggcgcgggcggccgcggacccgagcctggccggcaagctgctgcggctctacttccacgactgcttcccgcagggctgcgacgcgtcggtgctgctggacggccggggcacggagaaggcggcgccgccgaaccagtcgctgggcgggctggacgtcgtcgacgccgccaaggcggcgctggaggcggcctgcccgggcaccgtctcctgcgcggacgtcgtggcgctggccacccgcgacgccgtctccttccagttccgccgctcgctgtggcaagtcgagacgggccgccgcgacaaccgcttctccgacgaggcgcacgccacggacctgcccagcccggagttcgtgttcccgctcctcagggactccttcgccaagcgggggctcggcgtccgcgacctcgtcgcgctctccggcgcgcacacgctgggacacacggactgccagttcgtgtcaccgaggctctacaccttccagggcaacggcggggtggacccgttcatcgacccgagctacgcgcgggagctcatgcgccagtgccccgccacgccgccgccgtcgtcgtcgtcgtcgtccggcaaggtggccttggaccctggcagcgagttcacgttcgacaccagctactacgccaccatcaaggccaaccgcggcgcgctgcacacggactccgtgctgctgcacgacgacgaggccgcccgcctcgtcgacgagatgcacgaccaaggcaagttcctcaccgccttcgccgcgtccatccagaagttgggagccttcggcgtcatcaccggcaacaaaggggagatcaggaggaactgccacgtcgtcaactaa

SEQ ID NO: 1349 - protein, 337 aa, Sorghum bicolor
  misc_feature (54)..(302): Pfam Name: peroxidase Pfam Description: Peroxidase
  misc_feature: Ceres Annot ID no. 8632045
  misc_feature: Bit score of 474.7 for HMM based on sequences of Figure 12
  misc_feature: Functional Homolog Of SEQ ID NO. 1318
MAACTRTSTGSNKPPSLCLLLLVHALLLAIASSPAGGLQVGFYQQTCPQAESIVRNVTWARAAADPSLAGKLLRLYFHDCFPQGCDASVLLDGRGTEKAAPPNQSLGGLDVVDAAKAALEAACPGTVSCADVVALATRDAVSFQFRRSLWQVETGRRDNRFSDEAHATDLPSPEFVFPLLRDSFAKRGLGVRDLVALSGAHTLGHTDCQFVSPRLYTFQGNGGVDPFIDPSYARELMRQCPATPPPSSSSSSGKVALDPGSEFTFDTSYYATIKANRGALHTDSVLLHDDEAARLVDEMHDQGKFLTAFAASIQKLGAFGVITGNKGEIRRNCHVVN

SEQ ID NO: 1350 - protein, 339 aa, Zea mays
  misc_feature (52)..(300): Pfam Name: peroxidase Pfam Description: Peroxidase
  misc_feature: Public GI ID no. 194701190
  misc_feature: Bit score of 568.0 for HMM based on sequences of Figure 12
  misc_feature: Functional Homolog Of SEQ ID NO. 1318
MKKSSMMAPMTIMARVAAVLVLSSAAMASAAGAAGLDMNFYGSTCPRVEAIVKEEMVAILKAAPTLAGPLLRLHFHDCFVRGCDASVLLDSTPTSTAEKDATPNLTLRGFGSVQRVKDRLEEACPGTVSCADVLALMARDAVVLANGPSWPVALGRRDGRVSLANETNQLPPPTANFTRLVSMFAAKGLSVRDLVVLSGGHTLGTAHCNLFSDRLYNFTGANSLADVDPALDAAYLARLRSRCRSLADNTTLNEMDPGSFLSFDSSYYSLVARRRGLFHSDAALLTDPATRAYVQRQATGLFTAEFFRDFADSMVKMSTIDVLTGQQQGEIRKKCNLVN

SEQ ID NO: 1351 - DNA, 1035 bp, Sorghum bicolor
  misc_feature: Ceres Annot ID no. 8659657
  misc_feature: Encodes the peptide sequence at SEQ ID NO. 1352
atgaggaggcaaacagcggcttccgggggacggtggcgaggaggcgacggcagcgttgctgcggcgtggtgggtgggcgtggtggtcctgggtggccatttactgagctgcgcgcaggcggggctgctggagtccaacccggggctggcctacaacttctaccagaagagctgccccagcgtggactccatcgtccgcagcgtcacctgggcgcaggtcgccgccaaccccgccctcccggctcgcctcctccgcctccacttccatgactgcttcgtcaagggctgcgacgcgtcgatcctgctggacaacgcgcagagcgagaagacggcggcgccgaacctatccgtgggcgggtacgaggtgatcgacgccatcaaggcgcagctcgagaaggcgtgcccgggcgtggtctcgtgcgccgacatcctcgcgctggcggcgcgcgacgccgtctcgtaccagttcaggtcctcgctgtggcaggtggagacgggccggcgggacggcaccgtgtcgctggcgtccaacacgggcacgctgccgtcgccgttcgccgggttcgcgggcctgctgtcgagcttcgccaaccgcgggctcaacctgacggacctcgtcgcgctgtcgggcgcgcacaccatcggcgtggccagctgctccagcgtcaccccgcgcctgtaccaggggaacgccaccgccgtcgacccgctcctcgactccgcctacgccaagacgctcatgtcgtcgtgccccaacccgtcccccgccgccgccaccgtcggcctcgacggcggatcgccgttcaagttcgacagcgggtactacgccagggtgcagcagaaccaggggacgctggcctccgacgccgcgctggcgcagaacgccgcggcggcgcagatggtggccgacctcaccaaccccatcaagttctacgccgccttctccatgtccatgaagaagatgggacgcgtcgaggtgctcaccggcaccaatggacagatcaggaagcagtgccgccaggtcaacacctcctga

SEQ ID NO: 1352 - protein, 344 aa, Sorghum bicolor
  misc_feature (65)..(307): Pfam Name: peroxidase Pfam Description: Peroxidase
  misc_feature: Ceres Annot ID no. 8659657
  misc_feature: Bit score of 537.5 for HMM based on sequences of Figure 12
  misc_feature: Functional Homolog Of SEQ ID NO. 1318
MRRQTAASGGRWRGGDGSVAAAWWVGVVVLGGHLLSCAQAGLLESNPGLAYNFYQKSCPSVDSIVRSVTWAQVAANPALPARLLRLHFHDCFVKGCDASILLDNAQSEKTAAPNLSVGGYEVIDAIKAQLEKACPGVVSCADILALAARDAVSYQFRSSLWQVETGRRDGTVSLASNTGTLPSPFAGFAGLLSSFANRGLNLTDLVALSGAHTIGVASCSSVTPRLYQGNATAVDPLLDSAYAKTLMSSCPNPSPAAATVGLDGGSPFKFDSGYYARVQQNQGTLASDAALAQNAAAAQMVADLTNPIKFYAAFSMSMKKMGRVEVLTGTNGQIRKQCRQVNTS

SEQ ID NO: 1353 - protein, 308 aa, Oryza sativa subsp. indica
  misc_feature (20)..(270): Pfam Name: peroxidase Pfam Description: Peroxidase
  misc_feature: Public GI ID no. 125535203
  misc_feature: Bit score of 488.9 for HMM based on sequences of Figure 12
  misc_feature: Functional Homolog Of SEQ ID NO. 1318
MAQLDVGFYSKTCPKVEEIVREEMIRILAVAPTLAGPLLRLHFHDCFVRGCDGSVLIDSTASNTAEKDAPPNQTLRGFGSVQRIKARLDAACPGTVSCADVLALMARDAVALSGGPRWPVPLGRRDGRVSAANDTATQLPPPTANITQLARMFAAKGLDLKDLVVLSGGHTLGTAHCSAFTDRLYNFTGADNDADVDPALDRSYLARLRSRCASLAADNTTLAEMDPGSFLTFDAGYYRLVARRRGLFHSDSSLLADAFTAGYVRRQATGMYAAEFFRDFAESMVKMGGVGVLTGEEGEIRKKCYVIN

SEQ ID NO: 1354 - DNA, 1563 bp, Zea mays
  misc_feature: Ceres Clone ID no. 293854
  misc_feature: Encodes the peptide sequence at SEQ ID NO. 1355
acaacaagcagaagcagaagcagaagctagcagctagtagacgagcgacgagtagctagctagctagctatctagagagctcatcatatcgctgctcgctctcatccaccattatagagaagagcagatcgagctgcagctggcagaggccgagttgttgctagctagctcctgcttgctaaatttgcatcgtatccgatccattccatgaagaagtcgtcgatgatggcgcccatgacgatcatggcgagagttgccgctgtgctcgtcctctcgtcggctgccatggcttccgccgcaggagcagctgggctggacatgaatttctacggcagcacgtgcccgcgcgtggaggccatcgtcaaggaggagatggtggcgatcctcaaggcggcgccgacgctggccggcccgctgctccgcctccatttccacgactgcttcgtcaggggctgcgacgcctccgtgctcctggactcgactcccaccagcacggcggagaaggacgccaccccgaacctcaccctccggggcttcggctccgtgcagcgcgtcaaggaccggctggaggaggcgtgcccgggcaccgtctcctgctccgacgtcctggcgctcatggcgcgcgacgccgtcgtgctggccaacggcccctcctggcccgtcgcgctgggccgccgcgacggccgcgtctccctcgccaacgagaccaaccagctgcccccgcccaccgccaacttcacccgcctcgtcagcatgttcgccgccaagggcctctccgtcagggacctcgtcgtgctctccggcggccacaccctcggcaccgcgcactgcaacctcttcagcgaccgcctctacaacttcaccggcgccaacagcctcgccgacgtcgacccggcgctcgacgccgcctacctcgcccgcctcaggtccaggtgccggagcctcgccgacaacaccacgctcaacgagatggaccccggcagcttcctcagcttcgactccagctactacagcctggtggccaggcgccgggggctcttccactccgacgccgcgctgctcaccgacccggccaccagggcgtacgtccagcgccaggccacggggctcttcaccgccgagttcttccgcgacttcgccgactccatggtcaagatgtccaccatcgacgtgctcaccggccagcagcagggcgagatcagaaagaaatgcaacctcgtcaactgacaaataatacgtacattaattgctgctggttttgacgatgcctttcacttacgttcatccacttaattcatgcatccatgttggttgggttcattcaattattatattcgttgcttacctttacttttgcttggttaatcttaattaaatcgtgtgagttttcttttcttttcttgagtatatatatgtatgtacgtagagcgtgatgagtgtcttttcaagtttattgtttttttttactttttcctctcgtgcatatggttcaaatccatgatgatgatgtaatgcatgtaattaataatgacaatcaagtcaataaacacacatgcaatttac

SEQ ID NO: 1355 - protein, 339 aa, Zea mays
  misc_feature (52)..(300): Pfam Name: peroxidase Pfam Description: Peroxidase
  misc_feature: Ceres Clone ID no. 293854
  misc_feature: Bit score of 562.7 for HMM based on sequences of Figure 12
  misc_feature: Functional Homolog Of SEQ ID NO. 1318
MKKSSMMAPMTIMARVAAVLVLSSAAMASAAGAAGLDMNFYGSTCPRVEAIVKEEMVAILKAAPTLAGPLLRLHFHDCFVRGCDASVLLDSTPTSTAEKDATPNLTLRGFGSVQRVKDRLEEACPGTVSCSDVLALMARDAVVLANGPSWPVALGRRDGRVSLANETNQLPPPTANFTRLVSMFAAKGLSVRDLVVLSGGHTLGTAHCNLFSDRLYNFTGANSLADVDPALDAAYLARLRSRCRSLADNTTLNEMDPGSFLSFDSSYYSLVARRRGLFHSDAALLTDPATRAYVQRQATGLFTAEFFRDFADSMVKMSTIDVLTGQQQGEIRKKCNLVN

SEQ ID NO: 1356 - DNA, 1566 bp, Zea mays
  misc_feature: Ceres Clone ID no. 1559089
  misc_feature: Encodes the peptide sequence at SEQ ID NO. 1357
gcagaagcagaagctagtagacgagcgacgagtagctagctagctatctagagagctcatcatatcgctgctcgctctcatccaccattatattatacagaagagcagatcgagctgcaggcagaggccgagttgttgctagctagctcctgcttgctaaatttgcatcgtatccgatccattccatgaagaagtcgtcgatgatggcgcccatgacgatcatggcgagcgttgccgctgtgctcgtcctctcgtcggctagcatggcttccgccgcagatgcagctgggctggacatgaatttctacggcagcacgtgcccgcgcgtggaggccatcgtcaaggaggagatggtggcgatcctcaaggcggcgccgacgctggccggcccgctgctccgcctccatttccacgactgcttcgtcaggggctgcgacgcctccgtgctcctggactcgactcccaccagcacggcggagaaggacgccaccccgaacctcaccctccggggcttcggctccgtgcagcgcgtcaaggaccggctggagcaggcgtgcccgggcaccgtctcctgcgccgacgtcctggcgctcatggcgcgcgacgccgtcgtgctggccaacggtccctcctggcccgtcgcgctgggccgccgcgacggccgcgtctccctcgccaacgagaccaaccagctgcccccgcccaccgccaacttcacccgcctcgtcagcatgttcgccgccaagggcctctccgtcagggacctcgtcgtgctctccggcggccacaccctcggcaccgcgcactgtaacctcttcagcgaccgcctctacaacttcaccggcgccaacagcctcgccgacgtcgacccggcgctcgacgccgcctacctcgcccgcctcaggtccaggtgccggagcctcgccgacaacaccacgctcaacgagatggaccccggcagcttcctcagcttcgactccagctattacagcctggtggccaggcgccgggggctcttccactctgacgccgcgctgctcaccgacccggccaccagggcgtacgtccagcgccaggccacggggctcttcaccgccgagttcttccgcgacttcgccgactccatggtcaagatgtccaccatcgacgtgctcacaggccagcagcagggcgagatcaggaagaaatgcaacctcgtcaactgacaaataatacgtacaattaattgctgctggttttgacgatgcctttcacttaattcatccacttaattcatgcatgcatgttggttgggttcattcaattattatattcgttgcttacctttacttttgcttggttaatcttaattaaatcgtgtgagttttcttttcttttcttgagtatatatatgtatgtacgtacgtagagcgtgatgagtgtcttttcaagtttattgtttttttttactttttcctctcgtgcatatggttcaaatccattatgatgatgatgtaatgcatataattaataatgacaatcaagtcaataaacacacatgcaatttatatatgatatgttcatcat

SEQ ID NO: 1357 - protein, 339 aa, Zea mays
  misc_feature (52)..(300): Pfam Name: peroxidase Pfam Description: Peroxidase
  misc_feature: Ceres Clone ID no. 1559089
  misc_feature: Bit score of 567.5 for HMM based on sequences of Figure 12
  misc_feature: Functional Homolog Of SEQ ID NO. 1318
MKKSSMMAPMTIMASVAAVLVLSSASMASAADAAGLDMNFYGSTCPRVEAIVKEEMVAILKAAPTLAGPLLRLHFHDCFVRGCDASVLLDSTPTSTAEKDATPNLTLRGFGSVQRVKDRLEQACPGTVSCADVLALMARDAVVLANGPSWPVALGRRDGRVSLANETNQLPPPTANFTRLVSMFAAKGLSVRDLVVLSGGHTLGTAHCNLFSDRLYNFTGANSLADVDPALDAAYLARLRSRCRSLADNTTLNEMDPGSFLSFDSSYYSLVARRRGLFHSDAALLTDPATRAYVQRQATGLFTAEFFRDFADSMVKMSTIDVLTGQQQGEIRKKCNLVN

SEQ ID NO: 1358 - protein, 335 aa, Oryza sativa subsp. japonica
  misc_feature (47)..(297): Pfam Name: peroxidase Pfam Description: Peroxidase
  misc_feature: Public GI ID no. 115486535
  misc_feature: Bit score of 520.6 for HMM based on sequences of Figure 12
  misc_feature: Functional Homolog Of SEQ ID NO. 1318
MASSPTMLVVMCSSLAMAVILSSSSPAMAQLDVGFYSKTCPKVEEIVREEMIRILAVAPTLAGPLLRLHFHDCFVRGCDGSVLIDSTASNTAEKDAPPNQTLRGFGSVQRIKARLDAACPGTVSCADVLALMARDAVALSGGPRWAVPLGRRDGRVSAANDTTTQLPPPTANITQLARMFAAKGLDMKDLVVLSGGHTLGTAHCSAFTDRLYNFTGANNAGDVDPALDRSYLARLRSRCASLAGDNTTLAEMDPGSFLTFDAGYYRLVARRRGLFHSDSSLLDDAFTAGYVRRQATGMYAAEFFRDFAESMVKMGGVGVLTGGEGEIRKKCYVIN

SEQ ID NO: 1359 - protein, 331 aa, Oryza sativa subsp. japonica
  misc_feature (45)..(292): Pfam Name: peroxidase Pfam Description: Peroxidase
  misc_feature: Public GI ID no. 115467740
  misc_feature: Bit score of 499.0 for HMM based on sequences of Figure 12
  misc_feature: Functional Homolog Of SEQ ID NO. 1318
MAISRCCVALLLLVVLVAAGSAAAAADQLRVDYYRETCPNVEAIVRDEMEKIIGAAPSLAGPLLRLHFHDCFVRGCDASVLLSSTAGNVAERDAKPNKSLRGFGSVERVKARLEAACPGTVSCADVLTLMARDAVVLARGPTWPVALGRRDGRVSAAGEAAASLPPADGDIATLLRIFAANDLDIKDLAVLSGAHTLGTAHCPSYAGRLYNFTGKNDADPSLDGEYAGRLRARCASATDESGMISEMDPGSYKTFDTSYYRHVAKRRGLFSSDASLLTDATTRDYVRRIATGKFDAEFFSDFGESMTKMGNVQVLTGEEGEIRKKCYVINS

SEQ ID NO: 1360 - protein, 331 aa, Oryza sativa subsp. indica
  misc_feature (45)..(292): Pfam Name: peroxidase Pfam Description: Peroxidase
  misc_feature: Public GI ID no. 125555057
  misc_feature: Bit score of 499.1 for HMM based on sequences of Figure 12
  misc_feature: Functional Homolog Of SEQ ID NO. 1318
MAIARCCVALLLLVVLVAAGSAAAAADQLRVDYYRETCPNVEAIVRDEMEKIIGAAPSLAGPLLRLHFHDCFVRGCDASVLLSSTAGNVAERDAKPNKSLRGFGSVERVKARLEAACPGTVSCADVLTLMARDAVVLARGPTWPVALGRRDGRVSAAGEAAASLPPADGDIATLLRIFAANDLDIKDLAVLSGAHTLGTAHCPSYAGRLYNFTGKNDADPSLDGEYAGRLRARCASATDESGMISEMDPGSYKTFDTSYYRHVAKRRGLFSSDASLLTDATTRDYVRRIATGKFDAEFFSDFGESMTKMGNVQVLTGEEGEIRKKCYVINS

SEQ ID NO: 1361 - protein, 350 aa, Arabidopsis thaliana
  misc_feature (62)..(313): Pfam Name: peroxidase Pfam Description: Peroxidase
  misc_feature: Public GI ID no. 15225011
  misc_feature: Bit score of 571.7 for HMM based on sequences of Figure 12
  misc_feature: Functional Homolog Of SEQ ID NO. 1318
MANKSLEIRFLFPLVLFLVVKLLCVDGKGFNNNGHKIRKGRWEGKLKMNFYHNSCPGAEDIVRQIVWKKVEANRSLAPKLLRVHYHDCFVRGCDASLLLDSVAGKAVSEKEARPNLSLSGFEIIDEIKYILEKRCPNTVSCADILTLAARDAVSYEFERPLWNVFTGRVDGRVSLATEAARDLPSAGANFTTLQKLFAESDLDVVDLVALSGAHTIGIAHCGVFGRRLLNFTGKGDTDPSLNPSYASFLKSECSDKSLRLNPSAVVGMDPTGPLAFDSGYFVSLLKNKGLFTSDAALLTDPSAAHIASVFQNSGAFLAQFGRSMIKMSSIKVLTLGDQGGEIRKNCRLVN

SEQ ID NO: 1362 - DNA, 1035 bp, Sorghum bicolor
  misc_feature: Ceres Annot ID no. 8643832
  misc_feature: Encodes the peptide sequence at SEQ ID NO. 1363
atggccgcggcagcagcggcgaccaccgccaccaccaggactgcacctcgtcccatggtggccgtagcagtgctaatagtcgtcctgtgtgctacatcagttgccgggcaggggcagctccagctccaggtcggctactacaacaagacgtgcccggcggcggagcagatcgtgcgcaacgagacgacggccgccatccaggcctcgccggacctcgccgccgcgctcctcaggctgcactaccacgactgcttcgtccaggggtgcgacgcgtccgtgctgctggactcgacgcccaacaacacggcggagaaggattcgctgcccaacggcagcctccgcggcttcgacgtcgtggcgcgggtcaaggaccagctggagacggcgtgcccgggcaccgtctcctgcgcggacatcctggcgctcatggcgcgcgacgccgtctcgctggccaagggccctacctggcccgtcgcgctgggccgccgcgacggccgcacctccagcgccgccagctgcggggagctcccgccgctgcacggcgacatcgggctcatggtgcaggcgttcgccgccaagggcctcgacgtcaaggacctcgccgtgctgtcgggggcgcacacgctggggaaggcgcactgctcgtcctacgccgaccgcctctacgcctccgccagctgcgccacgcccgacccggcactcgacgcgcgctacgccgccaggctgcggatgcgctgccccagcgctggcgacggcaacaacgctacggcggcgtcggagctcgaccccggcagctgcaccaccttcgacaccagctactaccgccacgtcgcgcggaggcgcggcctgctccgctccgacgcctcgctgctggaccaccgcttcaccagggcctacgtgctgcaggtcgcctccggcaggatcgacggccactacttccacgatttcaccgtctccatggccaagatggcggccatcggtgtgctcaccggcgaccagggcgagatcaggagaaagtgcaacgtcgtcaactga

SEQ ID NO: 1363 - protein, 344 aa, Sorghum bicolor
  misc_feature (58)..(306): Pfam Name: peroxidase Pfam Description: Peroxidase
  misc_feature: Ceres Annot ID no. 8643832
  misc_feature: Bit score of 466.5 for HMM based on sequences of Figure 12
  misc_feature: Functional Homolog Of SEQ ID NO. 1318
MAAAAAATTATTRTAPRPMVAVAVLIVVLCATSVAGQGQLQLQVGYYNKTCPAAEQIVRNETTAAIQASPDLAAALLRLHYHDCFVQGCDASVLLDSTPNNTAEKDSLPNGSLRGFDVVARVKDQLETACPGTVSCADILALMARDAVSLAKGPTWPVALGRRDGRTSSAASCGELPPLHGDIGLMVQAFAAKGLDVKDLAVLSGAHTLGKAHCSSYADRLYASASCATPDPALDARYAARLRMRCPSAGDGNNATAASELDPGSCTTFDTSYYRHVARRRGLLRSDASLLDHRFTRAYVLQVASGRIDGHYFHDFTVSMAKMAAIGVLTGDQGEIRRKCNVVN

SEQ ID NO: 1364 - protein, 328 aa, Populus balsamifera subsp. trichocarpa
  misc_feature (41)..(290): Pfam Name: peroxidase Pfam Description: Peroxidase
  misc_feature: Public GI ID no. 118484065
  misc_feature: Bit score of 595.7 for HMM based on sequences of Figure 12
  misc_feature: Functional Homolog Of SEQ ID NO. 1318
MRGFGYFVVMFFCLLVFMGSTEGQLQMGFYSRSCPNAEKIVQDYVNRHVHNAPSVAATILRMHFHDCFVRGCDASLLLNTTSSGNQTEKLATPNVTLRGFDFIDRVKSLLEAACPGVVSCADVIALVARDAVVATGGPFWKVPTGRRDGTISRSSEASNNIPPPTSNFTSLQRLFANQGLDLKDLVVLSGAHTIGVSHCSSFSNRLYNFTGVLGTQDPALDSEYAANLKARKCRSLNDNTTIVEMDPGSFRTFDLSYYGHLLKRRGLFQSDSALTTNSTTLSFVNQLLQGSLENFFAEFADSMEKMGRINVKTGTVGEIRKQCAVVNS

SEQ ID NO: 1365 - DNA, 987 bp, Populus balsamifera subsp. trichocarpa
  misc_feature: Ceres Annot ID no. 1488035
  misc_feature: Encodes the peptide sequence at SEQ ID NO. 1366
atgagggggtttggttattttgtggtaatgttcttctgtcttttggtatttatgggctcaactgaaggacaattgcagatgggtttttactctaggagctgcccgaatgctgagaagattgtgcaggactatgttaacaggcatatccataatgctccatcagtggcagcaaccatcctaagaatgcatttccatgattgttttgttaggggttgcgatgcatctctgcttctgaacacaacttcaagcggtaaccaaactgaaaagttggcaactccaaatgtaacactgagaggctttgatttcattgacagagttaagagcctgttagaagcagcatgccctggtgtagtctcctgtgctgatgttattgctttggttgcaagggatgctgttgtagccactggtggtccattctggaaagtccctacaggccgaagagacgggacaatttcaagatcctcagaggcctcgaacaacatcccccctccaactagcaacttcaccagtctacaaagactttttgctaaccagggactggacttgaaagacctggtcgtgctatcaggtgctcacacaatcggggtatcacattgttcatcattctcgaatcgcctttacaatttcactggagtgctaggtactcaggacccagcgctagatagcgaatacgctgccaatctcaaggcaaggaagtgcagaagtcttaatgacaataccactatagtagaaatggaccctggaagtttcaggacatttgatcttagctactacgggcacttactcaagagacgaggtctcttccagtctgattctgccttaaccacaaactccactacattgtcattcgtcaaccagctgctccaaggttcacttgagaatttctttgctgaattcgcagattccatggagaaaatgggcagaatcaacgttaagactggcacagttggagagattagaaagcagtgtgcagtggtgaatagctaa

SEQ ID NO: 1366 - protein, 328 aa, Populus balsamifera subsp. trichocarpa
  misc_feature (41)..(290): Pfam Name: peroxidase Pfam Description: Peroxidase
  misc_feature: Ceres Annot ID no. 1488035
  misc_feature: Bit score of 595.0 for HMM based on sequences of Figure 12
  misc_feature: Functional Homolog Of SEQ ID NO. 1318
MRGFGYFVVMFFCLLVFMGSTEGQLQMGFYSRSCPNAEKIVQDYVNRHIHNAPSVAATILRMHFHDCFVRGCDASLLLNTTSSGNQTEKLATPNVTLRGFDFIDRVKSLLEAACPGVVSCADVIALVARDAVVATGGPFWKVPTGRRDGTISRSSEASNNIPPPTSNFTSLQRLFANQGLDLKDLVVLSGAHTIGVSHCSSFSNRLYNFTGVLGTQDPALDSEYAANLKARKCRSLNDNTTIVEMDPGSFRTFDLSYYGHLLKRRGLFQSDSALTTNSTTLSFVNQLLQGSLENFFAEFADSMEKMGRINVKTGTVGEIRKQCAVVNS

SEQ ID NO: 1367 - protein, 350 aa, Arabidopsis thaliana
  misc_feature (62)..(313): Pfam Name: peroxidase Pfam Description: Peroxidase
  misc_feature: Public GI ID no. 51970718
  misc_feature: Bit score of 568.9 for HMM based on sequences of Figure 12
  misc_feature: Functional Homolog Of SEQ ID NO. 1318
MANKSLEIRFLFPLVLFLVVKLLCVDGKGFNNNGHKIRKGRWEGKLKMNFYHNNCPGAEDIVRQIVWKKVEANRSLAPKLLRVHYHDCFVRGCDASLLLDSVAGKAVSEKEARPNLSLSGFEIIDEIKYILEKRCPNTVSCADILTLAARDAVSYEFERPLWNVFTGRVDGRVSLATEAARDLPSAGANFTTLQKLFAESDLDVVDLVALSGAHTIGIAHCGVFGRRLLNFTGKGDTDPSLNPSYASFLKSECSDKSLRLNPSAVVGMDPTGPLAFDSGYFVSLLKNKGLFTSDAALLTDPSAAHIASVFQNSGAFLAQFGRSMIKMSSIKVLTLGDQGGEIRKNCRLVN

SEQ ID NO: 1368 - DNA, 969 bp, Solanum lycopersicum
  misc_feature: Ceres Annot ID no. 8464351
  misc_feature: Encodes the peptide sequence at SEQ ID NO. 1369
atggcaacattaacatttctttcatttctcattcttcaactctttttgattactaataattgtgaaggtgtagaagtaggattctacaagaaaacatgtccaaatgtggaagcaattgtcaaagaaacaacaaaacactacatttctattgctcctactttggctgcccctttgttaagaatgcacttccatgattgttttgttaggggatgtgatggttcggtgctactaaattcaacaaaaggaaataaagcagagaaagatgcaattccaaatcaaagcctaagaggatttcaagtgatagatgctgctaaatctgctttggaaaaagagtgtcctggcattgtatcttgctctgatattctagccttagctgctcgtgacgctgtttcactgataaatggaccaacatggtcagtccccttaggtagaagagatggaagagtctcaattctttcagaggcctcaaaaaacctaccaactccttttgataacttcactactctcaaaactacatttggtgcattgggactaaatgttaaagaccttgttgttctatcaggaggacacacaattgggatgtcacattgtttttccttttcgagtcgtttgtataatttcactggcaaaggtgatatggatccaaacatggatcaaaactacattaatcatttgaagatcaaatgtaaacctggagatgtgacaacaattgttgaaatggatcctggaagtttcaagagtttcgacgctgattattacactatgattgccaaaagaagaggattgttcgcgtctgatgcagctcttcttagcaatactcaaacaaaagaatatgttttatcacaattaaatcgtcatggatcaactttctttgaggattttggtgaatcaatggtgaaaatgggacaaattggagtccttactgggaatgcaggggaaattcgaaaacattgtgccttcagaaattaa

SEQ ID NO: 1369 - protein, 322 aa, Solanum lycopersicum
  misc_feature (40)..(285): Pfam Name: peroxidase Pfam Description: Peroxidase
  misc_feature: Ceres Annot ID no. 8464351
  misc_feature: Bit score of 641.5 for HMM based on sequences of Figure 12
  misc_feature: Functional Homolog Of SEQ ID NO. 1318
MATLTFLSFLILQLFLITNNCEGVEVGFYKKTCPNVEAIVKETTKHYISIAPTLAAPLLRMHFHDCFVRGCDGSVLLNSTKGNKAEKDAIPNQSLRGFQVIDAAKSALEKECPGIVSCSDILALAARDAVSLINGPTWSVPLGRRDGRVSILSEASKNLPTPFDNFTTLKTTFGALGLNVKDLVVLSGGHTIGMSHCFSFSSRLYNFTGKGDMDPNMDQNYINHLKIKCKPGDVTTIVEMDPGSFKSFDADYYTMIAKRRGLFASDAALLSNTQTKEYVLSQLNRHGSTFFEDFGESMVKMGQIGVLTGNAGEIRKHCAFRN

SEQ ID NO: 1370 - protein, 324 aa, Oryza sativa subsp. japonica
  misc_feature (47)..(289): Pfam Name: peroxidase Pfam Description: Peroxidase
  misc_feature: Public GI ID no. 115435890
  misc_feature: Bit score of 513.1 for HMM based on sequences of Figure 12
  misc_feature: Functional Homolog Of SEQ ID NO. 1318
MDLAWWFAVAVVVCGLVGGGSAGLLETNPGLAYNFYQKSCPNVDSIVRSVTWAQVAANPALPGRLLRLHFHDCFVQGCDASILLDNAGSEKTAGPNLSVGGYEVIDAIKTQLEQACPGVVSCADIVALAARDAVSYQFKASLWQVETGRRDGPVSLASNTGALPSPFAGFSTLLQSFANRGLNLTDLVALSGAHTIGKASCSSVTPRLYQGNTTSLDPLLDSAYAKALMSSCPNPSPSSSTIDLDVATPLKFDSGYYANLQKKQGALASDAALTQNAAAAQMVADLTNPIKFYAAFSMSMKKMGRIDVLTGSKGNIRKQCRSAS

SEQ ID NO: 1371 - protein, 339 aa, Oryza sativa subsp. japonica
  misc_feature (49)..(302): Pfam Name: peroxidase Pfam Description: Peroxidase
  misc_feature: Public GI ID no. 115472505
  misc_feature: Bit score of 543.4 for HMM based on sequences of Figure 12
  misc_feature: Functional Homolog Of SEQ ID NO. 1318
MQQLLAMKLILTTLVVAVLALSAGTATATCDTLTVGHYRQSCRAAETIVRDTVKLYFSKDQTVTAPLLRLHFHDCFVRGCDGSVLLNATAASGPAEKDAMPNQSLDGFYVIDAAKAALEKECPGVVSCADILALAARDAVSMAAGNINGASLWQVPTGRLDGRVSSAAEAVANLPSSFADFAKLKEQFGSKGLNVQDLAILSGAHAIGNSHCVSFAKRLYNFTGKGDADPTLDRAYAAAVLRAACPPRFDNATTVEMVPGSSTTFDTDYYRLVASRRGLFHSDQALLQDREAAATVRVMARSSRQAFFRRFGVSMVRMGNVGVLTGAAGEIRKNCALIN

SEQ ID NO: 1372 - protein, 340 aa, Oryza sativa subsp. indica
  misc_feature (50)..(303): Pfam Name: peroxidase Pfam Description: Peroxidase
  misc_feature: Public GI ID no. 125558613
  misc_feature: Bit score of 540.5 for HMM based on sequences of Figure 12
  misc_feature: Functional Homolog Of SEQ ID NO. 1318
MQQLLAMKLILTLTLGVAVLALSAGTATATCDTLTVGHYRQSCRAAETIVRDTVKLYFSKDQTVTAPLLRLHFHDCFVRGCDGSVLLNATAASGPAEKDAMPNQSLDGFYVIDAAKAALEKECPGVVSCADILALAARDAVSMAAGNINGASLWQVPTGRLDGRVSSAAEAVANLPSSFADFAKLKEQFGSKGLTVQDLAILSGAHAIGNSHCVSFAKRLYNFTGKGDADPTLDRAYAAAVLRAACPPRFDNATTVEMVPGSSTTFDTDYYRLVASRRGLFHSDQALLQDREAAATVRAMARSSRQAFFRRFGVSMVRMGNVGVLTGTAGEIRKNCALIN

SEQ ID NO: 1373 - protein, 326 aa, Vitis vinifera
  misc_feature (41)..(288): Pfam Name: peroxidase Pfam Description: Peroxidase
  misc_feature: Public GI ID no. 225447326
  misc_feature: Bit score of 611.2 for HMM based on sequences of Figure 12
  misc_feature: Functional Homolog Of SEQ ID NO. 1318
MERISLLGIVILGFAGILGSVQADLKLGFYGESCPKAEKIVLDYVKKHIPNAPSLAAALIRMHFHDCFVRGCDGSVLINSTSSNQAEKDGTPNLTLRGFDFIERVKSVVEAECPGIVSCADILALVARDSIVVTGGPFWNVPTGRRDGLISNSSEAVSDIPRPVNNFTTLQTLFANKGLDLNDLVLLSGAHTIGVSHCSSFSNRLYNFTGVGDEDPALDSEYAANLKARKCKVATDNTTIVEMDPGSFRTFDLSYYTLLLKRRGLFESDAALTTNSGTKAFITQILQGPLSSFLAEFAKSMEKMGRIEVKTGTAGEVRKQCAVING

SEQ ID NO: 1374 - DNA, 1218 bp, Triticum aestivum
  misc_feature: Ceres Clone ID no. 909358
  misc_feature: Encodes the peptide sequence at SEQ ID NO. 1375
cagaacagagcatcctcgtgcctttgtgcaccatcgccggccactcgagagctccaggcgcgctctaggctctagctagctagggtggcggtgacaatggcggcggcgacgttggtgttggtgatgctcgtggtgacggttggcgtcgcggtggcgatggcggagggcgggaagctgcggcaggggtactacgagcagagctgcccgcgggcggagcagatcgtgaagcactacgtggagcggcacgtcccgcacgcgccctccgtcgccgccaccctcatccgcacccacttccacgactgcttcgtcagggggtgcgacgcgtcggtgctgctgaacgcgacgaccggcggcggcgaggcagagaaggacgcgacgcccaacctgacgctgcgcggcttcgccttcctggaccgcgtcaaggcgctcctcgagcaggagtgccccggcgtcgtctcctgcgccgacatcctcgcgctcgcctcccgcgacgccgtcggcgtcatcggcgggccgttctggcgcgtgccgacggggcgtcgcgacggcagggtgtcgatcaagcaggaggcgctggaccagatcccggcgcccaccatgaacttcaccgacctcctcacctccttccgtgccaagggcctcgacctcgccgacctcgtctggctctcaggggcacacaccatcggcatctcacactgcaactccttcaccgagcggctatacaactttaccggccgtggaggacccggggacgcggatccatctcttgatgcggagtatgctgccaacctccgcaggaccaagtgcaccacgcccacggacaacaccaccatcgtggagatggaccctgggagcttcctcacctttgacactagctactaccgtggcctcctaaagcgtcggggactcttccagtccgatgccgcgctcatcaccgatgctgcagcaagggccgacgtcgagagcgtggccaagggtccgtcggaggtgttcttccaggtgttcgcacggtccatggtgaggatgggcatgatagaagtgaagaccggtggcgagggggagatcagacggcattgtgccgttgtcaacagctagtgtcgtgcgttggtggcatgtggacgattgtttttgtatgtttagttacatttcctttttcctttttgtgtatgtattttgtctattttccttgtttgtaaggtggttttcaagttgtggtct

SEQ ID NO: 1375 - protein, 332 aa, Triticum aestivum
  misc_feature (43)..(294): Pfam Name: peroxidase Pfam Description: Peroxidase
  misc_feature: Ceres Clone ID no. 909358
  misc_feature: Bit score of 613.2 for HMM based on sequences of Figure 12
  misc_feature: Functional Homolog Of SEQ ID NO. 1318
MAAATLVLVMLVVTVGVAVAMAEGGKLRQGYYEQSCPRAEQIVKHYVERHVPHAPSVAATLIRTHFHDCFVRGCDASVLLNATTGGGEAEKDATPNLTLRGFAFLDRVKALLEQECPGVVSCADILALASRDAVGVIGGPFWRVPTGRRDGRVSIKQEALDQIPAPTMNFTDLLTSFRAKGLDLADLVWLSGAHTIGISHCNSFTERLYNFTGRGGPGDADPSLDAEYAANLRRTKCTTPTDNTTIVEMDPGSFLTFDTSYYRGLLKRRGLFQSDAALITDAAARADVESVAKGPSEVFFQVFARSMVRMGMIEVKTGGEGEIRRHCAVVNS

SEQ ID NO: 1376 - protein, 348 aa, Oryza sativa subsp. japonica
  misc_feature (55)..(308): Pfam Name: peroxidase Pfam Description: Peroxidase
  misc_feature: Public GI ID no. 115444399
  misc_feature: Bit score of 504.3 for HMM based on sequences of Figure 12
  misc_feature: Functional Homolog Of SEQ ID NO. 1318
MASTRRRRAGGVPMAVIRLGVAAIVVLGAGVIGGARAQLRMGFYDESCPAAERIVGEYVRQHVGRVPTVAAALLRLHYHDCFVRGCDASILLNSTGNGGAAEKDAAPNQTLRGFDLIDRVKGLVEAACPGVVSCADVLALAARDAVAAIGGPSWRVPTGRRDGTVSSMQEALAEIPSPAMSFPELAGLFATKGLSVRDLVWLSGAHTIGIAHCSSFADRLYNGGGGAGNANGNNTDPPPLDAAYAANLRERKCRTAGDGVVEMDPGSHLTFDLGYYRAVLRHRGLLRSDAALVTDAAARADIAGAVASPPEVFFQVFGRSMATLGAVQVKTGSDGEIRRNCAVVNSGH

SEQ ID NO: 1377 - protein, 348 aa, Oryza sativa subsp. indica
  misc_feature (55)..(308): Pfam Name: peroxidase Pfam Description: Peroxidase
  misc_feature: Public GI ID no. 125538188
  misc_feature: Bit score of 505.7 for HMM based on sequences of Figure 12
  misc_feature: Functional Homolog Of SEQ ID NO. 1318
MASTRRRRAGGVPMAVIRLGVAAIVVLGAGVIGGARAQLRMGFYDESCPAAERIVGEYVRQHVGRVPTVAAALLRLHYHDCFVRGCDASILLNSTGNGGTAEKDAAPNQTLRGFDLIDRVKGLVEAACPGVVSCADVLALAARDAVAAIGGPSWRVPTGRRDGTVSSMQEALAEIPSPAMSFPELAGLFATKGLSVRDLVWLSGAHTIGIAHCSSFADRLYNGGGGAGNANGNNTDPPPLDAAYAANLRERKCRTAGDGVVEMDPGSHLTFDLGYYRAVLRHRGLLRSDAALVTDAAARADIAGAVASLPEVFFQVFGRSMATLGAVQVKTGSDGEIRRNCAVVNSGH

SEQ ID NO: 1378 - DNA, 990 bp, Solanum lycopersicum
  misc_feature: Ceres Annot ID no. 8457856
  misc_feature: Encodes the peptide sequence at SEQ ID NO. 1379
atggctaaatttggcgatttgggtaatcttctagtgttgtgtatactactaggaatagttggttctagctatggtcagttgcagctcaacttctatgcaaagagctgtccgcaagcagaaaagataattcaagattatgtgtataagcaaatcccaaaggctccgtctcttgcacctgcgttgctcagaatgcatttccacgattgctttggttgtgatggttctgtactcctgaatttcacttcgagcactaaaaaccagactgaaaaagtggctgttcctaatcaaacgctgagaggcttctcatttatcgatggtgtgaagaaagcattggaagctgaatgccctggagttgtgtcatgtgcggatattgttgccttggttgctagagactctgttgtggtcacaggaggcccttactggaaggttccaactggtagaagagatggaagaatatcaaacgcctcggaagccttggcaaacatccctcctccgacaagtaacttttccagtctccagacgtcttttgccagcaagggtcttgacctaaaagacttggtactattgtctggtgcacataccattggagtctctcactgtccgtcattttcatcacgtttatacaattttactggagtttggggtaaaaaagatccatctctagacagcgaatatgcagctattcttaagatgaagaaatgcaaatccatcaatgacaacaccacaattgtcgaaatggatcctggaagctccagtaaatttgatcttagctacttccagcttgtgctcaagagaagagggctattccaatctgatgcagccttgacaacaagtgcgacaacaaagtcattcatcaaccagttagtacaaggatcactggaacaattctatgccgagtttggtgtagcaatggagaaaatgggaaagattgaggtcaagaccggctctgctggtgagattaggaagcactgtgcagttgtgaatagttaa

SEQ ID NO: 1379 - protein, 329 aa, Solanum lycopersicum
  misc_feature (43)..(291): Pfam Name: peroxidase Pfam Description: Peroxidase
  misc_feature: Ceres Annot ID no. 8457856
  misc_feature: Bit score of 575.9 for HMM based on sequences of Figure 12
  misc_feature: Functional Homolog Of SEQ ID NO. 1318
MAKFGDLGNLLVLCILLGIVGSSYGQLQLNFYAKSCPQAEKIIQDYVYKQIPKAPSLAPALLRMHFHDCFGCDGSVLLNFTSSTKNQTEKVAVPNQTLRGFSFIDGVKKALEAECPGVVSCADIVALVARDSVVVTGGPYWKVPTGRRDGRISNASEALANIPPPTSNFSSLQTSFASKGLDLKDLVLLSGAHTIGVSHCPSFSSRLYNFTGVWGKKDPSLDSEYAAILKMKKCKSINDNTTIVEMDPGSSSKFDLSYFQLVLKRRGLFQSDAALTTSATTKSFINQLVQGSLEQFYAEFGVAMEKMGKIEVKTGSAGEIRKHCAVVNS

SEQ ID NO: 1380 - protein, 326 aa, Arabidopsis thaliana
  misc_feature (42)..(288): Pfam Name: peroxidase Pfam Description: Peroxidase
  misc_feature: Public GI ID no. 15220463
  misc_feature: Bit score of 584.5 for HMM based on sequences of Figure 12
  misc_feature: Functional Homolog Of SEQ ID NO. 1318
MNCLIAIALSVSFFLVGIVGPIQAQLQMNFYANSCPNAEKIVQDFVSNHVSNAPSLAAALIRMHFHDCFVRGCDGSVLINSTSGNAERDATPNLTVRGFGFIDAIKSVLEAQCPGIVSCADIIALASRDAVVFTGGPNWSVPTGRRDGRISNAAEALANIPPPTSNITNLQTLFANQGLDLKDLVLLSGAHTIGVSHCSSFTNRLYNFTGRGGQDPALDSEYAANLKSRKCPSLNDNKTIVEMDPGSRKTFDLSYYQLVLKRRGLFQSDSALTTNPTTLSNINRILTGSVGSFFSEFAKSMEKMGRINVKTGSAGVVRRQCSVANS

SEQ ID NO: 1381 - protein, 326 aa, Arabidopsis thaliana
  misc_feature (42)..(288): Pfam Name: peroxidase Pfam Description: Peroxidase
  misc_feature: Public GI ID no. 21536908
  misc_feature: Bit score of 583.0 for HMM based on sequences of Figure 12
  misc_feature: Functional Homolog Of SEQ ID NO. 1318
MNCLIAIALSVSFFLVGMVGPIQAQLQMNFYANSCPNAEKIVQDFVSNHVSNAPSLAAALIRMHFHDCFVRGCDGSVLINSTSGNAERDATPNLTVRGFGFIDAIKSVLEAQCPGIVSCADIIALASRDAVVFTGGPNWSVPTGRRDGRISNAAEALANIPPPTSNITNLQTLFANQGLDLKDLVLLSGAHTIGVSHCSSFTNRLYNFTGRGGQDPALDSEYAANLKSRKCPSLNDNKTIVEMDPGSRKTFDLSYYQLVLKRRGLFQSDSALTTNPTTLSNINRILTGSVGSFFSEFAKSMEKMGRINVKTGSAGVVRRQCSVANS

SEQ ID NO: 1382 - protein, 326 aa, Capsella bursa-pastoris
  misc_feature (42)..(288): Pfam Name: peroxidase Pfam Description: Peroxidase
  misc_feature: Public GI ID no. 50261255
  misc_feature: Bit score of 593.9 for HMM based on sequences of Figure 12
  misc_feature: Functional Homolog Of SEQ ID NO. 1318
MNCLRAIALSLSLFLMGMVGPIQAQLQMNFYANTCPNAEKTVQDFVSNHISNAPSLAAALIRMHFHDCFVRGCDGSVLINSTSGNAERDATPNLTVRGFGFIDAIKAVLEAQCPGIVSCADIIALASRDAIVFTGGPNWNVPTGRRDGRISNASEALANIPPPTSNFTNLQTLFANQGLDLKDLVLLSGAHTIGVSHCSSFTNRLYNFTGRGDQDPALDSEYAANLKSRKCPSPNDNKTIVEMDPGSRKTFDLSYYQLVLKRRGLFQSDSALTTNPTTLSNINRILTGSVESFFSEFAKSMEKMGRINVKTGSAGVVRRQCSVANS

SEQ ID NO: 1383 - DNA, 1344 bp, Triticum aestivum
  misc_feature: Ceres Clone ID no. 757325
  misc_feature: Encodes the peptide sequence at SEQ ID NO. 1384
acactgtcatcaccaaacaccaacacaaacacagacacaaaccaaaagcattccttccctctcgccctccctcctccatctctgtctcaagatcagtgccgctcccaagagttaagaagagagagagagagagagagagagagagaggaaggagatggggatgcaatcagtgtgcggaggagcagggcggtggcggcgagcagtggcgtggtggggggccgtcctggtcctcgcccatttactcagctgcggcagcgcggggctcctggacaccaacccgggcttggcctataacttctacgcgacgacgtgccccagcgccgaggccaccgtccggagcatcacctgggcgcaggtcgccgccaaccaggccctccccggccagctcctcaggctgcacttccacgactgcttcgtcaagggctgcgacgcgtccatcctgctggacaacgcgcagagcgagaagacggcgccgcccaacggctccctcggcggctacccggtgatcgacgccatcaaggcgcagctcgagaaggcctgcccgggcgtcgtctcctgcgccgacatcgtcgcgctcgccgcccgcgacgccgtctcctaccagttcaaggcctcgctctggcaggtggagaccggccgccgggacggccccgtctcgctcgccagcaacaccggcgcgctgccctcgccctccgccggcttcaacggcctgctgcagagcttcgccgccaaggggctcgacgtcaacgacctcgtcgcgctctccggcgcgcacaccatcggcaaggccagctgctccagcgtcacgcccaggctgtaccagggcaacgccaccagcatcgaccccctgctcgactccacctacgccaagacgctcatgaacgcctgccccaacaatcccgcttccacgtccacggtggacctggacggcgccacgccgttcaagttcgacggcagctactacaccaacctgcagaacaagcggggagtgctcgcctccgacgccgcgctcacgcagaacgccgctgccgcgactattgtcaacgacctgaccaacccgatcaagttctacgccgccttctccatgtccatgaagaagatgggacgcgtcgacgtgctcaccctcaagaacggacaagggaagatcaggaccaagtgcaatgtgccgtgagggttcatccatgagcgccacattttttcttggattttttttactctctccctctctctctctccctcttatttcatcggcgcggatcaaatatattgtgcccgccatgattaaggtcccaaatctatattgatttgttaagtgctgtgcctgagtatgtaagattattagtc

SEQ ID NO: 1384 - protein, 336 aa, Triticum aestivum
  misc_feature (58)..(300): Pfam Name: peroxidase Pfam Description: Peroxidase
  misc_feature: Ceres Clone ID no. 757325
  misc_feature: Bit score of 494.6 for HMM based on sequences of Figure 12
  misc_feature: Functional Homolog Of SEQ ID NO. 1318
MQSVCGGAGRWRRAVAWWGAVLVLAHLLSCGSAGLLDTNPGLAYNFYATTCPSAEATVRSITWAQVAANQALPGQLLRLHFHDCFVKGCDASILLDNAQSEKTAPPNGSLGGYPVIDAIKAQLEKACPGVVSCADIVALAARDAVSYQFKASLWQVETGRRDGPVSLASNTGALPSPSAGFNGLLQSFAAKGLDVNDLVALSGAHTIGKASCSSVTPRLYQGNATSIDPLLDSTYAKTLMNACPNNPASTSTVDLDGATPFKFDGSYYTNLQNKRGVLASDAALTQNAAAATIVNDLTNPIKFYAAFSMSMKKMGRVDVLTLKNGQGKIRTKCNVP

SEQ ID NO: 1385 - DNA, 987 bp, Sorghum bicolor
  misc_feature: Ceres Annot ID no. 8643830
  misc_feature: Encodes the peptide sequence at SEQ ID NO. 1386
atggcgccctgcaccatgatcatggcgagcgttgcagctgtgctcgtcgtcctttcgtcggctgccgccgcagggctggacatggatttctacagcagcacgtgcccgcgcgtggaggccatcgtcaaggaggagatgacggagatcctcaaggtgtcgccgacgctcgccggcccgctgctccgcctccatttccacgactgcttcgtcaggggctgcgacggctccgtgctactggactcgacccctagcagcacgtcggagaaggacgcgaccccgaacctcaccctgcggggcttcggctccgtgcagcgcgtcaaggacaagctagagcaggcgtgcccgggcaccgtctcgtgcgccgatgtcctggcgctcatggcgcgcgacgccgtcgtgcttgccaacggcccgtcctggcccgtcgcgctgggccgccgcgacggccgcgtctccatctccaacgagaccaaccagcttcccccgcccaccgccaacttcacccgcctcgtccagatgttcgccgccaagggcctctccgtcaaggacctcgtcgtgctctccggcggccacaccctcggcaccgcgcactgcaacctcttcagcgaccgcctctacaacttcacgggcgccaacaacctcgccgacgtcgacccggcgctcgacgccacctacctcgcccgcctcaggtccaggtgccggagcctcgccgacaacaccacgctcaacgagatggaccccggcagcttcctcagcttcgacgccagctactaccgcctcgtcgcaaagcgccggggactcttccactccgacgccgcgctgctcaccgacccggccaccagggcctacgtccagcgccaggccacgggactcttcgccgccgagttcttccgcgacttcgccgactccatggtcaagatgtccaccatcgacgtgctcaccggcgcgcagggagagatcagaaacaaatgctacctcgtcaactga

SEQ ID NO: 1386 - protein, 328 aa, Sorghum bicolor
  misc_feature (42)..(290): Pfam Name: peroxidase Pfam Description: Peroxidase
  misc_feature: Ceres Annot ID no. 8643830
  misc_feature: Bit score of 561.4 for HMM based on sequences of Figure 12
  misc_feature: Functional Homolog Of SEQ ID NO. 1318
MAPCTMIMASVAAVLVVLSSAAAAGLDMDFYSSTCPRVEAIVKEEMTEILKVSPTLAGPLLRLHFHDCFVRGCDGSVLLDSTPSSTSEKDATPNLTLRGFGSVQRVKDKLEQACPGTVSCADVLALMARDAVVLANGPSWPVALGRRDGRVSISNETNQLPPPTANFTRLVQMFAAKGLSVKDLVVLSGGHTLGTAHCNLFSDRLYNFTGANNLADVDPALDATYLARLRSRCRSLADNTTLNEMDPGSFLSFDASYYRLVAKRRGLFHSDAALLTDPATRAYVQRQATGLFAAEFFRDFADSMVKMSTIDVLTGAQGEIRNKCYLVN

SEQ ID NO: 1387 - DNA, 996 bp, Sorghum bicolor
  misc_feature: Ceres Annot ID no. 8744201
  misc_feature: Encodes the peptide sequence at SEQ ID NO. 1388
atggtgagaagaatggtgctggtggcggcgctggtggtggccaccgtcgccgtcctcgccggcggcgcgcgggcgcagctcaaggaagggttctacggctccacctgcccgcaggcggagaagatcgtcaaggagttcgtcaaggcgcacatcccgcacgcgcctgacgtcgccgccaccctgatccgcacccacttccacgactgcttcgtcaggggctgcgacgcgtcggtgctgctcaacgcgacgggcggcaaggaggcggagaaggacgcggcgcccaaccagacgctgcggggcttcggcttcatcgaccgcatcaaggcgctgctcgagaaggagtgccccggcgtcgtgtcctgcgccgacatcctcgcgctcgccgcccgcgactccgtcggcgtcatcggcgggccgttctggagcgtgccgacggggaggcgcgacggcaccgtgtccatcaagcaggaggcgctggaccagatccccgcgcccaccatgaacttcaccacactcctccagtccttccgcaacaagagcctcgacctcgccgacctcgtctggctctcaggggctcacacgatcggcatctcccactgcaactccttcagcgagcggctgtacaacttcacggggcgcgccgttcccggggacgcggacccgtcgctggacccgctgtacgcggcgaagctgcggcggaagtgcaagacgctgacggacaacacgacgatcgtggagatggacccggggagcttccgcaccttcgacctcagctactaccgcggcgtgctcaagcggcggggcctgttccagtccgacgccgcgctcatcaccgacgccgcctccaaggccgacatcctcagcgtggtgaacgcgccgcccgaggtgttcttccaggtcttcgcgcgctccatggtgaagatgggcgccatcgacgtcaagaccggctccgagggcgagatcaggaagcactgcgccttcgtcaacaagcactag

SEQ ID NO: 1388 - protein, 331 aa, Sorghum bicolor
  misc_feature (43)..(292): Pfam Name: peroxidase Pfam Description: Peroxidase
  misc_feature: Ceres Annot ID no. 8744201
  misc_feature: Bit score of 625.3 for HMM based on sequences of Figure 12
  misc_feature: Functional Homolog Of SEQ ID NO. 1318
MVRRMVLVAALVVATVAVLAGGARAQLKEGFYGSTCPQAEKIVKEFVKAHIPHAPDVAATLIRTHFHDCFVRGCDASVLLNATGGKEAEKDAAPNQTLRGFGFIDRIKALLEKECPGVVSCADILALAARDSVGVIGGPFWSVPTGRRDGTVSIKQEALDQIPAPTMNFTTLLQSFRNKSLDLADLVWLSGAHTIGISHCNSFSERLYNFTGRAVPGDADPSLDPLYAAKLRRKCKTLTDNTTIVEMDPGSFRTFDLSYYRGVLKRRGLFQSDAALITDAASKADILSVVNAPPEVFFQVFARSMVKMGAIDVKTGSEGEIRKHCAFVNKH

SEQ ID NO: 1389 - protein, 350 aa, Oryza sativa subsp. japonica
  misc_feature (55)..(310): Pfam Name: peroxidase Pfam Description: Peroxidase
  misc_feature: Public GI ID no. 55700915
  misc_feature: Bit score of 494.4 for HMM based on sequences of Figure 12
  misc_feature: Functional Homolog Of SEQ ID NO. 1318
MASTRRRRAGGVPMAVIRLGVAAIVVLGAGVIGGARAQLRMGFYDESCPAAERIVGEYVRQHVGRVPTVAAALLRLHYHDCFVRVRGCDASILLNSTGNGGAAEKDAAPNQTLRGFDLIDRVKGLVEAACPGVVSCADVLALAARDAVALQGGPSWRVPTGRRDGTVSSMQEALAEIPSPAMSFPELAGLFATKGLSVRDLVWLSGAHTIGIAHCSSFADRLYNGGGGAGNANGNNTDPPPLDAAYAANLRERKCRTAGDGVVEMDPGSHLTFDLGYYRAVLRHRGLLRSDAALVTDAAARADIAGAVASPPEVFFQVFGRSMATLGAVQVKTGSDGEIRRNCAVVNSGH

SEQ ID NO: 1390 - DNA, 1314 bp, Gossypium hirsutum
  misc_feature: Ceres Clone ID no. 1923915
  misc_feature: Encodes the peptide sequence at SEQ ID NO. 1391
aagtttgcttgctttctttcaaacaggttttctcatagaatctgaaacagcaagttatcaatggcaggaactgggtttccggggtttatcattgtctttggtctattagcgtttataggctcaactaatgctcaattgcagatgaacttttatgctaaaagctgtcccaaagctgagaaaattatctcagattatgttaaagaacacatccctaatgctccatcactggctgcctctttcattcgcatgcacttccatgattgcttcgtcaggggctgtgatggatcagtgcttttaaactccaccaatggccaatcaccagaaaagaatgctgtcccgaatcaaactctaagaggctttgatttcattgacagagtgaaaagcttggttgaagctgaatgcccaggcattgtctcttgtgctgatatccttactttagttgcaagggactcaatcgtcaccgttggaggtccattttggcaagttccaacaggtcgaagggatggagtgatctcaaatgttactgaagctaacaacaatattccaagcccattcagcaacttcacaactctccttacacttttcaacaaccaaggactcgatacaaatgacttggtcctcctatccggggctcacaccatcggcatagctcactgcccagcattttcacgccgattgtacaattcgaccggccctgggggagtagacccaacgcttgacagtgaatacgcagctaacctcaaaacaaacaagtgtacaacacccaatgataacaccacaatagttgagatggaccctggaagccgtaagacctttgatcttagctactacacattgttaaccaaaagaaggggtcttttcaattccgatgctgctttaactacggactccactagcttgggtcttatcaaccagcttctttcgagccctcagtcgtttttctatgctcagtttgcaaagtctatggagaaaatgggtcggattaatatcaaaacaggatcccaaggtgagataaggaagcaatgtgcactcgtcaacagttaaaaaaaacacttaattcagctgaagaaggttccttcaaaattgtatagggaagtttcatagtgtggtctcggtgggtgctctgtgtgtgtgtgtcatgtcctgaataattgggctcactgttacgttttttcttctttttcctttttatgttctttttttgttgttgagctcaatgggtttcataatcttcatatgttatgtatttgggtggattgaataatttattcttaatttattaactttacgtttgatactctcttttcctttttc

SEQ ID NO: 1391 - protein, 327 aa, Gossypium hirsutum
  misc_feature (42)..(289): Pfam Name: peroxidase Pfam Description: Peroxidase
  misc_feature: Ceres Clone ID no. 1923915
  misc_feature: Bit score of 581.3 for HMM based on sequences of Figure 12
  misc_feature: Functional Homolog Of SEQ ID NO. 1318
MAGTGFPGFIIVFGLLAFIGSTNAQLQMNFYAKSCPKAEKIISDYVKEHIPNAPSLAASFIRMHFHDCFVRGCDGSVLLNSTNGQSPEKNAVPNQTLRGFDFIDRVKSLVEAECPGIVSCADILTLVARDSIVTVGGPFWQVPTGRRDGVISNVTEANNNIPSPFSNFTTLLTLFNNQGLDTNDLVLLSGAHTIGIAHCPAFSRRLYNSTGPGGVDPTLDSEYAANLKTNKCTTPNDNTTIVEMDPGSRKTFDLSYYTLLTKRRGLFNSDAALTTDSTSLGLINQLLSSPQSFFYAQFAKSMEKMGRINIKTGSQGEIRKQCALVNS

SEQ ID NO: 1392 - DNA, 1202 bp, Arabidopsis thaliana
  misc_feature: Ceres Clone ID no. 114862
  misc_feature: Encodes the peptide sequence at SEQ ID NO. 1393
cacaacataatcctcccaaacagagagagtctcaaaaattaaaccamcaaatttaaagatgaattgcttgatagctatagctctttcagtctctttctttcttgtgggaatggttggacccgatccaagctcaattgcagatgaatttctatgccaattcttgtcctaatgctgaaaagattgttcaagattttgtttcaaaccacgtttctaatgctccttctcttgctgctgctctcattagaatgcatttccatgactgttttgtccgaggttgtgatggatcagtgcttataaactcaacgtcaggaaacgcagagagagacgcgactcctaacctaacggttcgagggtttggcttcatcgacgcaattaaatctgtgcttgaagctcaatgccctggaattgtctcttgcgctgatattatcgctctagcttctcgcgacgctgtcgttttcaccggaggaccgaattggagtgtaccgaccggaagaagagacgggaggatatcaaacgcagcggaggcattagccaacattcctcctccaaccagtaatatcaccaatcttcagacactctttgcaaaccaaggacttgatcttaaggacctcgttttactatccggggctcacactattggtgtatctcactgctcgtctttcacaaaccgtctctacaatttcacgggtcgtggaggccaagatccggctttggacagcgagtacgcagccaatctcaagtctagaaaatgtcctagcctcaacgataacaagaccatcgtagagatggatccagggagccgcaaaacatttgatctaagttattaccagctcgtactcaagcgtagaggtctgtttcaatcagactctgctctcaccactaaccccacaacactttcaaacataaaccggatcttgacgggttcggtggggagtttcttctctgagtttgccaagtcaatggagaaaatgggtcggatcaatgtcaagactggttcagctggagtggttaggaggcaatgttccgttgcaaatagttaaggggtggaaatgtaaaagatttgggagcttgtgggggtagttgtgataataattaataaggatgattgtgaatttatgatgtggccttttgggatttgtgtgtatggattttgttacagacttcgtcaataaagaaataaaaagattttactgctttttttt

SEQ ID NO: 1393 - protein, 299 aa, Arabidopsis thaliana
  misc_feature (15)..(261): Pfam Name: peroxidase Pfam Description: Peroxidase
  misc_feature: Ceres Clone ID no. 114862
  misc_feature: Bit score of 536.3 for HMM based on sequences of Figure 12
  misc_feature: Functional Homolog Of SEQ ID NO. 1318
MNFYANSCPNAEKIVQDFVSNHVSNAPSLAAALIRMHFHDCFVRGCDGSVLINSTSGNAERDATPNLTVRGFGFIDAIKSVLEAQCPGIVSCADIIALASRDAVVFTGGPNWSVPTGRRDGRISNAAEALANIPPPTSNITNLQTLFANQGLDLKDLVLLSGAHTIGVSHCSSFTNRLYNFTGRGGQDPALDSEYAANLKSRKCPSLNDNKTIVEMDPGSRKTFDLSYYQLVLKRRGLFQSDSALTTNPTTLSNINRILTGSVGSFFSEFAKSMEKMGRINVKTGSAGVVRRQCSVANS

SEQ ID NO: 1394 - DNA, 984 bp, Populus balsamifera subsp. trichocarpa
  misc_feature: Ceres Annot ID no. 1509237
  misc_feature: Encodes the peptide sequence at SEQ ID NO. 1395
atgagggggtttcgttattttgggatgatgttcttttgtcttttggtatttatgggatcaactgaagctcaattgcagatgggtttttattctagtagctgcccaaatgctgagaggattgcgcaagactatgttaacaggcatatccataatgctccatcactggcagcagctatcataagaatgcatttccatgattgttttgttaggggttgtgatgcatctgtgcttttgaacacaacttcaagcaataaccaaactgaaaaggtggcaactccaaatttgacactgagaggctttgatttcattgacaaagttaagagcctattagaagcggcctgccctgctgtagtctcctgtgctgacattgttgctttggttgcaagggatgctgttgtagccactggtggtccattctggagagttccaacgggacgaagagacgggacaatttcaagatcctcggaggccttgaacaatatcccgcctccaacaagcaacttcaccaatctacagagactttttgctaaccaaggactggacttgaaagacttagtcttgctatcaggtgctcacacaattgggatatcacattgttcatcattttcaaaccgcctttacaatttcactggagtaggtgatcaggacccagctctagatagcgaatacgctgccaatctcaaggcaaggaagtgcagaagtcttaatgacaataccactatagtagaaatggaccctggaagtttcaggacatttgatcttagctactacagtcttttactcaaaagacggggtctgttccaatctgattctgccttaaccacaaactccgctacattgtctttcgtcaaccagctactccaaggtccacttcagaatttctttgcggaattcgcaaattccatggagaaaatgggcagaatcaatgttaagaccggcacaactggagaaattagaaagcactgtgcagttgtgaatagctaa

SEQ ID NO: 1395 - protein, 319 aa, Populus balsamifera subsp. trichocarpa
  misc_feature (33)..(281): Pfam Name: peroxidase Pfam Description: Peroxidase
  misc_feature: Ceres Annot ID no. 1509237
  misc_feature: Bit score of 613.1 for HMM based on sequences of Figure 12
  misc_feature: Functional Homolog Of SEQ ID NO. 1318
MMFFCLLVFMGSTEAQLQMGFYSSSCPNAERIAQDYVNRHIHNAPSLAAAIIRMHFHDCFVRGCDASVLLNTTSSNNQTEKVATPNLTLRGFDFIDKVKSLLEAACPAVVSCADIVALVARDAVVATGGPFWRVPTGRRDGTISRSSEALNNIPPPTSNFTNLQRLFANQGLDLKDLVLLSGAHTIGISHCSSFSNRLYNFTGVGDQDPALDSEYAANLKARKCRSLNDNTTIVEMDPGSFRTFDLSYYSLLLKRRGLFQSDSALTTNSATLSFVNQLLQGPLQNFFAEFANSMEKMGRINVKTGTTGEIRKHCAVVNS

SEQ ID NO: 1396 - DNA, 1356 bp, Zea mays
  misc_feature: Ceres Clone ID no. 100906383
  misc_feature: Encodes the peptide sequence at SEQ ID NO. 1397
cgagaagcagcttgcattgcaggcgtagtacgtacccagcagcagctagcactagcagtccatcggagcgacgatggtgagaaggacggtgctggcggcgctgctggtggccgccgccctcgccggcggcgcgcgggcgcagctcaaggaggggttctacgactactcctgcccacaggcggagaagatcgtcaaggactacgtgaaggcgcacatcccccacgcgcccgacgtcgcctccaccctgctccgcacccacttccacgactgcttcgtcaggggctgcgacgcgtcagtgctgctcaacgcgacgggcggcagcgaggcggagaaggacgcggcgcccaacctgacgctgcgcggcttcggcttcatcgaccgcatcaaggcgctgctcgagaaggagtgccccggcgtggtgtcctgcgccgacatcgtcgcgctcgccgcccgcgactccgtcggcgtcatcggcggtccgttctggagcgtgccgacggggaggcgcgacggcaccgtgtccatcaagcaggaggcgctggaccagatccccgcgcccaccatgaacttcacccaactcctccagtccttccagaacaagagcctcaacctcgccgacctcgtctggctctcaggggctcacacgatcggcatctcccaatgcaactccttcagcgagcgcctgtacaacttcacggggcgcggcgggcccgacgacgcggacccgtcgctggacccgctgtacgccgcgaagttgcggctcaagtgcaagacgctgacggacaacacgacgatcgtggagatggaccccggcagcttccgcaccttcgacctgagctactaccgcggcgtgctcaagcggcggggcctgttccagtccgacgccgcgctcatcaccgacgccgcctccaaggccgacatcctcagcgtgatcaacgcgccgcccgaggtgttcttccaggtcttcgcgggctccatggtcaagatgggcgccatcgaggtcaagaccggctccgagggcgagatcaggaagcactgcgccctcgtcaacaagcactaggcggcggaattcatgcgggagatggctccattgctcgcaaaaaatccttgtgagacacacaacatgctctgcatctgcaggcgttgtcgtcaccttggtggacgtagtacatcggtgcatggattatctgttgtttaatttgtacgttcagttcattctgtttcttgtattcttttggttcctttcctcttgtttattcatggatgatgaggtgtttctgttttattctctggttcagctgtaaccatgtaacatgtaaggtgcgcgttttgtcctcgtgatctctgcaactgtat

SEQ ID NO: 1397 - protein, 328 aa, Zea mays
  misc_feature (40)..(289): Pfam Name: peroxidase Pfam Description: Peroxidase
  misc_feature: Ceres Clone ID no. 100906383
  misc_feature: Bit score of 611.1 for HMM based on sequences of Figure 12
  misc_feature: Functional Homolog Of SEQ ID NO. 1318
MVRRTVLAALLVAAALAGGARAQLKEGFYDYSCPQAEKIVKDYVKAHIPHAPDVASTLLRTHFHDCFVRGCDASVLLNATGGSEAEKDAAPNLTLRGFGFIDRIKALLEKECPGVVSCADIVALAARDSVGVIGGPFWSVPTGRRDGTVSIKQEALDQIPAPTMNFTQLLQSFQNKSLNLADLVWLSGAHTIGISQCNSFSERLYNFTGRGGPDDADPSLDPLYAAKLRLKCKTLTDNTTIVEMDPGSFRTFDLSYYRGVLKRRGLFQSDAALITDAASKADILSVINAPPEVFFQVFAGSMVKMGAIEVKTGSEGEIRKHCALVNKH

SEQ ID NO: 1398 - DNA, 1395 bp, Panicum virgatum
  misc_feature: Ceres Clone ID no. 1796942
  misc_feature: Encodes the peptide sequence at SEQ ID NO. 1399
atcccccactgcacaacgctccctgctagataactgcatctgcgtccaggcaccggcctatagctgctatagctatcaagattcaaatataatcagccatggcgtctaggcctctcagcagcagcagcaagtccatggtgatcatgcgcgtcgttgttgctgcgctcgtcttctcggcggccacgaccgccatggctgctgggctgcagatggatttctacagcagcacctgcccggacgtggagcagatcgtcaaggaggagatggtggagatcctcagggcggcgccggcgctggccggcccgctgctccgcctccacttccacgactgcttcgtccggggctgcgacgcctccgtgctgctggactcgacgcccaccaatacggcggagaaggacgccaagcccaacctcaccctgcgcggcttcggctccgtgcagcgggtcaaggataggctcgagaaggcctgcccgggcaccgtctcctgcgccgacatcctcgcgctcatggcgcgcgacgccgtggtgctcgccaggggcccctcctggcccgtcaccctcggccgccgcgacggccgcgtctccgtcgccaacgagaccaagcagctgcccccgcccaccgccaacgtcaccaccctcgtccggatgttcgccgccaagggcctcggcgtcaaggacctcgtcgtgctctccggcggccacaccctcggcaccgcgcactgcaacctcttcagcgaccgcctctacaacttcaccggcgccaacaacctcgccgacgtcgacccggcgctcgacgccacctacctggcccgcctccggtcccggtgccggagcctcgccgacaacaccacgctcaacgagatggaccccggcagcttcctcagcttcgacgccagctactaccgcctggtggccaagcgccgggggctcttccactcggacgccgcgctgctcacccacccgaccaccagggcctacgtccagcgccaggccaccggcctcttcgccgacgagttcttccgtgacttcgccgactccatggtcaagatgtccaccatcgacgtgctcaccggagcgcagggcgagatcaggaaaaagtgctacctcgtcttaaactaactcatcatcatgaccatcgatctcgatcgcttttgctgctgcttccgtttcgtttgcattatattatatatattatattgttggtcgattcaattattcgttgcttggttggtacatacatatacatgatcagtatatatcaattacgcgtgaatcaagttctaaagttattttgctttgactctggccgtcagtaactgctgctgccgcctatgtaacatctatatgtaaactcctgatgtatatgtagactgagtgccatggatctttcttcttt

SEQ ID NO: 1399 - protein, 339 aa, Panicum virgatum
  misc_feature (52)..(300): Pfam Name: peroxidase Pfam Description: Peroxidase
  misc_feature: Ceres Clone ID no. 1796942
  misc_feature: Bit score of 569.0 for HMM based on sequences of Figure 12
  misc_feature: Functional Homolog Of SEQ ID NO. 1318
MASRPLSSSSKSMVIMRVVVAALVFSAATTAMAAGLQMDFYSSTCPDVEQIVKEEMVEILRAAPALAGPLLRLHFHDCFVRGCDASVLLDSTPTNTAEKDAKPNLTLRGFGSVQRVKDRLEKACPGTVSCADILALMARDAVVLARGPSWPVTLGRRDGRVSVANETKQLPPPTANVTTLVRMFAAKGLGVKDLVVLSGGHTLGTAHCNLFSDRLYNFTGANNLADVDPALDATYLARLRSRCRSLADNTTLNEMDPGSFLSFDASYYRLVAKRRGLFHSDAALLTHPTTRAYVQRQATGLFADEFFRDFADSMVKMSTIDVLTGAQGEIRKKCYLVLN

SEQ ID NO: 1400 - DNA, 1373 bp, Panicum virgatum
  misc_feature: Ceres Clone ID no. 1777201
  misc_feature: Encodes the peptide sequence at SEQ ID NO. 1401
gtaccagcagctcgaggcgcgagtcagagaccagcaggcagctgccacagccactagacctcgagagcagaggagcgcggcgcttggagcgggatggcgagaatggcgctggcggcggcgctggtggtggtggcggtggccggcgtcctcgccggcggtgcgcgggcgcagctggttgaggggttctacgcgcaaagctgcccgcaggcggagaagatcatcaaggactacgtggcagagcacgtcccacgcgtgcccaccatcgccgccaccctcctccgcacccacttccacgactgcttcgtcaggggctgcgacgcgtcgctgctgctcaacgcgacgggcgggaaggaggcggagaaggacgcggcgcccaacaagacgctgcgcggcttcggcttcatcgaccgcatcaaggagatcctcgagaaggagtgccccggcgtcgtctcctgcgccgacgtcctcgcgctcgccgcccgcgactccgtcgtcgtcaccggcgggccgtcctggagcgtgccgacggggcggcgcgacggcacggtgtccctcaagcaggaggcgctggacaatatccccgcgcccaccatgaacttcaccgagctcctccagaacttccagaacaagagcctcaacctcgccgacctcgtctggctctcaggggctcacaccatcggcatcgggcactgcaacaccttcagcgagcgcctctacaacttcaccggccgcggcggccccagcgacgccgacccgtcgctggacccggcgtacgcggacaacctgcggcggaccaagtgcaagacgctgacggacaacaccaccatcgtcgagatggacccgggcagcttccggaccttcgacctgagctactaccggggcgtgctcaagcaccggggcctgttccagtcggacgcggcgctgctcaacgacgcgacggccaaggccgacatcctcttcgtggtgaactcgccgcccgaggtgttcttccaggtgttcgcggcgtccatggtgaagctgggcgccgtcgaggtcaagacaggctccgagggcgagatcaggaagcactgcgccgtcgtcaacaagcactaggcgccattgggggacccggacaaacggttccatttcttcagagatccttgggacactggtggtggatacctggattgtggtgtctctacgttcgttttttttcttggttgttgtattcttttgttacctttgtgctgatcattggggtgatcttttttttggtttctctgtaactatgtgatttacgcattttgttcttattattcctgcaactgtaagttaattcagtgatcgatgattgatatacatgaaggtgaaataaaaaggtgggtcattctgtc

SEQ ID NO: 1401 - protein, 332 aa, Panicum virgatum
  misc_feature (43)..(292): Pfam Name: peroxidase Pfam Description: Peroxidase
  misc_feature: Ceres Clone ID no. 1777201
  misc_feature: Bit score of 600.3 for HMM based on sequences of Figure 12
  misc_feature: Functional Homolog Of SEQ ID NO. 1318
MARMALAAALVVVAVAGVLAGGARAQLVEGFYAQSCPQAEKIIKDYVAEHVPRVPTIAATLLRTHFHDCFVRGCDASLLLNATGGKEAEKDAAPNKTLRGFGFIDRIKEILEKECPGVVSCADVLALAARDSVVVTGGPSWSVPTGRRDGTVSLKQEALDNIPAPTMNFTELLQNFQNKSLNLADLVWLSGAHTIGIGHCNTFSERLYNFTGRGGPSDADPSLDPAYADNLRRTKCKTLTDNTTIVEMDPGSFRTFDLSYYRGVLKHRGLFQSDAALLNDATAKADILFVVNSPPEVFFQVFAASMVKLGAVEVKTGSEGEIRKHCAVVNKH

SEQ ID NO: 1402 - protein, 333 aa, Oryza sativa subsp. japonica
  misc_feature (69)..(297): Pfam Name: peroxidase Pfam Description: Peroxidase
  misc_feature: Public GI ID no. 54290444
  misc_feature: Bit score of 552.2 for HMM based on sequences of Figure 12
  misc_feature: Functional Homolog Of SEQ ID NO. 1318
MPPLSLAHLSPGARSLPRPALALSRVSLCLPSLLQAARAEEGVLQEELPQGGGDRAAGGVEPRRRQPGARRQVPPHVLPRLLRQGNTAEKNAAPNLSLAGFEVIEEVKAAVERECAGVVSCADIVALAARDSVSYQYRRSLWEVETGRRDGTVSSDQEALADIPAPTSTFPILLANFSAKGLGLQDLVVLSGGHTIGIGHCNLFSSRLFNFTGKNNPSDVDPSLNPSYARFLQGQCRRNQQDPNDNSTVVPMDPGSSVSFDSHYFVNLKARQGMFTSDATLLTDGRAAALVDKLRDPGVFLDHFKNSIKRMGQIGVLTGAAGQIRKRCNAVNS

SEQ ID NO: 1403 - protein, 376 aa, Vitis vinifera
  misc_feature (41)..(287): Pfam Name: peroxidase Pfam Description: Peroxidase
  misc_feature: Public GI ID no. 147772815
  misc_feature: Bit score of 861.3 for HMM based on sequences of Figure 12
  misc_feature: Functional Homolog Of SEQ ID NO. 1318
  misc_feature (366)..(366): Xaa is any aa, unknown, or other
  misc_feature (371)..(371): Xaa is any aa, unknown, or other
MKANLPLLVSMVVLGVLGVCQGGSLRKKYYKSACPLAEEIVQKVTWQHVSSNPNLPAKLIRMHFHDCFVRGCDGSVLLNSTANSTAERDAAPNLSLSGFDVIDDIKSKLEKTCPGVVSCADILALASRDSVSFQFKKPMWEVLTGRRDGKVSLASEALANIPPPVFNFSSLKQRFASKGLTVHDLVVLSGAHTIGVGHCNGFSNRLYNFTGKGDADPSLNSTYAAFLKTKCRSLSDTTAVEMDPQSSRNFDSNYFAILKQNKGLFQSDAALLTNKGARKIALELQDSADFFTEFAQSMKRMGAIGVLTGRAGEIRKKSLLEVPAYGFVVAISLISRLLCIAIIGEEPSRSRSTGYLPFFLTSLSTXYSLYXPISIS

SEQ ID NO: 1404 - DNA, 1382 bp, Zea mays
  misc_feature: Ceres Clone ID no. 280031
  misc_feature: Encodes the peptide sequence at SEQ ID NO. 1405
aaagagctcgagaccgacaggacgagactcgcagctagctgacacggccgagaagcagcttcattgcaggcgtagtacgtacccagcagcagctagcactagcagtccatcggagcgacgatggtgagaaggacggtgctggcggcgctgctggtggccgccgccctcgccggcggcgcgcgggcgcagctcaaggaggggttctacgactactcctgcccacaggcggagaagatcgtcaaggactacgtgaaggcgcacatcccccacgcgcccgacgtcgcctccaccctgctccgcacccacttccacgactgcttcgtcaggggctgcgacgcgtcagtgctgctcaacgcgacgggcggcagcgaggcggagaaggacgcggcgcccaacctgacgctgcgcggcttcggcttcatcgaccgcatcaaggcgctgctcgagaaggagtgccccggcgtggtgtcctgcgccgacatcgtcgcgctcgccgcccgcgactccgtcggcgtcatcggcggtccgttctggagcgtgccgacggggaggcgcgacggcaccgtgtccatcaagcaggaggcgctggaccagatccccgcgcccaccatgaacttcacccaactcctccagtccttccagaacaagagcctcaacctcgccgacctcgtctggctctcaggggctcacacgatcggcatctcccaatgcaactccttcagcgagcgcctgtacaacttcacggggcgcggcgggcccgacgacgcggacccgtcgctggacccgctgtacgccgcgaagttgcggctcaagtgcaagacgctgacggacaacacgacgatcgtggagatggaccccggcagcttccgcaccttcgacctgagctactaccgcggcgtgctcaagcggcggggcctgttccagtccgacgccgcgctcatcaccgacgccgcctccaaggcsgacatcctcagcgtgatcaacgcgccgcccgaggtgttcttccaggtcttcgcgggctccatggtcaagatgggcgccatcgaggtcaagaccggctccgagggcgagatcaggaagcactgcgccctcgtcaacaagcactaggcggcggaattcatgcgggagatggctccattgctcgcaaaaaatccttgtgagacacacaacatgctctgcatctgcaggcgttgtcgtcaccttggtggacgtagtacatcggtgcatggattatctgttgtttaatttgtacgttcagttcattctgtttcttgtattcttttggttcctttcctcttgtttattcatggatgatgaggtgtttctgttttattctctggttcagctgtaaccatgtaacatgtaaggtgcgcgttttgtcc

SEQ ID NO: 1405 - protein, 328 aa, Zea mays
  misc_feature (40)..(289): Pfam Name: peroxidase Pfam Description: Peroxidase
  misc_feature: Ceres Clone ID no. 280031
  misc_feature: Bit score of 610.3 for HMM based on sequences of Figure 12
  misc_feature: Functional Homolog Of SEQ ID NO. 1318
  misc_feature (281)..(281): Xaa is any aa, unknown, or other
MVRRTVLAALLVAAALAGGARAQLKEGFYDYSCPQAEKIVKDYVKAHIPHAPDVASTLLRTHFHDCFVRGCDASVLLNATGGSEAEKDAAPNLTLRGFGFIDRIKALLEKECPGVVSCADIVALAARDSVGVIGGPFWSVPTGRRDGTVSIKQEALDQIPAPTMNFTQLLQSFQNKSLNLADLVWLSGAHTIGISQCNSFSERLYNFTGRGGPDDADPSLDPLYAAKLRLKCKTLTDNTTIVEMDPGSFRTFDLSYYRGVLKRRGLFQSDAALITDAASKXDILSVINAPPEVFFQVFAGSMVKMGAIEVKTGSEGEIRKHCALVNKH

SEQ ID NO: 1406 - DNA, 1029 bp, Populus balsamifera subsp. trichocarpa
  misc_feature: Ceres Annot ID no. 1456042
  misc_feature: Encodes the peptide sequence at SEQ ID NO. 1407
atggcagttgagccctgggttttgtttttggtgatcaatacatattggtggcagcagctcaagttgctaaggctcatgctaaaagagaggcctataaatctagcctcatgttccaactttaatatgggtttttattctagtagctgcccaaatgctgagaggattgcgcaagactatgttaacaggcatatccataatgctccatcactggcagcagctatcataagaatgcatttccatgattgttttgttaggggttgtgatgcatctgtgcttttgaacacaacttcaagcaataaccaaactgaaaaggtggcaactccaaatttgacactgagaggctttgatttcattgacaaagttaagagcctattagaagcggcctgccctgctgtagtctcctgtgctgacattgttgctttggttgcaagggatgctgttgtagccactggtggtccattctggagagttccaacgggacgaagagacgggacaatttcaagatcctcggaggccttgaacaatatcccgcctccaacaagcaacttcaccaatctacagagactttttgctaaccaaggactggacttgaaagacttagtcttgctatcaggtgctcacacaattgggatatcacattgttcatcattttcaaaccgcctttacaatttcactggagtaggtgatcaggacccagctctagatagcgaatacgctgccaatctcaaggcaaggaagtgcagaagtcttaatgacaataccactatagtagaaatggaccctggaagtttcaggacatttgatcttagctactacagtcttttactcaaaagacggggtctgttccaatctgattctgccttaaccacaaactccgctacattgtctttcgtcaaccagctactccaaggtccacttcagaatttctttgcggaattcgcaaattccatggagaaaatgggcagaatcaatgttaagaccggcacaactggagaaattagaaagcactgtgcagttgtgaatagctaa

SEQ ID NO: 1407 - protein, 317 aa, Populus balsamifera subsp. trichocarpa
  misc_feature (31)..(279): Pfam Name: peroxidase Pfam Description: Peroxidase
  misc_feature: Ceres Annot ID no. 1456042
  misc_feature: Bit score of 599.4 for HMM based on sequences of Figure 12
  misc_feature: Functional Homolog Of SEQ ID NO. 1318
MLKERPINLASCSNFNMGFYSSSCPNAERIAQDYVNRHIHNAPSLAAAIIRMHFHDCFVRGCDASVLLNTTSSNNQTEKVATPNLTLRGFDFIDKVKSLLEAACPAVVSCADIVALVARDAVVATGGPFWRVPTGRRDGTISRSSEALNNIPPPTSNFTNLQRLFANQGLDLKDLVLLSGAHTIGISHCSSFSNRLYNFTGVGDQDPALDSEYAANLKARKCRSLNDNTTIVEMDPGSFRTFDLSYYSLLLKRRGLFQSDSALTTNSATLSFVNQLLQGPLQNFFAEFANSMEKMGRINVKTGTTGEIRKHCAVVNS

SEQ ID NO: 1408 - DNA, 1182 bp, Arabidopsis thaliana
  misc_feature: Ceres Clone ID no. 39952
  misc_feature: Encodes the peptide sequence at SEQ ID NO. 1409
atcatcgatcatctgtcaaaaagaggagctaataataatatggctgctttgaagatgactatctcttgtttcttgtttcttcaagtaatatattgcttgctctcttcatttgctccaacaaatgtgcaaggattgaaagttggattctacgacaaggcatgccccaaagccgagcttattgtcaaaaagtctgtcttcgaggctgtgaagaatgatcggacaattgcagctcctttgctcaggatgttcttccacgatttcttcgttaggggatgcgaagggtcggtattgctagagctaaagaacaaaaaagatgagaaaaactcaattcctaacctcacccttcgaggatttgagatcatagacaatgtcaaggcagctctagaaaaggagtgtccgggcattgtttcttgctctgatgtattggctcttgtcgctagagacgcaatggttgcgctcaatggaccgtcgtgggaggttgaaacgggacgaagagacggtctggttacaaacatcactgaggccttattaaacttaccatcaccatttaataatatcagtagccttatcactcaattccagtccaaaggcctcgacaagaaagacctcgttgtgctttcaggtgggcacacaattgggaatggacattgtccacagatcacaaaccgtctctacaacttcaccggaaaaggagatagtgacccgaacttagacacggaatacgcagtcaaactcagaggaaaatgcaagccaactgataccacaacggctctagaaatggatccaggaagctttaaaacgttcgatgaaagttacttcaagcttgtgtctcaaagaagaggattgtttcaatctgatgcagctcttttagacaatcaagaaactaagtcttatgttctcaagagtttgaatagtgatgggtctactttctttaaagactttggtgtctccatggtaaaaatgggtcggattggagttttaacgggtcaagttggggaagttcgcaagaagtgcagaatggttaattaagtatattttatatagatatgtctgtgagattgttttatgattatgtatgtgtttttccctaagaatattgtgtggagttatatgtattgtacaatggaatgttaaattgtaaaatatgtcatgttttatttatcacaaaagaaaaaattcgac

SEQ ID NO: 1409 - protein, 329 aa, Arabidopsis thaliana
  misc_feature (48)..(292): Pfam Name: peroxidase Pfam Description: Peroxidase
  misc_feature: Ceres Clone ID no. 39952
  misc_feature: Bit score of 524.2 for HMM based on sequences of Figure 12
  misc_feature: Functional Homolog Of SEQ ID NO. 1318
MAALKMTISCFLFLQVIYCLLSSFAPTNVQGLKVGFYDKACPKAELIVKKSVFEAVKNDRTIAAPLLRMFFHDFFVRGCEGSVLLELKNKKDEKNSIPNLTLRGFEIIDNVKAALEKECPGIVSCSDVLALVARDAMVALNGPSWEVETGRRDGLVTNITEALLNLPSPFNNISSLITQFQSKGLDKKDLVVLSGGHTIGNGHCPQITNRLYNFTGKGDSDPNLDTEYAVKLRGKCKPTDTTTALEMDPGSFKTFDESYFKLVSQRRGLFQSDAALLDNQETKSYVLKSLNSDGSTFFKDFGVSMVKMGRIGVLTGQVGEVRKKCRMVN

SEQ ID NO: 1410 - protein, 327 aa, Vitis vinifera
  misc_feature (45)..(290): Pfam Name: peroxidase Pfam Description: Peroxidase
  misc_feature: Public GI ID no. 225447324
  misc_feature: Bit score of 643.3 for HMM based on sequences of Figure 12
  misc_feature: Functional Homolog Of SEQ ID NO. 1318
MSTQKLFSALFLQLILAIFVLDVADAQYLKLGFYKNTCPAAEDIVRETTAQYISKAPTLAASLLRIHFHDCFVRGCDGSVLLNSTKHNQAEKDAIPNLSLRGYQVIDAAKSAVEKKCPGVVSCADILALVARDAVSMINGPYWQVPTGRRDGKLSVALEALTNLPPPFANITQLKAMFQSKGLSIKDLAVLSGGHTIGISHCSSFTNRLYNFTGKGDTDPSMDPNYVIQLKKKCKPGDVSTVVEMDPGSFKSFDEDYYSVVAKRRGLFQSDAALLDDVETSKYVRLQSFSHGKSFGRDFAASMVKMGRIGVLTGNAGEIRKYCAFVN

SEQ ID NO: 1411 - DNA, 1324 bp, Gossypium hirsutum
  misc_feature: Ceres Clone ID no. 1982544
  misc_feature: Encodes the peptide sequence at SEQ ID NO. 1412
aacaacatcaaacattgctgtcttaaaagagatctgaaacaggagctagttcaaagtctgtcgaagatggcaggaacaagctctgcgaggattgttttagttgttgtgtttggtgttttagcattgattgggtccgcacaggctcaactgcagatgaacttttatgccagcagctgtcctaaagccgagcagattgtgctggactatgttaaacagcacatccctaatgccccatccctcgcggcttctttcttaagaatgcacttccatgattgcattgtcaggggctgtgatgcatcagtgcttctaaacaacacatctggccaagcagagaagaatgcagtcccaaatctaacactgaggggctttgatttcattgaaagagtgaagagcctcctcgaagccgaatgccctggcgttgtctcttgtgccgatatcctcactttggttgccagagactctgtggtcaccactggaggtccattttggaatgttccaacaggaagaagagacggtgtgatatccaatatcaccgaagcaaataccaacattccaagccctttccacaacttcactactctccttactcttttcagtaaccaaggacttaacttgaccgacttagttctcctatctggtggtcacaccatcggcatatcccattgcccggctgtttcgcgccgactgtacaattccaccggccccggcggaatcgacccaaccatggacagcgagtacgctgaaaacctcaaggccaacaagtgtaaaaccgcgagcgataacaccacaatacttgagatggaccctgggagtcggaaaaccttcgatcttagctactactcactcttgctcaaaagaaggggtcttttccaatccgatgctgctttaaccactgattcaaccagcttggctttcatcaaccagctccttaccagtcccccacagttcttctttgatgagtttgccaaagccatggagaaaatgggtcgggttaatgttaagactggatccgaaggccagatccggaagcaatgtgcccttgtcaacaactaaaatggaaagggtttttttttgttcttttctttgtttccttatttttgttgttgagatttaatttatttatagtgtcggggttaagggaataaaacaggtgaagacaactacttggagatgggactctttcggtttgttcatgtagttttcggtgtgatgtcgtgcgcaatccagctcactgtttttttgttctttttttctttctttctgacctttatgtattaagttggacttgtgaataataaagggtaaactgtattttttgtctcct

SEQ ID NO: 1412 - protein, 328 aa, Gossypium hirsutum
  misc_feature (44)..(290): Pfam Name: peroxidase Pfam Description: Peroxidase
  misc_feature: Ceres Clone ID no. 1982544
  misc_feature: Bit score of 588.4 for HMM based on sequences of Figure 12
  misc_feature: Functional Homolog Of SEQ ID NO. 1318
MAGTSSARIVLVVVFGVLALIGSAQAQLQMNFYASSCPKAEQIVLDYVKQHIPNAPSLAASFLRMHFHDCIVRGCDASVLLNNTSGQAEKNAVPNLTLRGFDFIERVKSLLEAECPGVVSCADILTLVARDSVVTTGGPFWNVPTGRRDGVISNITEANTNIPSPFHNFTTLLTLFSNQGLNLTDLVLLSGGHTIGISHCPAVSRRLYNSTGPGGIDPTMDSEYAENLKANKCKTASDNTTILEMDPGSRKTFDLSYYSLLLKRRGLFQSDAALTTDSTSLAFINQLLTSPPQFFFDEFAKAMEKMGRVNVKTGSEGQIRKQCALVNN

SEQ ID NO: 1413 - DNA, 1253 bp, Arabidopsis thaliana
  misc_feature: Ceres Annot ID no. 863218
  misc_feature: Encodes the peptide sequence at SEQ ID NO. 1414
atctccaaagctcgttctcaccttacttggcaaacactcaacgaagaaaggagagagagacggtaatggcgatcaagaacattctcgcccttgtggttcttcttagcgtggttggagtttctgtcgccattccacagttgcttgacctcgactactaccggtctaagtgtcccaaggcagaggaaattgttcgtggtgtcacagtacaatatgtttctcgccagaaaacccttgccgctaaacttctaaggatgcatttccatgattgtttcgtcagaggatgtgatggttccgttcttctgaaatctgcaaagaatgatgcggaaagagacgctgtccccaacctgaccctgaaaggttatgaagtggtggatgcggccaagacagcgctggagaggaagtgtcctaatctcatttcttgcgctgatgttcttgccttggtcgccagagatgccgtggcagtgatcgggggaccatggtggccggttccattgggccgcagggatggacgcatctcgaaattgaacgatgcattgctaaatttaccatctcctttcgccgacataaagacgctgaagaagaactttgccaacaagggtcttaacgctaaagaccttgtggttctctcagggggtcacaccattggaatctctagttgcgctctcgtcaacagtcgtctctacaacttcacaggaaagggcgattctgacccatccatgaaccctagctacgtgagggaattgaagagaaagtgcccgcctacagatttcagaacctcactgaacatggacccaggcagtgcgttgacattcgacactcactacttcaaggtcgtggctcagaagaaagggctcttcacatctgactctacgcttctcgatgacattgagaccaaaaactacgttcagactcaggccattctccctcctgtgttttcttctttcaataaagatttctccgattccatggtcaaacttggtttcgtccaaattcttaccggcaaaaatggtgagatcaggaagagatgcgccttccctaactaatttggatcgatcagaccgggtttcggatgattttgagtctacacgtttttctctgcttattttctttctttttcttttttctttcacggaagtttgagctttggtgttgtcttcttctgtttcttccatgaataattgttttttgttgagtaactttacatttgtattctttacggtgactgtgttttgtaatggaaaaagtttgtttcg

SEQ ID NO: 1414 - protein, 325 aa, Arabidopsis thaliana
  misc_feature (42)..(286): Pfam Name: peroxidase Pfam Description: Peroxidase
  misc_feature: Ceres Annot ID no. 863218
  misc_feature: Bit score of 519.0 for HMM based on sequences of Figure 12
  misc_feature: Functional Homolog Of SEQ ID NO. 1318
MAIKNILALVVLLSVVGVSVAIPQLLDLDYYRSKCPKAEEIVRGVTVQYVSRQKTLAAKLLRMHFHDCFVRGCDGSVLLKSAKNDAERDAVPNLTLKGYEVVDAAKTALERKCPNLISCADVLALVARDAVAVIGGPWWPVPLGRRDGRISKLNDALLNLPSPFADIKTLKKNFANKGLNAKDLVVLSGGHTIGISSCALVNSRLYNFTGKGDSDPSMNPSYVRELKRKCPPTDFRTSLNMDPGSALTFDTHYFKVVAQKKGLFTSDSTLLDDIETKNYVQTQAILPPVFSSFNKDFSDSMVKLGFVQILTGKNGEIRKRCAFPN

SEQ ID NO: 1415 - DNA, 981 bp, Sorghum bicolor
  misc_feature: Ceres Annot ID no. 8733417
  misc_feature: Encodes the peptide sequence at SEQ ID NO. 1416
atggcgtccagggcggctctcctggcgcttctgctctcggcgttcgcggcggcgtcggcggtggcgcagctggacgagaagttctacagccagtcgtgccccagcgtggaggatgtcgtccggaaggagatggtgcgcgcgctctccgtcgcgcccagcctcgccggccccctcctcaggatgcacttccacgactgcttcgtcagggggtgcgacggctccgtcctccttgactccacggcgaacaacaccgcggagaaggacgcgaagccgaacctgacgctgcgcggcttcagcttcatcgagacggtcaaggccgccgtggagaaggcgtgccctgacaccgtctcctgcgccgacttgctggccctcatggccagggacgccgtgtggctgagcaagggcccgttctgggcggtccctctggggcggcgagacggcagggtgtccatcgccaacgagaccaagcagctgccgccgccgacgggcaacttcacgaagctgacccagctgttcggcgccaagaacctggacaccaaggacctggtggtgctgtccgccggccacaccatcggcacgtcgcactgcttctccttctcggaccggctctacaacttcacggggctggacaacgcccgcgacatcgacccgacgctggacctggcgtacatggcgcggctccgcggcaagtgcacgagcctggacgacaacaccacgctggtggagatggacccagggagcttcaagaccttcgacctgagctacttcgccaacgtggccaagcgcaggggcctcttccactccgacggcgcgctgctcaccgaccccaccacccgcgcctacgtgctccgccacgccacggggaactacaaggaggagttcttcgccgacttcgccgcgtccatgctcaagatgggcgccgtcgacgtgctcaccggcagccagggagagatcaggaagaagtgcagcgtcgtcaactaa

SEQ ID NO: 1416 - protein, 326 aa, Sorghum bicolor
  misc_feature (40)..(288): Pfam Name: peroxidase Pfam Description: Peroxidase
  misc_feature: Ceres Annot ID no. 8733417
  misc_feature: Bit score of 559.3 for HMM based on sequences of Figure 12
  misc_feature: Functional Homolog Of SEQ ID NO. 1318
MASRAALLALLLSAFAAASAVAQLDEKFYSQSCPSVEDVVRKEMVRALSVAPSLAGPLLRMHFHDCFVRGCDGSVLLDSTANNTAEKDAKPNLTLRGFSFIETVKAAVEKACPDTVSCADLLALMARDAVWLSKGPFWAVPLGRRDGRVSIANETKQLPPPTGNFTKLTQLFGAKNLDTKDLVVLSAGHTIGTSHCFSFSDRLYNFTGLDNARDIDPTLDLAYMARLRGKCTSLDDNTTLVEMDPGSFKTFDLSYFANVAKRRGLFHSDGALLTDPTTRAYVLRHATGNYKEEFFADFAASMLKMGAVDVLTGSQGEIRKKCSVVN

SEQ ID NO: 1417 - DNA, 1059 bp, Sorghum bicolor
  misc_feature: Ceres Annot ID no. 8671598
  misc_feature: Encodes the peptide sequence at SEQ ID NO. 1418
atggcggtgagcaccaggaggcggcacagcagcagcaggatggtggccgtgccggcgccggtggttcttggagtggccatggtcgtcgtcgtcctggccagcagcgcgaccggcgcgagcgggcagctgaggatggggttctacgccgagagctgccccggcgtggagcgaatggtgggcgacttcgtccggcagcacgtccgccgcgtgcccaccgtcgccgccgcgctgctccggctgcacttccacgactgcttcgtcaggggctgcgacgcctccgtcctgctcaactccaccgccggcagcgtggccgagaaggacgcgccgccgaacctgacgctgcgcggcttcgacttcgtcgaccgcgtcaagacgctcgtcgaggaggcctgcccaggcgtcgtctcctgcgccgacgtcctcgcgctcgccgcccgggacgcggtcgtcgccattggtgggccgtcgtggcgcgtgccgacggggaggagggacggcacggtgtcgaccatgcaggaggcgctcaacgacatccccaagcacaccatgaccttccagcagctggccaacctgttcgccagcaaaggcctcggcgtccgtgacctcgtctggctctcaggcgcgcacacgatcggcatcgcgcactgctcctccttcgccgaccgcctctacggctaccccggcgccggcgccggcaacgacacgacggacccgtccctggacgcgacctacgccgccaacctccgccggcgcaagtgccgggcggcgagcggcgggtacgccgaggacgccgtggtggagatggacccgggcagccacctgacgttcgacctgggctactaccgcgcgctgctcaagcacaggggcctgctccgctccgacgccgcgctgctcaccgacgcggcggcgcgcgccgacgtcgagagcgtcgtgggcggcgccgaggaggtctacttccaggtgttcgcgcggtccatggccaggctcgcgacggtgcaggtcaagaccggagctgagggggagatcaggaggaactgcgccgtcgtgaacggcggctag

SEQ ID NO: 1418 - protein, 352 aa, Sorghum bicolor
  misc_feature (59)..(313): Pfam Name: peroxidase Pfam Description: Peroxidase
  misc_feature: Ceres Annot ID no. 8671598
  misc_feature: Bit score of 504.3 for HMM based on sequences of Figure 12
  misc_feature: Functional Homolog Of SEQ ID NO. 1318
MAVSTRRRHSSSRMVAVPAPVVLGVAMVVVVLASSATGASGQLRMGFYAESCPGVERMVGDFVRQHVRRVPTVAAALLRLHFHDCFVRGCDASVLLNSTAGSVAEKDAPPNLTLRGFDFVDRVKTLVEEACPGVVSCADVLALAARDAVVAIGGPSWRVPTGRRDGTVSTMQEALNDIPKHTMTFQQLANLFASKGLGVRDLVWLSGAHTIGIAHCSSFADRLYGYPGAGAGNDTTDPSLDATYAANLRRRKCRAASGGYAEDAVVEMDPGSHLTFDLGYYRALLKHRGLLRSDAALLTDAAARADVESVVGGAEEVYFQVFARSMARLATVQVKTGAEGEIRRNCAVVNGG

SEQ ID NO: 1419 - DNA, 1316 bp, Triticum aestivum
  misc_feature: Ceres Clone ID no. 1004743
  misc_feature: Encodes the peptide sequence at SEQ ID NO. 1420
gtactgaccctgctctactgtactgcacctctgctgctacataccacttcagagagtcgagcagagtagaggcgaacagagtgagcggcgatcaccacgcagacgcgccatggccgccgccgtgccgttgccggtgatgctccttgtcgcggtggccgtcatgctcgtcggcgccggcgcaggcgcggcaggggtgcgcggcgggcggcggcagcagcagcagcagctgaggatggggttctacgacaagagctgcccggcggcggagcggatcgtgggcgactacgtccggcagcacgtccggcgcgtgcccaccgtcgcgcccgcgctgctccggacgcactaccacgactgcttcgtcaggggctgcgacgggtccatcctgctcaactccaccgccgccggcgcggcggagaaggacgcgccgccgaacctgacgctgcgcgggttcgacctcatcgaccgcgtcaagggcctcgtcgagcaggcctgccccggcgtcgtctcctgcgccgacgtcctcgcgctcgccgcccgggacgccgtcgccgccattggcgggccgtcgtggcgcgtgccgacggggaggagggacggcacggtgtcgaccatgcaggaggcggtccgcgagctgccgtcgccgtcgatgaccttcccgcagctcgtcgccctgttcgccggcaagggcctcgacgtgcgcgacctcgtctggctgtcaggtgcgcacaccatcggcatcgcccactgctcgtccttcgcggaccgcctctacagctaccccagcgccggcaacggcaccgggaccgtcccgcccctcgacgccgcctacgcggccaacctgcggcagcgcaagtgcaggatgggcggccgcgacaccacggtggagatggaccccggcagcttcctgacgttcgacctcggctactaccacactgtgctgaagcacagggccctgttccggtccgacgccgcgctggtcaccgatcccgcggcgcgggccgacatcgccggcgtcgtgtccagcccgccggaggtgttcttccaggtgttcgcgcggtccatggcgaggctgggcgccgtgcaggtcaagaccggctctcagggggagatcaggaagcactgcgccgtcgtcaacagctagatcgaacagagatgctgtgattttgctcttattctttcgtcatctgtaaccagtgttattttgatcatatttttgttgagaatggtggtagaataactgagtctgcaggttaactgcgaacacagaagatatgacatgtgtatgcactacttataagattgatgaagttgtatcc

SEQ ID NO: 1420 - protein, 343 aa, Triticum aestivum
  misc_feature (56)..(305): Pfam Name: peroxidase Pfam Description: Peroxidase
  misc_feature: Ceres Clone ID no. 1004743
  misc_feature: Bit score of 529.0 for HMM based on sequences of Figure 12
  misc_feature: Functional Homolog Of SEQ ID NO. 1318
MAAAVPLPVMLLVAVAVMLVGAGAGAAGVRGGRRQQQQQLRMGFYDKSCPAAERIVGDYVRQHVRRVPTVAPALLRTHYHDCFVRGCDGSILLNSTAAGAAEKDAPPNLTLRGFDLIDRVKGLVEQACPGVVSCADVLALAARDAVAAIGGPSWRVPTGRRDGTVSTMQEAVRELPSPSMTFPQLVALFAGKGLDVRDLVWLSGAHTIGIAHCSSFADRLYSYPSAGNGTGTVPPLDAAYAANLRQRKCRMGGRDTTVEMDPGSFLTFDLGYYHTVLKHRALFRSDAALVTDPAARADIAGVVSSPPEVFFQVFARSMARLGAVQVKTGSQGEIRKHCAVVNS

SEQ ID NO: 1421 - protein, 342 aa, Zea mays
  misc_feature (46)..(303): Pfam Name: peroxidase Pfam Description: Peroxidase
  misc_feature: Public GI ID no. 212274719
  misc_feature: Bit score of 501.9 for HMM based on sequences of Figure 12
  misc_feature: Functional Homolog Of SEQ ID NO. 1318
MAVVPAAPVVLGVAMVLVVLAASAGAAGQLRMGFYAESCPGVERVVGDFVRQHVRRVPTVAAALLRLHFHDCFVRGCDASVLLNSTAGSVAEKDAPPNLTLRGFDLVDRVKALVEDACPGVVSCADVLALAARDAVVAIGGPSWRVATGRRDGTVSAMQEALDDIPKHTMTFPQLASLFASKGLGVRDLVWLSGAHTIGIAHCSSFADRLYGYPGGGVGAAGNDTADPALDATYAANLRRRKCRAAGGGYAEDGVVEMDPGSHLTFDLGYYRALLKRRGLLRSDAALLTDAAARADVEGVAAGPEEVFFQLFARSMARLAALQVKTGAEGEVRRNCAVVNGG

SEQ ID NO: 1422 - protein, 328 aa, Solanum lycopersicum
  misc_feature (40)..(290): Pfam Name: peroxidase Pfam Description: Peroxidase
  misc_feature: Public GI ID no. 678547
  misc_feature: Bit score of 606.6 for HMM based on sequences of Figure 12
  misc_feature: Functional Homolog Of SEQ ID NO. 1318
MASFSYLMSVLVLCVIIGYTNAQLELNFYAKSCPKAEKIIKDFVQQQVPKAPNTAAAILRMHFHDCFVRGCDGSVLLNFTSTNGNQTEKLANPNLTLRGFSFIDAVKRLVEAECPGVVSCADIVALVARDAVVATEGPFWNVPTGRRDGTISNVSEANGDIPAPTSNFTRLQQSFAKKGLDLNDLVLLSGAHTIGVSRCSSFSERLYNFTGVVGTQDPSLDSEYADNLKSRKCRSINDNTTIVEMDPGSFKTFDLSYFKLLLKRRGLFQSDAALTTRTSTKSFIEQLVDGPLNEFFDEFAKSMEKMGRVEVKTGSAGEIRKHCAFVNS

SEQ ID NO: 1423 - DNA, 978 bp, Populus balsamifera subsp. trichocarpa
  misc_feature: Ceres Annot ID no. 1488034
  misc_feature: Encodes the peptide sequence at SEQ ID NO. 1424
atgggaaggattgggtatttcgggatgctaatctttggtcttttagcatttatgggctcaaccgaagctcaactaaagatgggtttttataatacaagctgcccgaaagctgagaagattgtgcaaggctttgtaaaccagcacatccacaacgctccatcattggctgcaaccttaatcagaatgcatttccatgattgctttgtcaggggttgcgatgcatctgtgctgttgaacacaacttccggcgaacaacctgaaaaggcagcaactccaaatcttacactcagaggctttgacttcatcgacagagtgaaacgcctagttgaagctgaatgtcctggaattgtgtcttgtgctgatatcctcaccttggtcgctagggacagtatagtagccacaggaggtccattctggagagttccgactggccggcgagacggtttgatctccaggtcctcagaggccttgtccaacgtcccatctcccatgatcaacttcaccactctacaaacactgtttgctaaccaaggtcttgatttgaaagacctggtcttgctttctggtgctcataccattggcattgctcattgtcaatcgttttcgaaccggctatacaatttcactgggactggagatgaagacccagctctagatagcgaatatgctgcgaatttgaaggctagaaagtgcagaagtattagcgataacactactatagttgagatggaccctggaagcagaaagacatttgatcttagctactataaactcttgctgaagagaagaggtctatttcaatcagatgctgccttgaccacaaactctaatacattgtctatgatccgccaaatactacagggttcaatagatttccgttctgaattttccaaatccatggagaaaatgggcagaattcgtgttaaaactggctcgaatggcgagattagaaggcaatgtgctttggttaatagctaa

SEQ ID NO: 1424 - protein, 325 aa, Populus balsamifera subsp. trichocarpa
  misc_feature (41)..(288): Pfam Name: peroxidase Pfam Description: Peroxidase
  misc_feature: Ceres Annot ID no. 1488034
  misc_feature: Bit score of 598.9 for HMM based on sequences of Figure 12
  misc_feature: Functional Homolog Of SEQ ID NO. 1318
MGRIGYFGMLIFGLLAFMGSTEAQLKMGFYNTSCPKAEKIVQGFVNQHIHNAPSLAATLIRMHFHDCFVRGCDASVLLNTTSGEQPEKAATPNLTLRGFDFIDRVKRLVEAECPGIVSCADILTLVARDSIVATGGPFWRVPTGRRDGLISRSSEALSNVPSPMINFTTLQTLFANQGLDLKDLVLLSGAHTIGIAHCQSFSNRLYNFTGTGDEDPALDSEYAANLKARKCRSISDNTTIVEMDPGSRKTFDLSYYKLLLKRRGLFQSDAALTTNSNTLSMIRQILQGSIDFRSEFSKSMEKMGRIRVKTGSNGEIRRQCALVNS

SEQ ID NO: 1425 - DNA, 953 bp, Panicum virgatum
  misc_feature: Ceres Clone ID no. 1760764
  misc_feature: Encodes the peptide sequence at SEQ ID NO. 1426
gcgagcaccaccaccagcgcggacgtcgtggcgcgcatgtgggcggcctctacatcccgcgtcccacctccaccgccttcgtcgccgtcggcctagatccagcacgctcccgagcttccattccccccgaggccgccaccttccggccgacaaagcgtcggctgccgcgagttcctgcttgcggttgggagagagaggcgccgcgatggctgcggaccgcgggctcctgctgctgctcctctcggccgccgcccttgccggggtggcctccgccgctggccctttcttgtccgatggcgtgttccaggcgagcgccggatctacgggcaggagcttgctgcaggccaagaagaattgcgccatgaactttgagtttcaaaactacacaatcatcacaagcaagtgcaaagggccaaaatttcctgccgaccaatgctgtggggccttcaaggaattcgcatgcccgtttcgcgattacatcaatgatgacagcagcgactgttcatcagcaatgttcagctacatcaacctctatggcaagtaccccccaggtctctttgccaacatttgccgtgagggcaagaaggggcttgaatgcacagatgcccagagcgccgtcactgccaatggcagccaacgaacccgaagcagctcgcttgttttggttacccttgtgtgtggattgatagcattgttgttctattgaatgatgatgccttcaatttcgccaaagttggtgtttttataactgatgaggctcaagttcattctctgctccttgtgggtgggtctcagagtttcttccttttgtgtaaagtctttctcaatgtaatttatgacagattgcatattctatggtcttccacgtgtcgatgccgaattacaacgttgagactcaatccactgtaccattgtattgtgaccgttacattaaattaaattaaattcatacc

SEQ ID NO: 1426 - protein, 166 aa, Panicum virgatum
  misc_feature: Ceres Clone ID no. 1760764
  misc_feature: Bit score of 401.3 for HMM based on sequences of Figure 16
  misc_feature: Functional Homolog Of SEQ ID NO. 1426
  misc_feature: in Figure 16
MAADRGLLLLLLSAAALAGVASAAGPFLSDGVFQASAGSTGRSLLQAKKNCAMNFEFQNYTIITSKCKGPKFPADQCCGAFKEFACPFRDYINDDSSDCSSAMFSYINLYGKYPPGLFANICREGKKGLECTDAQSAVTANGSQRTRSSSLVLVTLVCGLIALLFY

SEQ ID NO: 1427 - DNA, 830 bp, Triticum aestivum
  misc_feature: Ceres Clone ID no. 729979
  misc_feature: Encodes the peptide sequence at SEQ ID NO. 1428
aagcagcatccgtcgccactaattaattgcagctgtagcaccgcccgcctgctccgtgcagcctacaagcaccagcgagaagagtcgaggcgcgcacgtgggtgggtctgcgcgcgccgtccgcctcctccaccaggccgccgtcgccgccgtcgtcgtcctagatccgcagcagtgcgtgccggagggaagcgcgatggccgccggccgtgggctcccgctcctcctcgtcctggccgccctcctggtcgggctcgcctccgcctcccccttcatctccgacggcgtgttccaggccagcgccggatctactacggggaggaccttgctgcaggccaagagggattgtcctgtgaacttcgagttccaaaactacaccgtcatcacaagcaggtgcaaagggccaaaatatcctcctaaagactgctgtgattctttcaaggaatttgcatgcccgtttaataactacatcaatgatgaaagcaatgactgtgcatccacaatgttcagctacatcaacctytatggcaagtacccaccaggcctgtttgcccacgagtgccgagaaggcaagctaggtctttcttgcgaaggcgtcccccagaaagacgttgttgcaagtggtgtccaaagggctcgaagcagctcgcttgctttgattactytcatgtgtggactagtagcattgttcttccagtaggtggtggtgatacctttatttctcccacatttttcaatgatggtgagcctgaatcctctgctgctccttaaggcgctcttgaaatttttcttgttataatattgtgtaattttatgttatgtcagactac

SEQ ID NO: 1428 - protein, 167 aa, Triticum aestivum
  misc_feature: Ceres Clone ID no. 729979
  misc_feature: Bit score of 410.4 for HMM based on sequences of Figure 16
  misc_feature: Functional Homolog Of SEQ ID NO. 1426
  misc_feature: in Figure 16
  misc_feature (109)..(109): Xaa is any aa, unknown, or other
  misc_feature (157)..(157): Xaa is any aa, unknown, or other
MAAGRGLPLLLVLAALLVGLASASPFISDGVFQASAGSTTGRTLLQAKRDCPVNFEFQNYTVITSRCKGPKYPPKDCCDSFKEFACPFNNYINDESNDCASTMFSYINXYGKYPPGLFAHECREGKLGLSCEGVPQKDVVASGVQRARSSSLALITXMCGLVALFFQ

SEQ ID NO: 1429 - protein, 167 aa, Oryza sativa subsp. japonica
  misc_feature: Public GI ID no. 115448365
  misc_feature: Bit score of 421.4 for HMM based on sequences of Figure 16
  misc_feature: Functional Homolog Of SEQ ID NO. 1426
  misc_feature: in Figure 16
MAVDRGLLLLVVSAAVLVGLASASPFISDSVFLGSVGSTGRSLLQAKKNCPVNFEFQNYTIITSKCKGPRFPAKQCCDAFKEFACPFNEYINDESNDCASTMFSYINLYGKYPPGLFANECREGKLGLSCEGVSQKDSVVSSAGQQAQSSLLAFIMLTFGLAALWFH

SEQ ID NO: 1430 - DNA, 972 bp, Zea mays
  misc_feature: Ceres Clone ID no. 1451881
  misc_feature: Encodes the peptide sequence at SEQ ID NO. 1431
accaaacaaaccgcgtccgcgtcgagtctctactctctcggctgtccggtccggcgcggctctcgcgtctccaacctacccatgctgcagctcctccaactccaaggctcacaccaccccgcgacgggcgacgctaattaagtagagctgcaacacctgggttggaggctagagcttgcaaacaccaccagcgaaaacgtcgtggccagccatcccggtgtcgtcccgcgttctacagccaccgctgtcgtcgccgtcctagactcctagatccgtcagcttaacgagctccattccttcgaggccagccatcccggtgtctcagcagcggcggcggcggcgtcgagctcttgctttctgtgggaggacgcatggcgatgtctgcggggcgtgggctcttggtcctcttcttctctgccgccgtagtggctgagctcgcctctgccgcgaacggtcctttcctgtccgatagcgtcttccagtcgagcgccggatctacagggaggagcttgctgcaggccaagaatagttgccctgtgaactttgagttccaaaactacacaatcatcacaagcaagtgcaaaggaccgaagtttccagccagccaatgctgtgccgcactcaaggaattcgcgtgcccttttaacaattacctcaatgacgagagcaatgaatgtgcatcgacaatgttcagctacatcaacctctatggcaagtatccaccaggtctgttttccagcgagtgcaaagaaggcaagatggggctttcttgcgcagatgtcccccggaaggacagttccactgcaaacagtggttatcgcgcccaaagcagcttgcttgcgttgattactgtcttgagcgtggtagcagcgttgttctactgaactacagctccattcatttcccacaaagatggtgtgttacaactgttgaggcttgagttgcaccttttggtgcttatgggttggcttc

SEQ ID NO: 1431 - protein, 170 aa, Zea mays
  misc_feature: Ceres Clone ID no. 1451881
  misc_feature: Bit score of 397.3 for HMM based on sequences of Figure 16
  misc_feature: Functional Homolog Of SEQ ID NO. 1426
  misc_feature: in Figure 16
MAMSAGRGLLVLFFSAAVVAELASAANGPFLSDSVFQSSAGSTGRSLLQAKNSCPVNFEFQNYTIITSKCKGPKFPASQCCAALKEFACPFNNYLNDESNECASTMFSYINLYGKYPPGLFSSECKEGKMGLSCADVPRKDSSTANSGYRAQSSLLALITVLSVVAALFY

SEQ ID NO: 1432 - DNA, 507 bp, Sorghum bicolor
  misc_feature: Ceres Annot ID no. 8680955
  misc_feature: Encodes the peptide sequence at SEQ ID NO. 1433
atggctgcgggccgtggcctcttggtcctcttcttctcggccgccgtggtggctgggctcacctctgcggcgaatggttctttcctgtccgatagcgtcttccagccgagcgccggatctacagggaggagcttgctgcaggccaagaatagttgccctgtgaactttgagttcctgaactacacaatcatcacaggcaagtgcaaagggccaaagtttccagccagccaatgctgtgcggcactcaaggaattcgcgtgcccttattatatgtacctcaatgatgagagcaacgactgtgcatcgacaatgttcagctacatcaacctctatggcaagtatccaccaggcctgttttccagcgagtgcaaagaaggcaagttggggctttcttgcgcagatgtcccccagaaggacagtgccactgcaaacagtggttatcacgctcaaagcagcttgcttgtgttgattactgtcttgagtgtggtagtagcgttgttccactga

SEQ ID NO: 1433 - protein, 168 aa, Sorghum bicolor
  misc_feature: Ceres Annot ID no. 8680955
  misc_feature: Bit score of 400.1 for HMM based on sequences of Figure 16
  misc_feature: Functional Homolog Of SEQ ID NO. 1426
  misc_feature: in Figure 16
MAAGRGLLVLFFSAAVVAGLTSAANGSFLSDSVFQPSAGSTGRSLLQAKNSCPVNFEFLNYTIITGKCKGPKFPASQCCAALKEFACPYYMYLNDESNDCASTMFSYINLYGKYPPGLFSSECKEGKLGLSCADVPQKDSATANSGYHAQSSLLVLITVLSVVVALFH

SEQ ID NO: 1434 - DNA, 865 bp, Glycine max
  misc_feature: Ceres Clone ID no. 1047334
  misc_feature: Encodes the peptide sequence at SEQ ID NO. 1435
cttctctagtcacttccaacacttattcaatttttatctttcttttgctctttgtgcattataatcttctcttgtcattacaacccccccgttactcaaatcagaaactctcatttgaagctaacaaacaacaaagatcaacggatctatctaccttcagtcatggtgttttctttcaaccaacgcttctgggtttcttcttcgcttctcctcctcgcggtcctctctgtttcttctctcactcccactttcctttctgacaccgttttcgattctcaaccagcgcataccggtcggaaccttcttcaggctaaaaagggttgttctgtgaatttcgagtttttaaactacacagtaatcacaagcaaatgcaaaggaccccggtaccctcccaaagaatgttgtggggcttttaaagaatttgcttgcccttatgccgatgtattaaatgatttaacgaatgagtgtgcatcaaccatgtttagttacattaatctctatggaaaataccctcctggcctctttgctagtgagtgtcgtgaaggaaagtttggtcttgcttgtcctgcagtgccaccatcagcagtatcagcagatgacactgcaaatcaagctgtacactgtccgtctctattgttgatgctcatagcctgcttcttaatcttgttattctgatatgtttctatacacaacttcattctttttctctcaatattgatgtataatcagttaccatttttttatatgtggtgtgtgaattactttttgcgcaaaaacaaaaaattggctatgtgcctggtagtttaaggagagttctattgatcaatttatgtaatgaaattacgtttgccaagtgagccttagt

SEQ ID NO: 1435 - protein, 170 aa, Glycine max
  misc_feature: Ceres Clone ID no. 1047334
  misc_feature: Bit score of 403.6 for HMM based on sequences of Figure 16
  misc_feature: Functional Homolog Of SEQ ID NO. 1426
  misc_feature: in Figure 16
MVFSFNQRFWVSSSLLLLAVLSVSSLTPTFLSDTVFDSQPAHTGRNLLQAKKGCSVNFEFLNYTVITSKCKGPRYPPKECCGAFKEFACPYADVLNDLTNECASTMFSYINLYGKYPPGLFASECREGKFGLACPAVPPSAVSADDTANQAVHCPSLLLMLIACFLILLF

SEQ ID NO: 1436 - DNA, 815 bp, Arabidopsis thaliana
  misc_feature: Ceres Clone ID no. 6841
  misc_feature: Encodes the peptide sequence at SEQ ID NO. 1437
atcgacggaccatcttttattctattttatttttattttatttatataattattctctctctttcatcttcgtggtttgccatagctcttcttgaatcaaggtcgtcttcttgaaatcagatctcttcgtgacttctcctgtaaccaacaaagaaccatggagctcctctctagagctcttttcttctttcttctactctcagttctttcttctttctcttcttcaagtttcatttcagatggggtcttcgaatctcagagtttggttcttggcagaaacttgcttcagaccaagaaaacatgtcctgtgaactttgagtttatgaactacacgatcataaccagcaaatgcaaaggtcccaaatacccaccaaaagaatgttgtggcgccttcaaggactttgcgtgtccttacactgaccagctcaacgacctgagctcggattgtgcaaccactatgttcagttacatcaatctctatggaaaatacccgcctggacttttcgctaaccagtgcaaagaaggtaaagaaggtctcgaatgccctgccggatcccagttgcctccagagacatcagcagaggtaaacgcagcaactacctcgtcgtcccgtctttggctgaccgtttccgcggctcttttggtttttgttaagttgttctgaggctgataaatccgaatttctgcaatgaacttattacaacaacctgaggaagaggatgtatgtatatccacgatttgttttactgttgtactgtctcattcttttgttactagggagttcaaaaaattctaaatgataatttgtaatggcc

SEQ ID NO: 1437 - protein, 168 aa, Arabidopsis thaliana
  misc_feature: Ceres Clone ID no. 6841
  misc_feature: Bit score of 391.0 for HMM based on sequences of Figure 16
  misc_feature: Functional Homolog Of SEQ ID NO. 1426
  misc_feature: in Figure 16
MELLSRALFFFLLLSVLSSFSSSSFISDGVFESQSLVLGRNLLQTKKTCPVNFEFMNYTIITSKCKGPKYPPKECCGAFKDFACPYTDQLNDLSSDCATTMFSYINLYGKYPPGLFANQCKEGKEGLECPAGSQLPPETSAEVNAATTSSSRLWLTVSAALLVFVKLF

SEQ ID NO: 1438 - DNA, 516 bp, Populus balsamifera subsp. trichocarpa
  misc_feature: Ceres Annot ID no. 1495176
  misc_feature: Encodes the peptide sequence at SEQ ID NO. 1439
atggggttgaatcagtgtttttcatttgtcttcttcatctttctcttgatgggtctctttgcttctccttcttttgcatctactttcatttcagatggtgtctttgaatctcatgcttctactggcaggaatctacttcagactaagaaagcttgccctgtaaactttgagtttctgaactatacaatcatcacaagccaatgtaaaggaccccagtatactcccagtcgctgctgtggatcatttaaggagtttgcctgtccttacgcagatgtgataaatgacttgaccaatgattgtgcatcaatcatgttcagctacattaacctctatgggaaatatccgcctggtctatttgccaatgaatgcaaggaagggaagctgggacttgcatgccctgcaccagcaccatcagaactggctgctgacaaaaatgggagtcagatcatgcgtggtccgattctcctgctgatgttcttagctggtttcttagtggtgttctttcaattactttga

SEQ ID NO: 1439 - protein, 155 aa, Populus balsamifera subsp. trichocarpa
  misc_feature: Ceres Annot ID no. 1495176
  misc_feature: Bit score of 393.0 for HMM based on sequences of Figure 16
  misc_feature: Functional Homolog Of SEQ ID NO. 1426
  misc_feature: in Figure 16
MGLFASPSFASTFISDGVFESHASTGRNLLQTKKACPVNFEFLNYTIITSQCKGPQYTPSRCCGSFKEFACPYADVINDLTNDCASIMFSYINLYGKYPPGLFANECKEGKLGLACPAPAPSELAADKNGSQIMRGPILLLMFLAGFLVVFFQLL

SEQ ID NO: 1440 - protein, 171 aa, Vitis vinifera
  misc_feature: Public GI ID no. 225446345
  misc_feature: Bit score of 403.6 for HMM based on sequences of Figure 16
  misc_feature: Functional Homolog Of SEQ ID NO. 1426
  misc_feature: in Figure 16
MAFNPCFSLLLLFLLTCLVTSASSSFISHDVLQSHESTGRTLLQTKKSCPVNFEFLNYTIITSQCKGPQYSPKLCCGAFKDFACPYADELNDLTNDCASTMFSYINLYGKYPPGLFASECQEGKEGLECPAQAPSTESAKDSVNASRGQIVSSYSMLTLLAGFLVLLFHLF

SEQ ID NO: 1441 - protein, 169 aa, Vigna radiata
  misc_feature: Public GI ID no. 3868853
  misc_feature: Bit score of 391.9 for HMM based on sequences of Figure 16
  misc_feature: Functional Homolog Of SEQ ID NO. 1426
  misc_feature: in Figure 16
MVFSLHKRFWVSSSFLLLFWALSVSSLTPTFLSDHVFDSQAHAGRNLLQAKKGCSVNFEFLNYTIITSKCKGPQYPPKECCGAFKEFACPYADVLNDLTNECASTMFSYINLYGKYPPGLFASECHDTKRGLECPALPPSVSADDTSNQFLHCPSLLLLLTTCFLILLF

SEQ ID NO: 1442 - DNA, 866 bp, Musa acuminata
  misc_feature: Ceres Clone ID no. 1727134
  misc_feature: Encodes the peptide sequence at SEQ ID NO. 1443
aaatctctgcaatattttggtcggagcgaacgcggtgacggaacaccgagctcgtggcgtccctcttcgtccgtttcttgcgctcagcttgttgattcggtttcctcttctgtctctctgtctccctctttcctttccttcagtggatcggaggcggcggggggggacttcgagatggatctgaatcggaaaatcccactgcaggcggttctttttgcagcctttgttggatgggctgctgcttcgagcttcatctcaggtgatgcgttcgtgtcgcatggatctggcggccggagcttgctacaggcgaagacgagttgccctgtgaactttgaatttatgaactacacaatcatcacaatcaagtgcaagggcccccagtaccctgccaaactctgctgtgaagctctcaaggaatttgcatgtccatatgctgaggaattgaatgatttgacgaacgattgtgcatcaaccatgttcagttacattaacctctatgggaggtaccctccaggtctgtttgccagtgagtgccgagaaggcaaggaagggcttagctgtcctgctaatgccccacagtcagagaatgtctcaaggtcacagaatgattcaagttccggccacatacgtacgagcctcatttccatactcttccttgtgtgcggaatagctctacaatttctgttttcttaaaggtggaaggtgtacatttctgaaacctgcatgatcacaatctcttgctgtaacctattttcctatatgttcaggtgagttaagttggtcaacttgtgaggagcttagattcatagttatggacttttgtatccttattctgaaccttagtatgggttgagttttccatttcc

SEQ ID NO: 1443 - protein, 172 aa, Musa acuminata
  misc_feature: Ceres Clone ID no. 1727134
  misc_feature: Bit score of 406.4 for HMM based on sequences of Figure 16
  misc_feature: Functional Homolog Of SEQ ID NO. 1426
  misc_feature: in Figure 16
MDLNRKIPLQAVLFAAFVGWAAASSFISGDAFVSHGSGGRSLLQAKTSCPVNFEFMNYTIITIKCKGPQYPAKLCCEALKEFACPYAEELNDLTNDCASTMFSYINLYGRYPPGLFASECREGKEGLSCPANAPQSENVSRSQNDSSSGHIRTSLISILFLVCGIALQFLFS

SEQ ID NO: 1444 - DNA, 501 bp, Solanum lycopersicum
  misc_feature: Ceres Annot ID no. 8458866
  misc_feature: Encodes the peptide sequence at SEQ ID NO. 1445
atggggtgcagatattgtttttcttgtatttttctactgttttctttcttcatttcagcttcagcttcagcttatttatcagatgggatttttgttaatgaaggtttaactgggaggaatctacttcaagccaagaaaccttgtcctatcagcttcgagtttcaaaactacacagtggtcactacccaatgcaaaggaccaaaatacccagccaaacaatgttgtgaagcccttgcggagtttgcgtgtccctattcagaattcgtgaatgatttgacaactgattgtgcctctaccatgttcagctacattaaccttcacgggaagtacccacctggtcttttcgccagtgagtgcaataaagacaaaaatgggctaccatgtcctgattctgcatcatccgaatctgccagtgctaataatagtcatatgagctgtagactatcaccgatcctgatgattgcaacagctcttacgggcttcttcttgttgcttctctga

SEQ ID NO: 1445 - protein, 166 aa, Solanum lycopersicum
  misc_feature: Ceres Annot ID no. 8458866
  misc_feature: Bit score of 370.5 for HMM based on sequences of Figure 16
  misc_feature: Functional Homolog Of SEQ ID NO. 1426
  misc_feature: in Figure 16
MGCRYCFSCIFLLFSFFISASASAYLSDGIFVNEGLTGRNLLQAKKPCPISFEFQNYTVVTTQCKGPKYPAKQCCEALAEFACPYSEFVNDLTTDCASTMFSYINLHGKYPPGLFASECNKDKNGLPCPDSASSESASANNSHMSCRLSPILMIATALTGFFLLLL

SEQ ID NO: 1446 - protein, 170 aa, Ipomoea nil
  misc_feature: Public GI ID no. 124484379
  misc_feature: Bit score of 403.1 for HMM based on sequences of Figure 16
  misc_feature: Functional Homolog Of SEQ ID NO. 1426
  misc_feature: in Figure 16
MELGHSFCLSFFLLLSLSLFAGFSSSSSISDGVFVSQSSTGRSLLQAKKACPVNFEVQNYTVITSQCKGPQYPPKLCCGAFTEFACPYAEYLNDLTNDCASTMFSYINLYGKYPPGLFANECKGDKLGLACPAQSPSQISNDHSGAYINCKPSSMLVFAATFLVLLARFI

SEQ ID NO: 1447 - DNA, 1134 bp, Gossypium hirsutum
  misc_feature: Ceres Clone ID no. 1970015
  misc_feature: Encodes the peptide sequence at SEQ ID NO. 1448
agactttcagccataattaagcttcttcccttcagaaaacttcgactgaagctgctccaagattaaagaagcttcaatttataatactctgccccttaaactagcaagcctgatctgctgcataatcgtctaaagaaaatttgatggggataaataagttgctgtgttggtttgcagttttcttctttttgttgggtttctctgcttgcacttcgatttcggatggtgttttcgactctctcacttctactggaaggcacctccttcaagctaagaaagcttgccctgtgaactttgagtttctgaactacacaattatcacaagccaatgcaaaggaccaaagtatccgcctcaaagttgttgttctgcattcaaggaatttgcttgtccttatgcagaacagatcaacgacttgacgactgaatgcgcttcaactatgttcagctacattaatctttacgggaaataccctcctggtctttttgctagcgagtgccgtgaagggaaagaagggctcgcttgccctgcgttatcgccatcagcatcagcatcagcatcggagaatgctaatggtagtcaacagctgatacgtaatccttggatgctggtaatggccgcaatcatagctgcagctatgttgttatgaactcctggaaatgaattccgattattccattatttgatttatatataatatttatattattttcccacttttaacgctgaagaagagtacagtattttgatttcatacaccaggttctttcttggtgcatccttttatttgtacttccagaagtgttgtagaaataatatacttcatttggttttgcgtggacaagcatcatgtctattagtattaggagatttcaagttggtttctaccacataagtcaagttgggaggttatattcatttcgtcattcttatttggtttgattgaacaaaggagaccagagcatggacaaagtcaaagtcaaagtcaagaaaattagattgtgaggttaaattataaaaaattaagacgaaaactaatgcataatattaatctttgataaatcattgtataaatgtaaatattcttacaaaattgttgaagttacttataaagtttagattgtgaggttgatact

SEQ ID NO: 1448 - protein, 167 aa, Gossypium hirsutum
  misc_feature: Ceres Clone ID no. 1970015
  misc_feature: Bit score of 393.3 for HMM based on sequences of Figure 16
  misc_feature: Functional Homolog Of SEQ ID NO. 1426
  misc_feature: in Figure 16
MGINKLLCWFAVFFFLLGFSACTSISDGVFDSLTSTGRHLLQAKKACPVNFEFLNYTIITSQCKGPKYPPQSCCSAFKEFACPYAEQINDLTTECASTMFSYINLYGKYPPGLFASECREGKEGLACPALSPSASASASENANGSQQLIRNPWMLVMAAIIAAAMLL

SEQ ID NO: 1449 - DNA, 883 bp, Panicum virgatum
  misc_feature: Ceres Clone ID no. 1879623
  misc_feature: Encodes the peptide sequence at SEQ ID NO. 1450
gcaagcaccaccagcgcggacgtcgtggcgcgcatgtgggcggcctgtacatcccgcgtcccgtctccaccgccttcgtcgccgtcgccgtcggcctagatccagcacgcccccgagcttccattgccatagaggccgccacctttcccgcggacaaagcgtcggctgccgcgagttcctgcttgcggtggggaccacgatggctgcggaccgcgggctcctgctgctgctcctctcggccgccgcccttgccgcggtggcctccgccgctggccctttcttgtccgatggcgtgttccaggctagcgccggatctacgggcaggagcttgctgcaggccaagaagaattgcgccatgaactttgagtttcaaaactacacaatcatcacaagcaagtgcaaagggccaaaatttcctgctgaccaatgctgtggggccttcaaggaattcgcatgcccgttccgtgattacatcaacgacgacagtagcgactgttcatcagcaatgttcagctacatcaacctctatggcaagtaccccccaggactgtttgccaacatgtgccgtgagggcaaggaggggcttgcctgcacagatgcccagagcgccgtcgctgccaatggtagccaacgagcccaaagccgctcgcttgttttggttaccctcgtgtgtggattggtagcattgttgttccactgaatgatgatgccttcaatttcgccagagatggtgtttttgtaactgatgaggctcaagttcattctctgcgccttatggtgctaaaatagtaaaattgtgggtgggtctcagagtttcttccttttgtgtaaagtctttcttcatgtaatttatgacagattgcatattctatgggcttccacc

SEQ ID NO: 1450 - protein, 166 aa, Panicum virgatum
  misc_feature: Ceres Clone ID no. 1879623
  misc_feature: Bit score of 391.5 for HMM based on sequences of Figure 16
  misc_feature: Functional Homolog Of SEQ ID NO. 1426
MAADRGLLLLLLSAAALAAVASAAGPFLSDGVFQASAGSTGRSLLQAKKNCAMNFEFQNYTIITSKCKGPKFPADQCCGAFKEFACPFRDYINDDSSDCSSAMFSYINLYGKYPPGLFANMCREGKEGLACTDAQSAVAANGSQRAQSRSLVLVTLVCGLVALLFH

SEQ ID NO: 1451 - DNA, 1043 bp, Panicum virgatum
  misc_feature: Ceres Clone ID no. 1994946
  misc_feature: Encodes the peptide sequence at SEQ ID NO. 1452
acctcccctaaatttgtttgattcgagctgtaacacacgagggttagagctaaccttgccaaacgacacaaagcgaaggcgtcgtgcggcctcgacatcccgcgccgcgttccacctccatcgacggcggcctagttccgaaaagctcccgagctccacatcctcaagaccactaccctcgagcagtcccgggtctcagggtcgccggcggcggtagcgagttcttgcttgcttccggtggtgggaggacgcgtgggcgatggcggtggaccgcgggctcctgctcctcttcctcctctcggccgccgccctggccggggtcgcctctgccgccggtcctttcttgtccgacggcgtgttcctggcgaccgccggatccacggggaggagcttgttgcaggccaagaaggattgccctgtgagctttgagttccaaaactacacaatcatcacaagcaagtgcaaagggccaacatttcctgccagccaatgctgcgccgctctcaaggaattcgcctgcccattctatatgtacctcaatgatgacagcaacagctgcgcatcgaccatgttcacctacatcaacctctatggcaagtacccaccagggctgttctccagcgagtgcaaggaaggcaagttggggctttcttgcgcagatgtcccccaaagagatatttccgctgcaaacggtggggaacgcgctcaattgcttgcgtggattgtcttgagtgtggtagtagcgtcattgttccactgaatgataactccattcatttgcccgaaagatagggtgtttcaactgatgaggctttgagtttgatcattgcaccttatggtgctccttgtgggttagctgccagattcttccttttgtctgtaaaatctcttctaatataatttatgatgtagtgtgtattttctggaattcggcttgttgatgccggtgtttagttcatactcagctcaactcagcagtatcattgtattgtcactgttacattacattatgatgcatatgtatcaattatcattcatattag

SEQ ID NO: 1452 - protein, 166 aa, Panicum virgatum
  misc_feature: Ceres Clone ID no. 1994946
  misc_feature: Bit score of 360.6 for HMM based on sequences of Figure 16
  misc_feature: Functional Homolog Of SEQ ID NO. 1426
MAVDRGLLLLFLLSAAALAGVASAAGPFLSDGVFLATAGSTGRSLLQAKKDCPVSFEFQNYTIITSKCKGPTFPASQCCAALKEFACPFYMYLNDDSNSCASTMFTYINLYGKYPPGLFSSECKEGKLGLSCADVPQRDISAANGGERAQLLAWIVLSVVVASLFH

SEQ ID NO: 1453 - DNA, 972 bp, Zea mays
  misc_feature: Ceres Clone ID no. 101992420
  misc_feature: Encodes the peptide sequence at SEQ ID NO. 1454
  misc_feature (837)..(837): n is a, c, t, g, unknown, or other
  misc_feature (931)..(931): n is a, c, t, g, unknown, or other
cccaacctacccatgctgcagctcctccaactccaaggctcacaccaccccgcgacgggcgacgctaattaagtagagctgcaacacctgggttggaggctagagcttgcaaacaccaccagcgaaaacgtcgtggccagccatcccggtgtcgtcccgcgttctacagcctctgcatcccgcgttctacagccaccgctgtcgtcgccgtcctagactcctagatccgtcagcttaacgagctccattccttcgaggccagccatcccggtgtctcagcagcggcggcggcggcgtcgagctcttgctttctgtgggaggacgcatggcgatgtctgcggggcgtgggctcttggtcctcttcttctctgccgccgtagtggctgagctcgcctctgccgcgaacggtcctttcctgtccgatagcgtcttccagtcgagcgccggatctacagggaggagcttgctgcaggccaagaatagttgccctgtgaactttgagttccaaaactacacaatcatcacaagcaagtgcaaaggaccgaagtttccagccagccaatgctgtgccgcactcaaggaattcgcgtgcccttttaacaattacctcaatgacgagagcaatgaatgtgcatcgacaatgttcagctacatcaacctctatggcaagtatccaccaggtctgttttccagcgagtgcaaagaaggcaagatggggctttcttgcgcagatgtcccccggaaggacagttccactgcaaacagtggttatcgcgcccaaagcagcttgcatgcgttgattactgtcttgagcgtggtagcagcgttgttctactngaactacagctccattcatttcccacaaagatggtgtgttacaactgttgaggcttgagttgcaccttttggtgcttatggggttggcttcctngattctttcttttgagagcaactccaatagttatataaatt

SEQ ID NO: 1454 - protein, 189 aa, Zea mays
  misc_feature: Ceres Clone ID no. 101992420
  misc_feature: Bit score of 395.2 for HMM based on sequences of Figure 16
  misc_feature: Functional Homolog Of SEQ ID NO. 1426
  misc_feature (171)..(171): Xaa is any aa, unknown, or other
MAMSAGRGLLVLFFSAAVVAELASAANGPFLSDSVFQSSAGSTGRSLLQAKNSCPVNFEFQNYTIITSKCKGPKFPASQCCAALKEFACPFNNYLNDESNECASTMFSYINLYGKYPPGLFSSECKEGKMGLSCADVPRKDSSTANSGYRAQSSLHALITVLSVVAALFYXNYSSIHFPQRWCVTTVEA

SEQ ID NO: 1455 - DNA, 977 bp, Panicum virgatum
  misc_feature: Ceres Clone ID no. 1790201
  misc_feature: Encodes the peptide sequence at SEQ ID NO. 1456
tgccaaacgacacaaagcgaaggcgtcgtcgtgcggcctcgacatcccgcgccgcgttccggcaagctcccgagctccacatcctcaagcccactaccctcgagcagtcccgcggataaggacctcagggtcgccgcctccggcggcgggttcttttcttgcttccggtggtgggagcacgcgtgggcgatggcgggggaccgcgggctcctgctcctcttcctcctctcggccgccgccctggccggggtcgcctctgccgccgctcctttcttgtccgacggcgtgttccaggtgaccgctggatccacggggaggagcttgttgcaggccaagaaggattgccctgtgagctttgagttccaaaactacacaatcatcacaagcaagtgcaaagggccgaaatttcctgctagccaatgctgcgctgctctcaaggaatttgcctgcccattctatatgtacctcaatgatgacagcaacagctgtgcgtcgaccatgttcacctacatcaacctcaacggtaagtacccaccaggcctgttctccagcgagtgcaaggaaggcaagttggggctttcttgcgaaaatgtcccccaaagagatatttccactgcaaatggtggggaacgcgctcaacgcagcttccttgcatggattgtcttgagtgtggcagtagcgtcgttgttccattgaatgatagctccattcatttgcccgaaatatagggtgtttcaactgttgaggctttgagtttgatcattgcaccttatggtgctcctggtgggttagctgccagattcttcgttttgtgtgtaaaatctcttctaatataatttatgatgtattgtgtattttctggaatttgacttgtcaatgccggtgtttagctcaaactcagctcaactcagcggtatcattgtattgtcactgttgcattacactatgatgcttatgtatcaattatcattcatatg

SEQ ID NO: 1456 - protein, 168 aa, Panicum virgatum
  misc_feature: Ceres Clone ID no. 1790201
  misc_feature: Bit score of 360.9 for HMM based on sequences of Figure 16
  misc_feature: Functional Homolog Of SEQ ID NO. 1426
MAGDRGLLLLFLLSAAALAGVASAAAPFLSDGVFQVTAGSTGRSLLQAKKDCPVSFEFQNYTIITSKCKGPKFPASQCCAALKEFACPFYMYLNDDSNSCASTMFTYINLNGKYPPGLFSSECKEGKLGLSCENVPQRDISTANGGERAQRSFLAWIVLSVAVASLFH

SEQ ID NO: 1457 - protein, 156 aa, Oryza sativa subsp. indica
  misc_feature: Public GI ID no. 125540938
  misc_feature: Bit score of 361.3 for HMM based on sequences of Figure 16
  misc_feature: Functional Homolog Of SEQ ID NO. 1426
MAVDRGLLLLVVSAAVLVGLASASPFISDSVFLGSVGSTGRSLLQAKKNCPVNFEFQNYTIITSKCKGPRFPAKQCCDAFKEFACPFNEYINDESNDCASTMFSYINLYGKYPPGLFANECREGKLGLSCEGVSQKIVSFQVLASKLRAACLLSSC

SEQ ID NO: 1458 - DNA, 620 bp, Panicum virgatum
  misc_feature: Ceres Clone ID no. 1961617
  misc_feature: Encodes the peptide sequence at SEQ ID NO. 1459
tgccaaacgacacaaagcgaaggcggcggcgtgcggcctcgacatcccgcgccgcgttccacctccatcgacggcggcctagttccggcaagctcccgagctccacatcctcaagcccactaccctcgagcagtcccgcggataaggacctcagggtcgccgcctccggcggcgggttcttttcttgcttccggtggtgggagcacgcgtgggcgatggcgggggaccgcgggctcctgctcctcttcctcctctcggccgccgccctggccggggtcgcctctgccgccgctcctttcttgtccgacggcgtgttccaggtgaccgctggatccacggggaggagcttgttgcaggccaagaaggattgccctgtgagctttgagttccaaaactacacaatcatcacaagcaagtgcaaagggccgaaatttcctgctagccaatgctgcgctgctctcaaggaatttgcctgcccattctatatgtacctcaatgatgacagcaacagctgtgcgtcgaccatgttcacctacatcaacctcaacggtaagtacccaccaggtctgttctccagcgagtgcaaggaaggcaagttggggctttcttgcgaaaatgcc

SEQ ID NO: 1459 - protein, 135 aa, Panicum virgatum
  misc_feature: Ceres Clone ID no. 1961617
  misc_feature: Bit score of 271.1 for HMM based on sequences of Figure 16
  misc_feature: Functional Homolog Of SEQ ID NO. 1426
MAGDRGLLLLFLLSAAALAGVASAAAPFLSDGVFQVTAGSTGRSLLQAKKDCPVSFEFQNYTIITSKCKGPKFPASQCCAALKEFACPFYMYLNDDSNSCASTMFTYINLNGKYPPGLFSSECKEGKLGLSCENA

SEQ ID NO: 1460 - DNA, 951 bp, Zea mays
  misc_feature: Ceres Clone ID no. 236422
  misc_feature: Encodes the peptide sequence at SEQ ID NO. 1461
aaggtccaggttgtggcagatggacgcgctgccgctgccgccccggacggaggtcctctgccccctgcctcgccgcgccgcccggatccccttcgccgtttcagtaaacaaggccatccccaggtcgaattgtgcgcttccgccgtacagaccagcctccgcctgcgacatacttgatcttatcctcagcaagaatgacttctcagatggaggccggccttcccggtgtctcagcagcggcggcgcatggcgatggctgcggggcgtgggctcttggccctcttctcggtcgtcgtagtggctgggctcacctctgcggcaaatggtcctttcctgtccgatagcgtcttccagccgagcgccggatctacagggaggagcttactgcaggccaagaacagttgccccgtgaactttgagttccaaaactacacaatcatcacaagcaagtgcaaagggccaaagtttccagccggcccatgctgtgccgcactcaaggagttcgcgtgcccttactatacgtacctcaatgacgagagcaacgactgtgcatcgacaatgttcagctacatcaacctgtatggcaagtatccaccgggcctgttctccagcgagtgcaaagaaggcaagcaggggctctcttgcgcagatgtcctcgagagagacagtgccactgcaagcagtggtcatcacgctcaaatcagcttgcttgcgttgattactgtcttgagtgtggtagtagcgttgttccactgaactatatatgcattctcccaaatatggtgtgttacaactaatgaggtttgaattgcaccttttggtgctcatggtgggattctaggttcttcctttttgtgtgtaaagtctcacataatgttattcatggcctattgcatactctttttaattcaatttaatatggcagcgggtctgattaaggctatgactagc

SEQ ID NO: 1461 - protein, 169 aa, Zea mays
  misc_feature: Ceres Clone ID no. 236422
  misc_feature: Bit score of 374.2 for HMM based on sequences of Figure 16
  misc_feature: Functional Homolog Of SEQ ID NO. 1426
MAMAAGRGLLALFSVVVVAGLTSAANGPFLSDSVFQPSAGSTGRSLLQAKNSCPVNFEFQNYTIITSKCKGPKFPAGPCCAALKEFACPYYTYLNDESNDCASTMFSYINLYGKYPPGLFSSECKEGKQGLSCADVLERDSATASSGHHAQISLLALITVLSVVVALFH

SEQ ID NO: 1462 - DNA, 795 bp, Glycine max
  misc_feature: Ceres Clone ID no. 481087
  misc_feature: Encodes the peptide sequence at SEQ ID NO. 1463
tctcaagtctcaaactaaatttctaacaaacaacaaagatcaacggatctatctaccttcagtcatggtgttttctttcaaccaacgcttctgggtttcttcttcgcttctcctcctcgcggtcctctctgtttcttctctcactcccactttcctttctgacaccgttttcgattctcaaccagcgcataccggtcggaaccttcttcaggctaaaaagggttgttctgtgaatttcgagtttttaaactacacagtaatcacaagcaaatgcaaaggaccccggtaccctcccaaagaatgttgtggggcttttaaagaatttgcttgcccttatgccgatgtattaaatgatttaacgaatgagtgtgcatcaaccatgtttagttacattaatctctatggaaaataccctcctggcctcttttctagtgagtgtcgtgaaggaaagtttggtcttgcttgtcctgcagtgccaccatcagcagtatcagcagatgacactgcaaatcaagctgtacactgtccatctctattgttgatgctcatagcctgcttcttaatcttgttattctgatatgtttctataacacaacttcattctttttctctcmatattgatgtataatcagttaccrtttttttatatgtggtgtgtgaattactttttgcgcaaaaacaaaaaattggctatgtgcctggtagtttaagaagagttctattgatcaatttatgtaatgaaattacgtttgccaagtgasccttagtaaatggctaacttcttactgcttcatc

SEQ ID NO: 1463 - protein, 170 aa, Glycine max
  misc_feature: Ceres Clone ID no. 481087
  misc_feature: Bit score of 400.8 for HMM based on sequences of Figure 16
  misc_feature: Functional Homolog Of SEQ ID NO. 1426
MVFSFNQRFWVSSSLLLLAVLSVSSLTPTFLSDTVFDSQPAHTGRNLLQAKKGCSVNFEFLNYTVITSKCKGPRYPPKECCGAFKEFACPYADVLNDLTNECASTMFSYINLYGKYPPGLFSSECREGKFGLACPAVPPSAVSADDTANQAVHCPSLLLMLIACFLILLF

SEQ ID NO: 1464 - DNA, 865 bp, Brassica napus
  misc_feature: Ceres Clone ID no. 955288
  misc_feature: Encodes the peptide sequence at SEQ ID NO. 1465
atgtatttaatattttataatattatgtttctctctcttctctctctctctctctcatatcttcgtggtacgccatagctcgcccccgaagtcgtttttctttttcatcagatctcttggttacttgcaaagagaatcatggagctcaacttcctctctagagctctgagttctttcatccttgtactcacaatacttgcatccttctcatcttcaagtttcatctcagatggtgtgttcgaaccgcagaatttggctattggaagaaacctgcttcagaccaagaaagcatgtcctgtgaactttgagtttatgaactacacaattataacaagcctatgcaaaggtcccaaattcccagccaaggaatgctgtggcgccttcaaagacttcgcatgtccctacgctgatgatctcagtgatttaagcaatgactgtgcaaccactatgttcagttacatcaatctctatggaaaatacccgcctggactgtttgcaaaccagtgccaagaaggtaaagaaggtctcgaatgccccgctacgtctcccacctcggcaagtgatgtaaacgcagccaccaccaccgctgcttcttctcgtctttggctggcagcttctgcagcttttttggtgtttgtcaagttgctctgaggctgagaaagcctgatgtccgtcatgtaacaacttgacgaagctgaatgcgtctgtatatccmcgaattgttttacttgtactctctcattctttcgatttttggagcgtccaaaattttaaatcataatacgtatgacttttgtgkatcattgtctctttctctataaaggcaacaacttaaacatatttataactgactttagtaattgtc

SEQ ID NO: 1465 - protein, 170 aa, Brassica napus
  misc_feature: Ceres Clone ID no. 955288
  misc_feature: Bit score of 351.8 for HMM based on sequences of Figure 16
  misc_feature: Functional Homolog Of SEQ ID NO. 1426
MELNFLSRALSSFILVLTILASFSSSSFISDGVFEPQNLAIGRNLLQTKKACPVNFEFMNYTIITSLCKGPKFPAKECCGAFKDFACPYADDLSDLSNDCATTMFSYINLYGKYPPGLFANQCQEGKEGLECPATSPTSASDVNAATTTAASSRLWLAASAAFLVFVKLL

SEQ ID NO: 1466 - DNA, 855 bp, Glycine max
  misc_feature: Ceres Clone ID no. 628828
  misc_feature: Encodes the peptide sequence at SEQ ID NO. 1467
gtcactcattacaacgttagattagatcgtgtcttcttcctctctctactttcttctctaataccatacctgccacttccaacacttattcctttttttttttttccctcttgtcattactcaaattggaaacattatttgaagctatcaaacaacaatctttcttctatcaaccctcagccatggtgttttctttcaaccaaagcttctgcctttcttcttcgcttctccttctcctcatggccctctgtgtttcttctctttctgacaccgttttcaactctcaagcagcgcataccgctcggaaccttcttcaggctaaaaaaagttgttctgtgaatttcgagtttttaaactacacagtaatcacaagcaaatgcaaaggaccccattaccctcccaaagaatgttgtggggcttttaaagaatttgcttgcccttatgtcgatgtattaaatgatttaacgaacgagtgcgcctcaaccatgtttagttacattaatctctatggaaaataccctcctggcctctttgctagtgagtgtcatgaagggaaacttggtytcgcttgtcctgcattgccmccgtytgcatcagcagatgacmcagcaaatcaagttgtacactgtccatctctattgctgatgctcacagcctgcttyttaatcttgttattttgatatctttctatacacaacttttattytttttytcgcmcaatattgatgtataatcagttaccattttttatatgttgtgtgtgaattactttttgagcaaaaaaaattgacaatgtacctgtagtttaaggagagttytattgatcaaattttatytaatgaaattacgtttgcc

SEQ ID NO: 1467 - protein, 165 aa, Glycine max
  misc_feature: Ceres Clone ID no. 628828
  misc_feature: Bit score of 348.7 for HMM based on sequences of Figure 16
  misc_feature: Functional Homolog Of SEQ ID NO. 1426
  misc_feature (128)..(128): Xaa is any aa, unknown, or other
  misc_feature (134)..(134): Xaa is any aa, unknown, or other
  misc_feature (136)..(136): Xaa is any aa, unknown, or other
  misc_feature (142)..(142): Xaa is any aa, unknown, or other
  misc_feature (160)..(160): Xaa is any aa, unknown, or other
MVFSFNQSFCLSSSLLLLLMALCVSSLSDTVFNSQAAHTARNLLQAKKSCSVNFEFLNYTVITSKCKGPHYPPKECCGAFKEFACPYVDVLNDLTNECASTMFSYINLYGKYPPGLFASECHEGKLGXACPALXPXASADDXANQVVHCPSLLLMLTACXLILLF

SEQ ID NO: 1468 - DNA, 919 bp, Gossypium hirsutum
  misc_feature: Ceres Clone ID no. 1939564
  misc_feature: Encodes the peptide sequence at SEQ ID NO. 1469
aatctttcagccataattaagcttcttcccttcagaaaacatcgactgaagctgctccaagattaaagaagcttcaatttataatactctgccccttaaactagcaaagcctgatctgctgcataatcgtctaaagaaaaattgatggggataaataagttgctgtgttggtttgcagttttcttctttttgttgggtttctctgcttgcagttcgatttctggtattttatcaataaattcatagcttctctttgtttgttgtgaaacccatttttttttctgatatgcgacgatttgaatgagtacagatggtgtttttgactctttcacttctactggaaggcacctccttcaagctaagaaagcttgccctgttaactttgagtttctgaactacacaattatcacaagccaatgcaaaggaccaaagtatccacctgaaagttgttgttctgcattcaaggaatttgcttgtccttatgcagaacagatcaacgacttgacgaccgaatgcgcttcaaccatgttcagctacattaatctttacgggaaataccctcctggtctttttgctagtgagtgccgtgaagggaaagaagggctcgcttgccctgccttatcgccatcagcatcagcatcggagaatgctaatggtagtcaacagctgatacgtaatccttggatgctggtaatggccgcaatcatagctacagctatgttgttatgaaagcctggaaatgaattccgattattccattgtttgatttttatataatatttatattattttcccacttttaacgctgaagaagagtgcagtattttgatttcatacaccaggttctttcttggtgcatccttttatttgtacttgaaatgttgtagaaataatatacttcatttggttttgcgtggac

SEQ ID NO: 1469 - protein, 142 aa, Gossypium hirsutum
  misc_feature: Ceres Clone ID no. 1939564
  misc_feature: Bit score of 326.6 for HMM based on sequences of Figure 16
  misc_feature: Functional Homolog Of SEQ ID NO. 1426
MSTDGVFDSFTSTGRHLLQAKKACPVNFEFLNYTIITSQCKGPKYPPESCCSAFKEFACPYAEQINDLTTECASTMFSYINLYGKYPPGLFASECREGKEGLACPALSPSASASENANGSQQLIRNPWMLVMAAIIATAMLL

SEQ ID NO: 1470 - DNA, 697 bp, Gossypium hirsutum
  misc_feature: Ceres Clone ID no. 100011399
  misc_feature: Encodes the peptide sequence at SEQ ID NO. 1471
cccgtgtgtggcgtctataatatgatcccctggctgcatgatcttccgatgcttaactagcaaagcctgatctgctgcataatcgtctaaagaaaaattgatggtgataaataagttgctgtgttggtttgcagttttcttctttttgttggtttctctgcttgcagttcgatttctggtattttatcaataaattcatagcttctctttgtttgttgtgaaacccatttttttttctgatatgcgacgatttgaatgagtacagatggtgtttttgactctttcacttctactggaaggcacctccttcaagctaagaaagcttgccctgttaactttgagtttctgaactacacaattatcacaagccaatgcaaaggaccaaagtatccacctgaaagttgttgttctgcattcaaggaatttgcttgtccttatgcagaacagatcaacgacttgacgaccgaatgcgcttcaaccatgttcagctacattaatctttacgggaaataccctcctggtctttttgctagtgagtgccgtgaagggacagaagggctcgcttgccctgccttatcgccatcagtatcagcatcggagaatgctaatggtagtcaacagcttatatgtaatccttggatgctggtaattggcgccatcataattggaggtattgttgtattgaacacctggaaat

SEQ ID NO: 1471 - protein, 147 aa, Gossypium hirsutum
  misc_feature: Ceres Clone ID no. 100011399
  misc_feature: Bit score of 310.0 for HMM based on sequences of Figure 16
  misc_feature: Functional Homolog Of SEQ ID NO. 1426
MSTDGVFDSFTSTGRHLLQAKKACPVNFEFLNYTIITSQCKGPKYPPESCCSAFKEFACPYAEQINDLTTECASTMFSYINLYGKYPPGLFASECREGTEGLACPALSPSVSASENANGSQQLICNPWMLVIGAIIIGGIVVLNTWK

SEQ ID NO: 1472 - DNA, 495 bp, Populus balsamifera subsp. trichocarpa
  misc_feature: Ceres Annot ID no. 1480568
  misc_feature: Encodes the peptide sequence at SEQ ID NO. 1473
atggctagtaattttaatccatggttttatctcatttgcttcttcttcctggctggacttgccacctcttcctcgttcatttcctatgatgcacttgatgttcatggaagttccggccgaaccctccttcagatgaaaaaagcatgcaacataagctttgaaaatttggactacagtgtcctcacagacaagtgcaaaggaccccaatacccagccaagccatgttgtgatgctttcaaggaatttgcttgcccttttagtgatgccataaatgacctggaatctgactgcgcttcgaccatgtttagcttcataaacctctatgggaaataccctcctggcttgtttgccaatgaatgcagagaagataagaatggtcttgattgccaaaatgtggaacaatctaaaaagagtggaggggttcaaattgcagctactcaatcctcattgttgatgctcacagcaggactcatagtgttgttacaattgttctag

SEQ ID NO: 1473 - protein, 164 aa, Populus balsamifera subsp. trichocarpa
  misc_feature: Ceres Annot ID no. 1480568
  misc_feature: Bit score of 287.1 for HMM based on sequences of Figure 16
  misc_feature: Functional Homolog Of SEQ ID NO. 1426
MASNFNPWFYLICFFFLAGLATSSSFISYDALDVHGSSGRTLLQMKKACNISFENLDYSVLTDKCKGPQYPAKPCCDAFKEFACPFSDAINDLESDCASTMFSFINLYGKYPPGLFANECREDKNGLDCQNVEQSKKSGGVQIAATQSSLLMLTAGLIVLLQLF

SEQ ID NO: 1474 - DNA, 655 bp, Gossypium hirsutum
  misc_feature: Ceres Clone ID no. 1927778
  misc_feature: Encodes the peptide sequence at SEQ ID NO. 1475
aaaaaaacagagatgagctgttatcaattttcagtgataacaaaaaacacggtttttccttcttccctgtctttctctgtcttctcttactttttatattactctcaattcccattaaaactttcaatctttcagccataattaagcttcttcccttcagaaaacatcgactgaagctgctccaagattaaagaagcttcaatttataatactctgccccttaaactagcaaagcctgatctgctgcataatcgtctaaagaaaaattgatggggataaataagttgctgtgttggtttgcagttttcttctttttgttgggtttctctgcttgcagttcgatttctgatggtgtttttgactctttcacttctactggaaggcacctccttcaagctaagaaagcttgccctgttaactttgagtttctgaactacacaattatcacaagccaatgcaaaggaccaaagtatccacctgaaagttgttgttctgcattcaaggaatttgcttgtccttatgcagaacagatcaacgacttgacgaccgaatgcgcttcaaccatgttcagctacattaatctttacgggaaataccctcctggtctttttgctagtgagtgccgtgaagggaaagaagggctcgcttgccctgc

SEQ ID NO: 1475 - protein, 128 aa, Gossypium hirsutum
  misc_feature: Ceres Clone ID no. 1927778
  misc_feature: Bit score of 283.1 for HMM based on sequences of Figure 16
  misc_feature: Functional Homolog Of SEQ ID NO. 1426
MGINKLLCWFAVFFFLLGFSACSSISDGVFDSFTSTGRHLLQAKKACPVNFEFLNYTIITSQCKGPKYPPESCCSAFKEFACPYAEQINDLTTECASTMFSYINLYGKYPPGLFASECREGKEGLACP

SEQ ID NO: 1476 - DNA, 649 bp, Brassica napus
  misc_feature: Ceres Clone ID no. 1446925
  misc_feature: Encodes the peptide sequence at SEQ ID NO. 1477
aacttaatttttagtctctctctctctctacctaacttggtgtttcgtgatagctgttgtctttatttttatcagttctctttagtcactctgtgtgtaatcaaagagccatggagctcaacttcctctctagagctcttctcgtctctcttctactcgcaatagtttcatctttctcatcctctactgttatctccgatggtgtgctcgaatctcaggatttggttattggaagaaacctacttcaggccaagaaaaaatgttccctgaacttagagtttatgaactacactgtcataacgagccagtgtaaaggtcccaaattcccagtaaaggagtgttgctcttcctttttagagtttgcgtgtccttacgccgaacagctcaacgacctgtccacagattgtgcaagcacgatgttcagttacatcaatatctatgggaaatacccggctggactgttctctagccagtgtaaaggagataaagaaggcctcgagtgccccgatatgcctcccaattcagtagcagacgtaaacacagccaccaccaccaccaccgcttcttctcgtatttggatgaccgtagctttattcgtgactgttttattatttcgaggccgacaaaagcatatgtaatgctgctactt

SEQ ID NO: 1477 - protein, 175 aa, Brassica napus
  misc_feature: Ceres Clone ID no. 1446925
  misc_feature: Bit score of 326.2 for HMM based on sequences of Figure 16
  misc_feature: Functional Homolog Of SEQ ID NO. 1426
MELNFLSRALLVSLLLAIVSSFSSSTVISDGVLESQDLVIGRNLLQAKKKCSLNLEFMNYTVITSQCKGPKFPVKECCSSFLEFACPYAEQLNDLSTDCASTMFSYINIYGKYPAGLFSSQCKGDKEGLECPDMPPNSVADVNTATTTTTASSRIWMTVALFVTVLLFRGRQKHM

SEQ ID NO: 1478 - DNA, 787 bp, Musa acuminata
  misc_feature: Ceres Clone ID no. 1727113
  misc_feature: Encodes the peptide sequence at SEQ ID NO. 1479
ctctctctagattggaggaggctaggagagacgaatcgagatggatttggatccaaagctttccatgatggcacttattttggtggcgtttgctgggttggcgactgcttcaagcttcatatcagatgatgtgctggtgcctcgtggatccggagggcggagcttgctgcagacaccgacgactgtgctcatcttaagaaactttgtagattgccctctgagctttgagttcctgaactacacaatcatcacaagccagtgcaagggtcccctctaccctgtcaacctctgctgtggagctttcaaggaactcgcatgcccatacgccgcagaattgaatgatctgacgagcaactgtgcaacgaacatgttcagctacatcaacctctatgggaagtatcctcctggcctgttttccagtgagtgccgggacgacaagataggacttgtgtgtcctgctagtgcaccgcagtcgcaggaagatgcaagttctggctacatgaatcggcagagcctcatgtccgtcatcttccttgcgtatggagtcgttctgaagtgtctgctttcttgaaggtagaagcagctgacctctgaaagttgcaggatcgcagacgagtttacttggtaaaattgcttggggaaattgggttcttggtgacacaaaatgtattcttgttcttcatcttaacatcggtggagtatccgagattgttgtaactttgtgtttgtccatatgtcatatgtcttcaacttcaagaaattgtgattgatatcatacttgaactct

SEQ ID NO: 1479 - protein, 176 aa, Musa acuminata
  misc_feature: Ceres Clone ID no. 1727113
  misc_feature: Bit score of 303.1 for HMM based on sequences of Figure 16
  misc_feature: Functional Homolog Of SEQ ID NO. 1426
MDLDPKLSMMALILVAFAGLATASSFISDDVLVPRGSGGRSLLQTPTTVLILRNFVDCPLSFEFLNYTIITSQCKGPLYPVNLCCGAFKELACPYAAELNDLTSNCATNMFSYINLYGKYPPGLFSSECRDDKIGLVCPASAPQSQEDASSGYMNRQSLMSVIFLAYGVVLKCLLS

SEQ ID NO: 1480 - DNA, 1562 bp, Panicum virgatum
  misc_feature: Ceres Clone ID no. 1789593
  misc_feature: Encodes the peptide sequence at SEQ ID NO. 1481
atgcctgcatcttgattgatcttcccacctctctcctcctcattgcccccatctctctacagactactcactccatctccattccccgtacacattcctcctccagtcctgactacagctcggtgatgatccgctgagggcgagttcttggcattaatggccgcttggtagccagcgctctccaatcccccttaactcccccacctcttatctccctgcaccttgagctgagctccggctcccctccacattgaccatcacccttcgtcgggtcggttcttgccgcgtccgatcctgatctgcaagcttcgcgtgctgtgatctgagagcgtccggggccatggggaccggggcggtggcggtggtggcgcctgaccgggccaagcagcgccggggcggccacctatggaagaaggcgctgctccacttctcgctctgcttcgtcatgggcttcttcacggggttcgcgccctcctcctcctcgtcctggaaggctgccacccaacacccgccgcaccgggccggggaccacctcgccgcctcccgcgtcgccgtcgacgcgcgcgtcaacctggtgccgtcgccgcccgacacggctggcgaggtggggctcggcggggccggcggcggggcgacggttgacgtgggcgacgacgacgaggaggccggcctgcagcggcttctgattgtggtcaccaccacgcggtcgggcgccggcgagcggcggcggcgcagggccgagctgctgcgcctggcgcacaccctgcggctcgtgcgcccgcccgtcgtgtgggtggtcgtggagccggtcgccgacgcccccgccacggccgaggtgctgcggggtaccggcgtgatgtacaggcacatcgcgttcaagcccgaggagaacttcaccacggccgccgccgaggcgcacgcgcagcggaacgccgcgctcgcccacgtcgagaagcaccgcctcgccggcgtcctccacttcgccgacgccgccggcgtctacgacaccggcttcttcgaccagatccgccagatcgaagcgtttggcacatggcctgtggcaacaatgtcggcaggcgagaagaaagtggtagtggaaggtccactatgcagtgcctcaaaggtcatcggctggttctcaagggacttcaacgatgggactacccgtgcagcgacatataacacagaaactgacttgaatcctgctggtgctgctggtacacgactccacacgatcgacgtctcagggttcgcgttcaacagttctattttgtgggatcctgagcggtggggacggccaacgtcattaccagatacttcacaggattcgatcaagtttgtgcaagaagtggtgctggaagaccgagctaagctgaaggggatcccctccgattgctcccagatcatggtgtggcagtatggcgcgcccagctcccaatagaaggttagtaagatgggtggcattgccggaagggaaaattggcggggatcggagttgatgtaaatgtggcgataacaaaaaggaaaggaagaaggtcgattactaagttttcttgtttcag

SEQ ID NO: 1481 - protein, 366 aa, Panicum virgatum
  misc_feature (138)..(364): Pfam Name: Glyco_transf_43 Pfam Description: Glycosyltransferase family 43
  misc_feature: Ceres Clone ID no. 1789593
  misc_feature: Bit score of 898.3 for HMM based on sequences of Figure 29
  misc_feature: Functional Homolog Of SEQ ID NO. 1481
  misc_feature: in Figure 29
MGTGAVAVVAPDRAKQRRGGHLWKKALLHFSLCFVMGFFTGFAPSSSSSWKAATQHPPHRAGDHLAASRVAVDARVNLVPSPPDTAGEVGLGGAGGGATVDVGDDDEEAGLQRLLIVVTTTRSGAGERRRRRAELLRLAHTLRLVRPPVVWVVVEPVADAPATAEVLRGTGVMYRHIAFKPEENFTTAAAEAHAQRNAALAHVEKHRLAGVLHFADAAGVYDTGFFDQIRQIEAFGTWPVATMSAGEKKVVVEGPLCSASKVIGWFSRDFNDGTTRAATYNTETDLNPAGAAGTRLHTIDVSGFAFNSSILWDPERWGRPTSLPDTSQDSIKFVQEVVLEDRAKLKGIPSDCSQIMVWQYGAPSSQ

SEQ ID NO: 1482 - protein, 365 aa, Zea mays
  misc_feature (137)..(363): Pfam Name: Glyco_transf_43 Pfam Description: Glycosyltransferase family 43
  misc_feature: Public GI ID no. 194701352
  misc_feature: Bit score of 910.4 for HMM based on sequences of Figure 29
  misc_feature: Functional Homolog Of SEQ ID NO. 1481
  misc_feature: in Figure 29
MGTGAVAVAAPDRAKQRRAGGHLWKKALLHFSLCFVMGFFTGFAPSSSSSWKSAAATPQHHPPHRPGDRLAASRVAVDARATLSPPAEAADALSAGATVDLGDDEEDAAQRRLLIVVTTTRSGPGERRRRRGELLRLAHTLRLVRPPVVWVVVEPAADAPATAEVLRGTGVMYRHLAFKPEDNFTTADAEAHVQRNAALAHVEKHRLAGVLHFADAAGVYDVGFFEQIRQIEAFGTWPVATMSAGEKKVVVEGPLCSASKVVGWFSRDFNDGTTRSVTYNTEADLNPAGAAGTRAHTIDVSGFAFNSSILWDPERWGRPTSLPDTSQDSIKFVQEVLLEDRAKLKGIPSDCSQIMVWQYSVPSSR

SEQ ID NO: 1483 - protein, 373 aa, Saccharum officinarum
  misc_feature (145)..(371): Pfam Name: Glyco_transf_43 Pfam Description: Glycosyltransferase family 43
  misc_feature: Public GI ID no. 63087724
  misc_feature: Bit score of 873.1 for HMM based on sequences of Figure 29
  misc_feature: Functional Homolog Of SEQ ID NO. 1481
  misc_feature: in Figure 29
MGTGALAVAAPAPDRANKQRRAGGAHLWKKALLHFSLCFVMGFFTGLAPSSSSSWKAATTHPPHRPGDRLAASRVAVDARATLLPSPPTTAGDALSAAVAAGGGATVDVGDDDEDGAAGQSRLLIVVTTTPAGPGERRRPPVLRLAHTLRLVRPPVVWTVVEPAADAPATAEVLRGTGVMYRHLAFKPEDNFTTADAEAHVQRNAALAHVEKHRLAGVLHFADAAGVYDVGFFDQIRQIEAFGTWPVATMSAGEKKVVVEGPLCSASKVVGWFSRDFNDGTTRSVTYNTEVDLNPAGAAGTRAHTIDVSGFAFNSSILWDPERWGRPTSLPDTSQDSIKFVQEVVLEDRAKLKGIPSDCSQIMVWQYSMPSSQ

SEQ ID NO: 1484 - DNA, 1131 bp, Sorghum bicolor
  misc_feature: Ceres Annot ID no. 8724648
  misc_feature: Encodes the peptide sequence at SEQ ID NO. 1485
atgggcacgggcgcgctcgcggtggcggcggcggcgccggcggaccgggccaacaagcagcgccgggccggcggcggcgcacacctgtggaagaaagcgctgctccacttctccctctgcttcgtcatgggcttcttcaccggcttcgcgccctcctcttcctcctcctggaaggccgccaccaccacccctcacccgccgcaccgtcccggggaccgcctcgccgcctcccgcgtcgccgtcgacgtcaacgcgcgcgccacccttccgccgcccgcgtccgccggcgatgcgctcggtgtcggcggcgccacggtggacgtgggcgacgagtacgaggagggcgacgccaacggccagcgccgacgcctcctgatcgtggtcaccaccacgcggtcgggccccggggagcgccggcggcggcggggcgagctgctgcgcctggcccacacgctccgcctcgtccgcccgcccgtcgtctgggtcgtcgtcgagcccgccgccgacgcgcccgccaccgccgtggtgctccgcggcaccggcgtcatgtacaggcacctcgccttcaagcccgaggaaaatttcaccaccgccgaagccgaggcgcacgcgcagcggaacgccgcgctcgcgcacgtcgagaagcaccggctcgctggcgtcctccacttcgccgacgccgccggtgtctacgacgttgggttcttcgaccagatccgacagatcgaggcgtttgggacatggcctgtggcaacaatgttggctggcgagaagaaagtggtagtagaaggtccgctatgcagtgcctcaaaggtcgtcggttggttctcaagggactttaacgatgggacaacccgttcagtgacgtataacacggaagttgacttgaatcctgctggtgctgctggtacacgagcccacacaattgacgtctcaggtttcgcgttcaacagttcaattttgtgggatcctgagcggtggggacggccaacctcattaccagatacttcacaggactccatcaagtttgtgcaagaagtggtacttgaagaccgagctaagctgaaggggatcccctctgattgctcccagatcatggtgtggcagtatagtgtgcccagctcacaatag

SEQ ID NO: 1485 - protein, 376 aa, Sorghum bicolor
  misc_feature (148)..(374): Pfam Name: Glyco_transf_43 Pfam Description: Glycosyltransferase family 43
  misc_feature: Ceres Annot ID no. 8724648
  misc_feature: Bit score of 886.5 for HMM based on sequences of Figure 29
  misc_feature: Functional Homolog Of SEQ ID NO. 1481
  misc_feature: in Figure 29
MGTGALAVAAAAPADRANKQRRAGGGAHLWKKALLHFSLCFVMGFFTGFAPSSSSSWKAATTTPHPPHRPGDRLAASRVAVDVNARATLPPPASAGDALGVGGATVDVGDEYEEGDANGQRRRLLIVVTTTRSGPGERRRRRGELLRLAHTLRLVRPPVVWVVVEPAADAPATAVVLRGTGVMYRHLAFKPEENFTTAEAEAHAQRNAALAHVEKHRLAGVLHFADAAGVYDVGFFDQIRQIEAFGTWPVATMLAGEKKVVVEGPLCSASKVVGWFSRDFNDGTTRSVTYNTEVDLNPAGAAGTRAHTIDVSGFAFNSSILWDPERWGRPTSLPDTSQDSIKFVQEVVLEDRAKLKGIPSDCSQIMVWQYSVPSSQ

SEQ ID NO: 1486 - protein, 371 aa, Oryza sativa subsp. japonica
  misc_feature (130)..(364): Pfam Name: Glyco_transf_43 Pfam Description: Glycosyltransferase family 43
  misc_feature: Public GI ID no. 115461821
  misc_feature: Bit score of 910.3 for HMM based on sequences of Figure 29
  misc_feature: Functional Homolog Of SEQ ID NO. 1481
  misc_feature: in Figure 29
MGTAAVAAAERPKQRRSSHLWKKALLHFSLCFVMGFFTGFAPSSSSSWRAGSGGGGGVQPRHQLAASHVAVNQQVSLVPDAAAAEAAGVGNGAVVDVGDDEGGEGARRMLIVVTTTRGERRRRRGELLRLAHTLRLVRPPVVWVVVEPAADAAATAEVLRGTGVMYRHLAFRPEENFTTADAEAHAQRNAALAHVEKHRLSGVVHFADAAGVYDAHFFDEIRQIEAFGTWPVATMSAGEKKVVVEGPLCSDSKVVGWFSRDFNDGTTRAVTYNTEADLNPAGAAGTRAHTIDVSGFAFNSSILWDPERWGRPTSLPDTSQDSIKFVQEVVLEDRTKLKGIPSDCSQIMVWQYTMPMQVHAQTSTPKTHNRR

SEQ ID NO: 1487 - DNA, 1074 bp, Populus balsamifera subsp. trichocarpa
  misc_feature: Ceres Annot ID no. 1528801
  misc_feature: Encodes the peptide sequence at SEQ ID NO. 1488
atgggctctgtggaaagatcaaagaggagagttcagttatggaagaaagctatagttcattttggtttgtgttttgttatggggttttttacaggtttcgctccagcaggcaaggcttcaatttttactagtcatgttgctgcatcaaataaatcgcaatccttgccgcaacctgttgaaatgacgttgcaccagcaggcagcaagtacaccacatgctagtaatgtcaacagaagtttgatagctgaaactgcagtaccagctccaccaagctctaaggaatctgaacatgcaacattcttggggaaagaagaaacagaatccaagttagcgccaagacgactggcaataatcgttacgccaacaagcactaaagatccgtatcaaggggtttttttgaggaggttagctaatacgatcaggttggttcctccaccattattgtggattgttgtggaagggcaatcagattcagatgaagtatcggaggtccttaggaaaacaggtattatgtataggcatttggtgttcaaggagaattttacagatcccgaagcagagttggatcatcaaaggaatgttgcattaaggcacattgaaaaacacaggctgagtgggattgttcattttgccgggctttccaatgtttacgatctaggcttctttgacgagattagacaaattgaggtgtttggaacatggccaatggcattactttcagcaaacgagaagaaagtgataattgaaggacctgtatgtgattcctcgcaggttatcggctggcatctaaggaaaatgaacaacgaaacggataaaaggcctccaattcatatttcaagttttggattcaacagctcaatcctctgggatcctgagagatggggtcgcccttcttcagtccagcaaacctcacagaactcaatcaaattcgtcaaacaagtagctcttgaagacgagacaaagttaaagggaatcccaccagaggactgttcaaaaatcatgctttggcgtcttaatcttcctacttcaaaatcaccaagttatcaggaaaatcaagaagacaaaatcgtgtag

SEQ ID NO: 1488 - protein, 357 aa, Populus balsamifera subsp. trichocarpa
  misc_feature (136)..(342): Pfam Name: Glyco_transf_43 Pfam Description: Glycosyltransferase family 43
  misc_feature: Ceres Annot ID no. 1528801
  misc_feature: Bit score of 868.8 for HMM based on sequences of Figure 29
  misc_feature: Functional Homolog Of SEQ ID NO. 1481
  misc_feature: in Figure 29
MGSVERSKRRVQLWKKAIVHFGLCFVMGFFTGFAPAGKASIFTSHVAASNKSQSLPQPVEMTLHQQAASTPHASNVNRSLIAETAVPAPPSSKESEHATFLGKEETESKLAPRRLAIIVTPTSTKDPYQGVFLRRLANTIRLVPPPLLWIVVEGQSDSDEVSEVLRKTGIMYRHLVFKENFTDPEAELDHQRNVALRHIEKHRLSGIVHFAGLSNVYDLGFFDEIRQIEVFGTWPMALLSANEKKVIIEGPVCDSSQVIGWHLRKMNNETDKRPPIHISSFGFNSSILWDPERWGRPSSVQQTSQNSIKFVKQVALEDETKLKGIPPEDCSKIMLWRLNLPTSKSPSYQENQEDKIV

SEQ ID NO: 1489 - protein, 357 aa, Vitis vinifera
  misc_feature (133)..(339): Pfam Name: Glyco_transf_43 Pfam Description: Glycosyltransferase family 43
  misc_feature: Public GI ID no. 225439900
  misc_feature: Bit score of 874.1 for HMM based on sequences of Figure 29
  misc_feature: Functional Homolog Of SEQ ID NO. 1481
  misc_feature: in Figure 29
MGSSERSKKRVQLWKKAVVQFSLCFVMGFFMGFAPAGKASFFSSNAAALNQSQFSPQPVEMLHLSMTPNDGNGNRTLMAETPVEVPARSREVETAESLQEGEDEPKLVPGRLLIIVTPAGSEDPSRGVLLRRLAYTLRLVPPPLLWIVVEAQTDSSEVSEILRKTGIMYRHLVSKENFTEPAAEMDHQRNLALSHIEHHKLSGIVHFAALSNVYDLRFFDEIRDIEVFGTWPMASLSANRNKVIMEGPVCDSSQVIGWHLKKMNNETETRSPLHISGFSFNSSILWDPERWGRPSSVQDNSQNSIKFVKEVALEDESKLKGIPQEDCSRILLWNLHIPVGTIPRYHQRLTPLDDSRR

SEQ ID NO: 1490 - protein, 368 aa, Gossypium hirsutum
  misc_feature (136)..(348): Pfam Name: Glyco_transf_43 Pfam Description: Glycosyltransferase family 43
  misc_feature: Public GI ID no. 33771692
  misc_feature: Bit score of 878.0 for HMM based on sequences of Figure 29
  misc_feature: Functional Homolog Of SEQ ID NO. 1481
  misc_feature: in Figure 29
MGSAERTKKEVQLWKKAIVHFSLCFVMGFFTGFAPTGKDSIFSSPAVATHNKSHISQPPVNQSVTPAVHSSNVNQSLRAETPVPVPVPAKSNELESPKQVDGTVVHEVKLPSRRLVIVVTPTSTKDQFQGVFLRRLANTIRLVPQPLLWIVVEGQSDSNELSEILRKTGIMYRHLVFKENFTDPEAELNHQRNVALKHVEQHKLSGIVHFAGLTNVYDLDFFKELRQIEVFGTWPMALLSANERRVVIEGPVCDSSQVIGWHLRKMNNQTDAETDADTKPPIHISSFAFNSSILWDPERWGRLTSVQGTSQNSLKFVKQIVMEDEGKLKGIPPEECSKIMLWRLHFPIGVVPRNLVKTSSLFDVITQL

SEQ ID NO: 1491 - DNA, 1281 bp, Glycine max
  misc_feature: Ceres Clone ID no. 547127
  misc_feature: Encodes the peptide sequence at SEQ ID NO. 1492
gagcatctatacattaaatactcaaattctgtggtaggtagtgatagtagatgggatcagtggaaagatcaagaaagaaagtcatgtcatggaagaaagccatggtgcatttttctctctgttttgtgatggggttcttcacaggctttgctcctacaggtaaatctatatttcacagccatgttgattattcaaataggtcagagtttgcaccacaacctattgaagtgtcacagaagacaacaaatgtcaatagaagttggatagctccaacaccaaggtctttagtccacaagcaaaaattgcatgtaaaaatagggccccagttgaagcctagaagacttataatcattgtaactccaacaagcacaaaacttcccttccaaacagtgattttggcaaggctggcaaacactataaagctggttcctcaacccttgctgtggattgttgtggaagggcaaactgattccacagaactttctaagacacttaggaagactggcatcatgtataggcatttggtttcaaaggaaaacttcacggacttggaagctgaactgaatcaccagagaaatcttgcactcaagcacattgtgcatcacaggctaagtgggatcgtacactttgctgaactttccaatgtttatgatctcgaattcttccaacaactaagatatattgaggtatttggaacatggccaacggcatcgttagcagcaaacaggaagaaagtgatgatagaaggacctgtgtgtgattcttcaaaagtcatagggtggcatttaaggaatatgaacaatgaaactgatataattactcctccgattcatatttcaagttttgcattcaatagctccattctctgggaccctgagagatggggtcgcacttcctctcttcaagacacctctcagaattcaatcaaattcgtgaaggaagtagttcttgaggatcaagaaaagttgaggggaattcctccagaggattgctccagaatcttgctttggcgtttcaattttcatgctcgcaccacttcaaatcataaatttccgactactgcatctggtgttatccgaaaataatgggaaataaacagaaaataatgtatagcaaaatattcaacttccctacaccaggaatttattcattattttttacttgtacaaatttctcctgtgtgcttataattttatacgtccctgctattttcacaagtttttttagcttctataagtgtaactgtgtaagttctgatgggaagcaaaaacattttatcat

SEQ ID NO: 1492 - protein, 344 aa, Glycine max
  misc_feature (119)..(326): Pfam Name: Glyco_transf_43 Pfam Description: Glycosyltransferase family 43
  misc_feature: Ceres Clone ID no. 547127
  misc_feature: Bit score of 824.3 for HMM based on sequences of Figure 29
  misc_feature: Functional Homolog Of SEQ ID NO. 1481
  misc_feature: in Figure 29
MGSVERSRKKVMSWKKAMVHFSLCFVMGFFTGFAPTGKSIFHSHVDYSNRSEFAPQPIEVSQKTTNVNRSWIAPTPRSLVHKQKLHVKIGPQLKPRRLIIIVTPTSTKLPFQTVILARLANTIKLVPQPLLWIVVEGQTDSTELSKTLRKTGIMYRHLVSKENFTDLEAELNHQRNLALKHIVHHRLSGIVHFAELSNVYDLEFFQQLRYIEVFGTWPTASLAANRKKVMIEGPVCDSSKVIGWHLRNMNNETDIITPPIHISSFAFNSSILWDPERWGRTSSLQDTSQNSIKFVKEVVLEDQEKLRGIPPEDCSRILLWRFNFHARTTSNHKFPTTASGVIRK

SEQ ID NO: 1493 - protein, 369 aa, Zea mays
  misc_feature (137)..(365): Pfam Name: Glyco_transf_43 Pfam Description: Glycosyltransferase family 43
  misc_feature: Public GI ID no. 162459701
  misc_feature: Bit score of 797.2 for HMM based on sequences of Figure 29
  misc_feature: Functional Homolog Of SEQ ID NO. 1481
MGTGAVAVAAPDRAKQRRAGGHLWKKALLHFSLCFVMGFFTGFAPSSSSSWKSAAATPQHHPPHRPGDRLAASRVAVDARATLSPPAEAADALSAGATVDVGDDDDDAAQRRLLIVVTTTRSAPGDRRRRRGELLRLAHTLRLVRPPVVWTVVEPAADAPATAEVLRGTGVMYRHLAFKPEDNFTTADAEAHVQRNAALAHVEKHRLAGVLHFADAAGVYDTHFFEEIRQIEAFGAWPVATVSAGEKKVTVEGPLCSASEVVGWFSRDLDDDGTTRSVAYDRREADLDPAAAGTRARTTTIGVSGFAFNSSILWDPERWGRPASSLPDTSQDSIKFVQEVVLEDRAKLRGIPSGCSQVMVWQYSDMPSS

SEQ ID NO: 1494 - DNA, 1104 bp, Sorghum bicolor
  misc_feature: Ceres Annot ID no. 8641721
  misc_feature: Encodes the peptide sequence at SEQ ID NO. 1495
atggggtcgtccacggatcacggcggcgccggtgggcggggcaagaagcaggccggagggtcgcagctgtggaagaaggcgctgctgcattcctcgctctgcttcgtcatgggcttcttcaccggcttcgcgccgtcgtccgtgtccgactggacgtccgcggcggtggcggcgggacgggtgggcagcagccacgtggtccgtgcgctgccgacggcggcggcggctggcggcagcggggccgtgaaccggagcctgctggcgcacggcgcggcggggggcctgctgggcctgggcgacccggcgtccccgcggccgctgctggtggtggtcacgacgacggagtcgacgcccgcggcgtccggcgagcgcgccgccgcgctgacgcggatggcgcacacgctgcggctggtgggtcccccgctgctgtgggtggtggtggaggccgccccggaggttccggccacggcgcggctgctgcgcgccacgggcctcatgtaccgccacctgacatataaggacaacttcaccgccgccgacgccgccgcgggtaaggagcggcaccaccagcggaacgtggcgctcggacacatcgagcaccaccgcctcgccggcgtcgtcctcttcgcgggcctcggcgacgtcttcgacctcggcttcttcgaccagctcagggaaatcagcgcgttcggtgcgtggccggtggcgacgatgtggcgcgacgagcggaaggtcgtggtccggggccccgcgtgcagcgcgtccgcggtcactggctggttctcccaggacttcagcagcaacgttaacggcaccgcgccggcctccgcctccacggcgaggcccagcgaggtggacgtccacggcttcgccttcaacagctccgtgctctgggaccccgagcgctggggccgctacccgacctccgagcccgacaagtcccaggactccatgaaattcgtccagcaagtggttcttgaagatcttagcaaggtgaagggcattccttccgattgttcagaggtcatggtatggcacgtcgatacgactgcgccttcttcttcctcgtcgtcgcaaccatctatgcacaacaagagaagatag

SEQ ID NO: 1495 - protein, 367 aa, Sorghum bicolor
  misc_feature (131)..(351): Pfam Name: Glyco_transf_43 Pfam Description: Glycosyltransferase family 43
  misc_feature: Ceres Annot ID no. 8641721
  misc_feature: Bit score of 510.0 for HMM based on sequences of Figure 29
  misc_feature: Functional Homolog Of SEQ ID NO. 1481
MGSSTDHGGAGGRGKKQAGGSQLWKKALLHSSLCFVMGFFTGFAPSSVSDWTSAAVAAGRVGSSHVVRALPTAAAAGGSGAVNRSLLAHGAAGGLLGLGDPASPRPLLVVVTTTESTPAASGERAAALTRMAHTLRLVGPPLLWVVVEAAPEVPATARLLRATGLMYRHLTYKDNFTAADAAAGKERHHQRNVALGHIEHHRLAGVVLFAGLGDVFDLGFFDQLREISAFGAWPVATMWRDERKVVVRGPACSASAVTGWFSQDFSSNVNGTAPASASTARPSEVDVHGFAFNSSVLWDPERWGRYPTSEPDKSQDSMKFVQQVVLEDLSKVKGIPSDCSEVMVWHVDTTAPSSSSSSQPSMHNKRR

SEQ ID NO: 1496 - DNA, 1654 bp, Panicum virgatum
  misc_feature: Ceres Clone ID no. 1788804
  misc_feature: Encodes the peptide sequence at SEQ ID NO. 1497
aaatttgctttgcctccccaccaccaccgcttcgctgctgcggtccgtctatagctgataagctagctagttaggccgcgcttaattgggtgacagccagccgcggcgcggaagagcgagggaagcgatcgacacgaggccggcggctctagctcgggggtcgaggagagctagctgggcagcaggtgcagcggtggttttggtttaggtttctcctatcgatggggtcgtcggcggaccacggcggcgccggcgggaggggcaagaagcaggggtcgcagctgtggaagaaggcgctgctgcattcttgcctctgcttcgtcatgggcttcttcaccggcttcgcgccgtcgtccgtctccgactggacgtccgcggcggtctcggcgggcggggtgagcagcagccacgtcgtccgggcgctgcagacggccgcgggcggggccgtcaaccggagcctgctggcgcacggcggcagcgtcggcggcgcgggcctgctcgacgcggcgaccccgcggccgctgctggtggtcgtcacgacgacggagtcggcgcccgccgcgtccggggagcgcgccgcggcgctgacgcggatggcgcacacgctgcggctggcgccgccgccgctgctgtgggtggtggtggaggccgccccggacgtgccggccacggcgcggctgctgcgcgccacggggctcatgtaccggcacctgacgtacaaggacaacttcacggccgccgacgccgccgcgggcaaggagcggcaccaccagcggaacgtcgcgctcggccacatcgagcaccaccgcctcgccggcgtcgtcctcttcgccggcctcggcgacgtcttcgacctccggttcttcgaccagctccgccagatcagcgcgttcggcgcgtggccggtggcgacgatggcgcgaggcgagcggaaggtcgtggtccggggccccgcgtgcagcgcgtccgcggtcgccggctggttctcccgggactacggcgccaacggcacggcggcggccacgacggcgaggccccccgaggtggacgcccacggcttcgccttcaacagctccgtgctctgggaccccgagcgctggggccgctacccgacctccgagcccgacaagtcccaggactcgatgaagttcgtccagcaagtggttctggaagattttagcaaggtgaagggcattccttccgattgttcagaggtcatggtatggcatgtcgattcgacggccccttcttcctcttcttagcagccatctctggagaacaagagaagatagaaagggtgattatagaagaggtcaatggacgagctggaggacggcctcagagtggtgtacattgtacatgcatagctacaccatcgaggcgctggttgccttcaagctgcaaagaagggaaattttgggtttctcaccaggggatggatcaacccctgaccccagttctccatcatattgtacaattttccactattctttttcttaaaaatttgtgatatatgtatatttttttctttttttcaagagggtttaggtgaatacatacataatacccccttgatgtgtctctcaaggctgtaatgaaatagagggcaagctaaaaatccacttaacaatgatgatacacattgtgctctttt

SEQ ID NO: 1497 - protein, 346 aa, Panicum virgatum
  misc_feature (125)..(339): Pfam Name: Glyco_transf_43 Pfam Description: Glycosyltransferase family 43
  misc_feature: Ceres Clone ID no. 1788804
  misc_feature: Bit score of 493.8 for HMM based on sequences of Figure 29
  misc_feature: Functional Homolog Of SEQ ID NO. 1481
MGSSADHGGAGGRGKKQGSQLWKKALLHSCLCFVMGFFTGFAPSSVSDWTSAAVSAGGVSSSHVVRALQTAAGGAVNRSLLAHGGSVGGAGLLDAATPRPLLVVVTTTESAPAASGERAAALTRMAHTLRLAPPPLLWVVVEAAPDVPATARLLRATGLMYRHLTYKDNFTAADAAAGKERHHQRNVALGHIEHHRLAGVVLFAGLGDVFDLRFFDQLRQISAFGAWPVATMARGERKVVVRGPACSASAVAGWFSRDYGANGTAAATTARPPEVDAHGFAFNSSVLWDPERWGRYPTSEPDKSQDSMKFVQQVVLEDFSKVKGIPSDCSEVMVWHVDSTAPSSSS

SEQ ID NO: 1498 - protein, 357 aa, Oryza sativa subsp. japonica
  misc_feature (121)..(345): Pfam Name: Glyco_transf_43 Pfam Description: Glycosyltransferase family 43
  misc_feature: Public GI ID no. 115452359
  misc_feature: Bit score of 509.8 for HMM based on sequences of Figure 29
  misc_feature: Functional Homolog Of SEQ ID NO. 1481
MGSSTDHGGAGGRGKKGSGSQLWKKALLHSSLCFVMGFFTGFAPSSVSDWTSAAVSAGGVGSSHVVRSLHATGGAAVNRSLLAQAAAGAVDAGPQPLLVVVTTTESTPSAAGQRAAALTRMAHTLRLVPPPLLWVVVEANPDVAATARLLRTTGLMYRHLTYKDNFTVADAAAGKERHHQRNVALGHIEHHRLAGVVLFAGLGDTFDLRFFDQLRQIRTFGAWPVATMSQNERKVVVQGPACSSSSVAGWFSMDLSNATSPVAVGGAGYGAAAARPRELDVHGFAFNSSVLWDPERWGRYPTSEPDKSQDSVKFVQQVVLEDYSKVRGIPSDCSEVMVWHVNTTPLPSSQPSPQNKR

SEQ ID NO: 1499 - DNA, 1746 bp, Panicum virgatum
  misc_feature: Ceres Clone ID no. 1819717
  misc_feature: Encodes the peptide sequence at SEQ ID NO. 1500
ctcgcgccgcttctccagttctcctactcctacctcccctcccaatcctgctcgctcgccacctcccgccctttttaaaccaccacccgctgccaaatttgctttgcctccccaccaccaccgcttcgctgctgcggttctatagctgataaagctagctagttaggccgcgcttaattggcaggcaggcaggcagccgcgcgtctcggaggagggagggaagcgatcgacacgaggccggcggctctagctcggcgggtcggctagctgggcagcaggtgctgcggtggttctggtttaggttcctcggatcgatggggtcgtcggcggaccacggcggcgccggcgggaggggcaagaagcaggggtcgcagctctggaagaaggcgctgctgcattcctgcctctgcttcgtcatgggcttcttcaccggcttcgcgccgtcgtcggtgtccgactggacgtccgcggcggtctcggcgggcggggtgggcagcagccacgtcgtccgggcgctgcagacggccgcgggcggcgccgtcaaccggagcctcctggcgcacggcggcgcgggcctgctcgacgccgcggcggcgaccccgcggccgctgctggtggtcgtcacgacgacggagtcggcgcccgcggcgtccggggagcgcgccgcggcgctgacgcggatggcgcacacgctgcgggtggcggcgccgccgctgctgtgggtggtggtggaggccgccccggacgtgccggccacggcgcggctgctgcgcgccacggggctcatgtaccggcacctgacgtacaaggacaacttcacggccgccgacgccgccgcgggcaaggagcggcaccaccagcggaacgtcgcgctcggccacatcgagcaccaccgcctcgccggcgtcgtcctcttcgccggcctcggcgacgtcttcgacctccgattcttcgaccagctccgccagatcagcgcgttcggcgcgtggccggtggcgacgatggcgcggggcgagcggaaggtcgtggtccggggccccgcgtgcagcgcggccgcggtcaccggctggttctcccgggacttcggcggcaacggcacggcggccgccacgacggcgaggccccccgaggtggacgcccacggcttcgccttcaacagctccgtgctctgggaccccgagcgctggggccgctacccgacctccgagcccgacaagtcccaggactcgatgaagttcgtccagcaagtggttctggaagattttagcaaggtaaagggcattccttccgattgttcagaggtcatggtatggcatgtcgattcgacggccccttcttcctcttcttagcaaccatctctggagaacaacaggagatagaaagggtgattatagaagaggtcaatgaacgagccggagggcggccccagagtggtgtacattgtacatgcatagctacaccatcgaggcgctggttgccttcatgctgcaaagaagggaaattttgggtttctcaccaggggatggatcaacctctgacccccagttctccatcatattgtacaattttccactattcttttttcttaaaaaaattgtgatatatgtataatttcttcttttctcttttttttcaagagggtctaggaatacatacataatacccccttgatgtgtctctcaaggctgtaatgaaatagaaggcaagctaaaaatccacttaacaatgatgatagacattgtactc

SEQ ID NO: 1500 - protein, 344 aa, Panicum virgatum
  misc_feature (123)..(337): Pfam Name: Glyco_transf_43 Pfam Description: Glycosyltransferase family 43
  misc_feature: Ceres Clone ID no. 1819717
  misc_feature: Bit score of 480 for HMM based on sequences of Figure 29
  misc_feature: Functional Homolog Of SEQ ID NO. 1481
MGSSADHGGAGGRGKKQGSQLWKKALLHSCLCFVMGFFTGFAPSSVSDWTSAAVSAGGVGSSHVVRALQTAAGGAVNRSLLAHGGAGLLDAAAATPRPLLVVVTTTESAPAASGERAAALTRMAHTLRVAAPPLLWVVVEAAPDVPATARLLRATGLMYRHLTYKDNFTAADAAAGKERHHQRNVALGHIEHHRLAGVVLFAGLGDVFDLRFFDQLRQISAFGAWPVATMARGERKVVVRGPACSAAAVTGWFSRDFGGNGTAAATTARPPEVDAHGFAFNSSVLWDPERWGRYPTSEPDKSQDSMKFVQQVVLEDFSKVKGIPSDCSEVMVWHVDSTAPSSSS

SEQ ID NO: 1501 - DNA, 1768 bp, Zea mays
  misc_feature: Ceres Clone ID no. 1558521
  misc_feature: Encodes the peptide sequence at SEQ ID NO. 1502
ccggctcccctcgctggctctcctccgcagctccgctcccctgctcgccacctcccgcccattttaaaccaccaccactaccaaactttgcttgcctccccagtccccaccaccgcttggctgccgcttgctgctgcggtcgtctagctaagctagcttacatagccagcttcgacacgtcgcgacgcagattaagcggcacgaggccagcctccgggagctggtggtggagctaggcaggcggcgttgtgcttgctggcttctgtgatggggtcgtccacggatcacgccgccggtgcccgtggcaagaagcaggggtcgcagctgtggaagaaggcgctgctgcattcctccctctgcttcgtgatgggcttcttcaccggcttcgcgccgtcgtccgtgtccgactggacgtccgcggcggcggcggcggggggccgggtgggcagcagccacgtggtccgggcgctgccggcgggcggcgccggggccgtgaaccggagcctgctggcgcacgacgcggggggcggcggcctgccgcgcgacccggcgtccccgcgcccgctcctggtggtcgtcacgacgacggagtcgacgcccgcggcgaccggcgagcgcgccgccgcgctgacgcgggcggcgcacgcgctgcgtctggtggcgccgccgctgctgtgggtggtggtggaggccgccccggacgcgccggccacggcgcggctgctgcgcgccacggggctcatgtaccgccacctgacctacaaggacaacttcacctccgccgacgccgccgcgggcagggagcggcaccaccagcgcaacgtggcgctcggacacatcgagcaccaccgcctcgccggcgtcgtcctcttcgcgggcctcggcgacgtgttcgacctccgcttcttcgacgagctcaggggaatcagcgcgttcggcgcgtggccggtggcgacgatgcggcgcggcgagaggaaggtggtcgtccggggccccgcgtgcagctcggccgcggtcaccggctggttctcccaggacttgggcggcagcggcaccgcggccgcctccgcatccacggcgaggcctggtgagctggacgtccacggcttcgccttcaacagctccgtgctctgggaccccgagcgctggggccgctacccaacctccgagcccgacaagtcccaggactccatgaagttcgtccagcaagtggtcctggaagattttagcaaggtgaagggcatcccttccgactgctcagaggtcatggtatggcacgtcgatacggctgcgccgtctttgcagaacaagaagagaagatagagagctcaactctagaacagaacggggacgagctggatggaggacggctgagtgtgttcgttgtacatgcatgtctacgccgtcaagaatcaagatgctggttgccccctgctcggtacctgcaaagaaggaaaatttttgagtttctcaccggaggatggatcagcctctgaacaccacccccccccccccttctccatcatgatgtacaattttccactgttcttttctttttttttctaaaagaagttgtgatatatgtatatttttttcttttctagagggtttaggtgaatacatacataatacccccttgaagtgcctctcaacaaggatgtaatggaaagaaaggcaagctaaagaccagcttaacaatgatggtacacatgagaatgttctcttctgttcagaagttatttccaatacaagatatccagttcgtagc

SEQ ID NO: 1502 - protein, 351 aa, Zea mays
  misc_feature (124)..(342): Pfam Name: Glyco_transf_43 Pfam Description: Glycosyltransferase family 43
  misc_feature: Ceres Clone ID no. 1558521
  misc_feature: Bit score of 490.6 for HMM based on sequences of Figure 29
  misc_feature: Functional Homolog Of SEQ ID NO. 1481
MGSSTDHAAGARGKKQGSQLWKKALLHSSLCFVMGFFTGFAPSSVSDWTSAAAAAGGRVGSSHVVRALPAGGAGAVNRSLLAHDAGGGGLPRDPASPRPLLVVVTTTESTPAATGERAAALTRAAHALRLVAPPLLWVVVEAAPDAPATARLLRATGLMYRHLTYKDNFTSADAAAGRERHHQRNVALGHIEHHRLAGVVLFAGLGDVFDLRFFDELRGISAFGAWPVATMRRGERKVVVRGPACSSAAVTGWFSQDLGGSGTAAASASTARPGELDVHGFAFNSSVLWDPERWGRYPTSEPDKSQDSMKFVQQVVLEDFSKVKGIPSDCSEVMVWHVDTAAPSLQNKKRR

SEQ ID NO: 1503 - protein, 415 aa, Oryza sativa subsp. japonica
  misc_feature (121)..(344): Pfam Name: Glyco_transf_43 Pfam Description: Glycosyltransferase family 43
  misc_feature: Public GI ID no. 108707574
  misc_feature: Bit score of 495.1 for HMM based on sequences of Figure 29
  misc_feature: Functional Homolog Of SEQ ID NO. 1481
MGSSTDHGGAGGRGKKGSGSQLWKKALLHSSLCFVMGFFTGFAPSSVSDWTSAAVSAGGVGSSHVVRSLHATGGAAVNRSLLAQAAAGAVDAGPQPLLVVVTTTESTPSAAGQRAAALTRMAHTLRLVPPPLLWVVVEANPDVAATARLLRTTGLMYRHLTYKDNFTVADAAAGKERHHQRNVALGHIEHHRLAGVVLFAGLGDTFDLRFFDQLRQIRTFGAWPVATMSQNERKVVVQGPACSSSSVAGWFSMDLSNATSPVAVGGAGYGAAAARPRELDVHGFAFNSSVLWDPERWGRYPTSEPDKSQDSVKFVQQVVLEDYSKVRGIPSDCSEVMAKLRTVSQQLEATWRSALAIINELLRACASVHGHVRSKLDSLYRSDFPQTEPETLICLIHDHASHYIYGGRFLSGDFC

SEQ ID NO: 1504 - DNA, 1438 bp, Triticum aestivum
  misc_feature: Ceres Clone ID no. 575502
  misc_feature: Encodes the peptide sequence at SEQ ID NO. 1505
actgtcgccgctgcctaaccaggctacaatcagacagtttctggctacgacacggcacgacgcgacgcgaggctctcgagagcgcgagcgagatcgtcgtctgctgcggctagggaggtgtcgtcggtggtggtctgcctcatgggctccgccatggaccacgtcggcgcggcgggcgggagggccaagaaggcgtccggcggctcgcagctgtggaagaaggcgctgctgcattccagcctctgcttcgtcatgggcttcttcacgggcttcgccccctcctccgtctccgactggcggtccgtcgcgcccgccggggtggggagcagccacgtggtgaagacgccgcaagtgatcgcgtcgggcgcggccatggaccggagcctgctggcgcgggacgcggccgcgagaatcgggggcgtcccgcggcctctcctggtggtcgtgacgacgaccgagtcgacgcctacggcggccggcgagcgggcggcgatgctgaccaggatggcgcacaccctgcggctcgtgccgccgccgctgctgtgggtggtggtggaggccgcccccgacgtgccggcgacggcgaagctgctgcgcgacacggggatcctgtaccgccacctgacctacaaggagaacttcacggccgccgaggtcgccgcgggcaaggagcgccaccaccagcgcaacaccgcgctggagcacatcgagcggcaccgcctcgccgccatcgtccacttcgccggcctcggcgacgtctacgagctgcgctttttcgaccagctccggcagatcagtacattcggtgcgtggccggtggcgaggatgtcgcggaacgagcggaaggtggtcatccagggccctgcgtgcagctcctccaaggtcctcggctggttctccagggacctgatgagcaacggcaccgccggcacgggcggcggcacggcggcgacctcgcctgagattgacgtccacggcttcgccttcaacagctccgtgctctgggaccccgagcgctggggccgctacccgacctccgagcccgacaagtcccaggactcgatgaggtttgtgcagcaagtggtgtcggaggattatagcaaggtgaagggcattcctccagattgcctggagatcatggtgtggggcgtcgacacgccgccgccgccggccccgtcttcctcgcaacaaactccggggaataagaggaggtagatgggagagttgtagaagagatcgtcggatccaagagccgaacaagctgctgcctatactgtacatgcaagggtcgcaccagtaaggtgttgatgctcctactagctgcaaacataagaacttttttggttttcgttataggggacggatcggcaagtatcctcccgggcttgtacatcgtacttaccttttcttttctcttcaacaaactgtgatatatgcc

SEQ ID NO: 1505 - protein, 357 aa, Triticum aestivum
  misc_feature (122)..(341): Pfam Name: Glyco_transf_43 Pfam Description: Glycosyltransferase family 43
  misc_feature: Ceres Clone ID no. 575502
  misc_feature: Bit score of 504.6 for HMM based on sequences of Figure 29
  misc_feature: Functional Homolog Of SEQ ID NO. 1481
MGSAMDHVGAAGGRAKKASGGSQLWKKALLHSSLCFVMGFFTGFAPSSVSDWRSVAPAGVGSSHVVKTPQVIASGAAMDRSLLARDAAARIGGVPRPLLVVVTTTESTPTAAGERAAMLTRMAHTLRLVPPPLLWVVVEAAPDVPATAKLLRDTGILYRHLTYKENFTAAEVAAGKERHHQRNTALEHIERHRLAAIVHFAGLGDVYELRFFDQLRQISTFGAWPVARMSRNERKVVIQGPACSSSKVLGWFSRDLMSNGTAGTGGGTAATSPEIDVHGFAFNSSVLWDPERWGRYPTSEPDKSQDSMRFVQQVVSEDYSKVKGIPPDCLEIMVWGVDTPPPPAPSSSQQTPGNKRR

SEQ ID NO: 1506 - protein, 354 aa, Triticum aestivum
  misc_feature (122)..(341): Pfam Name: Glyco_transf_43 Pfam Description: Glycosyltransferase family 43
  misc_feature: Public GI ID no. 150246871
  misc_feature: Bit score of 492.3 for HMM based on sequences of Figure 29
  misc_feature: Functional Homolog Of SEQ ID NO. 1481
MGSAMDHVGAAGGRAKKASGGSQLWKKALLHSSLCFVMGFFTGFAPSSVSDWRSVAPAGVGSSHMAKTPQVIASGAAMDRSLLARDAAARIGGVPRPLLVVVTTTESTPTAAGERPAMLTRMAHTLRLVPPPLLWLVVEAAPDVPATAKLLRDTGILYRHLTYKENFTAAEVAAGKERHHQRNTALEHIERHRLAAIVHFAGLGDVYELRFFDQLRQISTFGAWPVARMSRNERKVVIQGPACSSSKVLGWFSRDLMSNGTAGTGGGTAATSPEIDVHGFAFNSSVLWDPERWGRYPTSEPDKSQDSMRFVQQVVSEDYSKVKGIPQDCLEIMVWGVDTTPTPAPIFLATNSGE

SEQ ID NO: 1507 - protein, 356 aa, Populus tremula x Populus tremuloides
  misc_feature (135)..(341): Pfam Name: Glyco_transf_43 Pfam Description: Glycosyltransferase family 43
  misc_feature: Public GI ID no. 60657596
  misc_feature: Bit score of 864.6 for HMM based on sequences of Figure 29
  misc_feature: Functional Homolog Of SEQ ID NO. 1481
MGSVERSKRRVQLWKKAIVHFGLCFVMGFFTGFAPAGKASIFTSHVAASNKSQSLPQPVEMLHQQAASAPHASNVNRSLIAETAVPAPPSSKESDHATFLEKEETESKLAPRRLAIIVTPTSTKDPYQGVFLRRLANTIRLVPPPLLWIVVEGQSDSDEVSEVLRKTGIMYRHLVFKENFTDPEAELDHQRNVALRHIEKHRLSGIVHFAGLSNVYDLGFFDEIRQIEVFGTWPMALLSANEKKVIIEGPVCDSSQVIGWHLRKMNNETDKRPPIHISSFGFNSSILWDPERWGRPSSVQQTSQNSIKFVKQVALEDETKLKGIPPEDCSKIMLWRLNLPTSKSPSYQENQEDKIV

SEQ ID NO: 1508 - protein, 356 aa, Populus x canescens
  misc_feature (135)..(341): Pfam Name: Glyco_transf_43 Pfam Description: Glycosyltransferase family 43
  misc_feature: Public GI ID no. 145408198
  misc_feature: Bit score of 859.5 for HMM based on sequences of Figure 29
  misc_feature: Functional Homolog Of SEQ ID NO. 1481
MGSVERSKRRVQLWKKAIVHFGLCFVMGFFTGFAPAGKASIFTSHVAASNKSQSLPQPVEMLHQQAASAPHASNVNRSLIAETAVPAPPSSKESDHATFLEKEETESKLAPRRLAIIVTPTSTKDPYQGVFLRRLANTIRLVPPPLLWIVVEGQSDSDEVSEVLRKTGIMYRHLVFKENFTDPEAELDHQRNVALRHIEKHRLSGIVHFAGLSNVYDLGFFDEIRQIEVFGTWPMALLSANEKKVISEGPVCDSSQVIGWHLRKMNNETDKRPPIHISSFGFNSSILWDPERWGRPSSVQQTSQNSIKFVKQVALEDETKLKGIPPEDCSKIMLWRLNLPTSKSPSYQENQEDKIV

SEQ ID NO: 1509 - protein, 363 aa, Populus balsamifera
  misc_feature (136)..(342): Pfam Name: Glyco_transf_43 Pfam Description: Glycosyltransferase family 43
  misc_feature: Public GI ID no. 63087726
  misc_feature: Bit score of 844.2 for HMM based on sequences of Figure 29
  misc_feature: Functional Homolog Of SEQ ID NO. 1481
MGSVERSKRRVQLWKKAIVHFGLCFVMGFFTGFAPAGKASIFTSHVAASNKSQSLPQPVEMTLHQQAASTPHASNVNRSLIAETAVPAPPSSKESEHATFLGKEETESKLAPRRLAIIVTPISTEDPYQGVFLRRLANTIRLVPPPLLWIVVEGQSDSDEVSEILRKTGIMYRHLVIKENFTDPEAELDHQRNVALRHIEQHRLSGIVHFAGLSNVYDLGFFDELRQIEVFGTWPVALLSANKNKVTIEGPVCDSSQVIGWHLKKMNNETDKRPPIHISSFGFNSSILWDPERWGRPSSVQQTSQNSIKFVKQAALEDETELKGIPPEDCSKIMLWRLNLPVSKSPSYHLSTTGSTDASRRKI

SEQ ID NO: 1510 - DNA, 1080 bp, Populus balsamifera subsp. trichocarpa
  misc_feature: Ceres Annot ID no. 1538289
  misc_feature: Encodes the peptide sequence at SEQ ID NO. 1511
atggggtctttggaaagatcaaagaagaaagttcaattatggaagaaagctatagttcattttggtttatgttttgttatgggcttttttacaggtttcgctccagggggcaaggcttcaattttttctagtcatgttgttgcatcaaataaatcgcaacctgttgaaatgttgcaccagcaggtagcaagtacaccacatgctagtaatgttaacagaagtttgatagctgaaagtcctgtgccaactccattaagctccaaggaatctgaacctgcaaaattcttggaaaaagaagaagaaccaaaacccaagttactaccaagaagactggcaattatcgttacgccaattagcactgaagatccgtaccaaggggtgtttttgaggaggttagctaatacaatcaggctggttccgccaccattattgtggattgttgtggaagggcaatcagattcagatgaagtatcggagatacttagaaaaacaggcatcatgtataggcatttggtcatcaaggagaattttacagatcctgaagcagagctggatcatcaaaggaatgttgctttaaggcacattgagcaacacaggctgagtggaattgttcattttgccgggctttccaatgtttatgatcttggcttctttgacgagcttaggcaaattgaggtgtttgggacatggccagtggctctactttcagcaaacaaaaacaaagtgacaattgaaggacccgtatgtgattcctcgcaggtcattgggtggcatctgaagaaaatgaacaatgaaacggataaaaggcctccaatccatatttcaagttttggattcaacagttcgatcctttgggatcctgagagatggggtcgcccttcatcagtccaacaaacctcacagaattcaatcaaatttgtcaaacaagcagctcttgaagatgaaacagagttgaagggaatcccaccagaggactgctcaaaaatcatgctttggcgtcttaatcttcccgtttcaaaatcaccaagctaccatctttcaaccaccggatccacggatgctagcaggagaaaaatatga

SEQ ID NO: 1511 - protein, 359 aa, Populus balsamifera subsp. trichocarpa
  misc_feature (132)..(338): Pfam Name: Glyco_transf_43 Pfam Description: Glycosyltransferase family 43
  misc_feature: Ceres Annot ID no. 1538289
  misc_feature: Bit score of 816.8 for HMM based on sequences of Figure 29
  misc_feature: Functional Homolog Of SEQ ID NO. 1481
MGSLERSKKKVQLWKKAIVHFGLCFVMGFFTGFAPGGKASIFSSHVVASNKSQPVEMLHQQVASTPHASNVNRSLIAESPVPTPLSSKESEPAKFLEKEEEPKPKLLPRRLAIIVTPISTEDPYQGVFLRRLANTIRLVPPPLLWIVVEGQSDSDEVSEILRKTGIMYRHLVIKENFTDPEAELDHQRNVALRHIEQHRLSGIVHFAGLSNVYDLGFFDELRQIEVFGTWPVALLSANKNKVTIEGPVCDSSQVIGWHLKKMNNETDKRPPIHISSFGFNSSILWDPERWGRPSSVQQTSQNSIKFVKQAALEDETELKGIPPEDCSKIMLWRLNLPVSKSPSYHLSTTGSTDASRRKI

SEQ ID NO: 1512 - protein, 359 aa, Populus tremula x Populus tremuloides
  misc_feature (132)..(338): Pfam Name: Glyco_transf_43 Pfam Description: Glycosyltransferase family 43
  misc_feature: Public GI ID no. 60657594
  misc_feature: Bit score of 810.4 for HMM based on sequences of Figure 29
  misc_feature: Functional Homolog Of SEQ ID NO. 1481
MGSLERSKRKVQLWKKAIVHFGLCFVMGFFTGFAPGGKASIFSRHVVASNKSQSVEMLHQQVASVPHASNVNRSLIAESPVPTPSSSKESEPAKFLEKEEEPEPKLLPRRLAIIVTPISTEDPYQGVFLRRLANTVKLVPPPLLWIVVEGQSDSDEVSEILRKTGIMYRHLVIKENFTDPEAELDHQRNVALRHIEQHRLSGIVHFAGLSNVYDLGFFDELRQIEVFGTWPVALLSANKNKVTIEGPVCDSSQVIGWHLKKMNNETDKRPPIHISSFGFNSSILWDPERWGRPSSVQQTSQNSIKFVKQAALEDETELKGIPPEDCSKIMLWRLNLPVSKSPSYHLSTTGSTDASRRKL

SEQ ID NO: 1513 - DNA, 996 bp, Populus balsamifera subsp. trichocarpa
  misc_feature: Ceres Annot ID no. 1475351
  misc_feature: Encodes the peptide sequence at SEQ ID NO. 1514
atggggttttttacaggtttcgctccagcaggcaaggcttcaatttttactagtcatgttgctgcatcaaataaatcgcaatccttgccgcaacctgttgaaatgacgttgcaccagcaggcagcaagtacaccacatgctagtaatgtcaacagaagtttgatagctgaaactgcagtaccagctccaccaagctctaaggaatctgaacatgcaacattcttggggaaagaagaaacagaatccaagttagcgccaagacgactggcaataatcgttacgccaacaagcactaaagatccgtatcaaggggtttttttgaggaggttagctaatacgatcaggttggttcctccaccattattgtggattgttgtggaagggcaatcagattcagatgaagtatcggaggtccttaggaaaacaggtattatgtataggcatttggtgttcaaggagaattttacagatcccgaagcagagttggatcatcaaaggaatgttgcattaaggcacattgaaaaacacaggctgagtgggattgttcattttgccgggctttccaatgtttacgatctaggcttctttgacgagattagacaaattgaggtgtttggaacatggccaatggcattactttcagcaaacgagaagaaagtgataattgaaggacctgtatgtgattcctcgcaggttatcggctggcatctaaggaaaatgaacaacgaaacggataaaaggcctccaattcatatttcaagttttggattcaacagctcaatcctctgggatcctgagagatggggtcgcccttcttcagtccagcaaacctcacagaactcaatcaaattcgtcaaacaagtagctcttgaagacgagacaaagttaaagggaatcccaccagaggactgttcaaaaatcatgctttggcgtcttaatcttcctacttcaaaatcaccaagttatcaggaaaatcaagaagacaaaatcgtgtag

SEQ ID NO: 1514 - protein, 331 aa, Populus balsamifera subsp. trichocarpa
  misc_feature (110)..(316): Pfam Name: Glyco_transf_43 Pfam Description: Glycosyltransferase family 43
  misc_feature: Ceres Annot ID no. 1475351
  misc_feature: Bit score of 752.1 for HMM based on sequences of Figure 29
  misc_feature: Functional Homolog Of SEQ ID NO. 1481
MGFFTGFAPAGKASIFTSHVAASNKSQSLPQPVEMTLHQQAASTPHASNVNRSLIAETAVPAPPSSKESEHATFLGKEETESKLAPRRLAIIVTPTSTKDPYQGVFLRRLANTIRLVPPPLLWIVVEGQSDSDEVSEVLRKTGIMYRHLVFKENFTDPEAELDHQRNVALRHIEKHRLSGIVHFAGLSNVYDLGFFDEIRQIEVFGTWPMALLSANEKKVIIEGPVCDSSQVIGWHLRKMNNETDKRPPIHISSFGFNSSILWDPERWGRPSSVQQTSQNSIKFVKQVALEDETKLKGIPPEDCSKIMLWRLNLPTSKSPSYQENQEDKIV

SEQ ID NO: 1515 - protein, 338 aa, Medicago truncatula
  misc_feature (127)..(331): Pfam Name: Glyco_transf_43 Pfam Description: Glycosyltransferase family 43
  misc_feature: Public GI ID no. 61673388
  misc_feature: Bit score of 672.9 for HMM based on sequences of Figure 29
  misc_feature: Functional Homolog Of SEQ ID NO. 1481
MGLVERSKKKTHLWKKAMLHFSLCFVMGFFTGLAPTGKSLIFSSKFEISVSNRTEVVAPQPSQISTKNGNKSWTAPAPRIHSQKTAAAATTKLHVKPLPQLKPKRLLIIVTPTSTKLPYHNVFLRRLANTIKLVDQPLLWIVVEAKTESTELPEILRKTGIMYRHVVFSEEFMDLEAELNHQRNLALRHIEHHRLSGIVHFAGLSNVYDLQFFQQLRDIEVFGTWPTALLLANRKRVIIEGPVCDSSQVIGWHLRSMNNETITSPIHISSFAFNSSILWDPERWGRTSSVKDTSQNSIKFVKQVVLEDEAKLKGIPPYCSKILLWRFNFFYRRTISKH

SEQ ID NO: 1516 - protein, 351 aa, Arabidopsis thaliana
  misc_feature (137)..(345): Pfam Name: Glyco_transf_43 Pfam Description: Glycosyltransferase family 43
  misc_feature: Public GI ID no. 15228084
  misc_feature: Bit score of 654.0 for HMM based on sequences of Figure 29
  misc_feature: Functional Homolog Of SEQ ID NO. 1481
MGSLERSKKKAQVWKKAVIHFSLCFVMGFFTGFAPAGKASFFSNFETTSYTSTKSPIPPQPFENATYTQHSLLNRTLINSQSQAPAPAESREAEGETRSLSEKEDENQVKVTPRGLVIVVTPIITKDRYKNVLLRRMANTLRLVPPPLLWIVVEKHSDGEEKSSSTMLRKTGIMYRRIVFKEDFTSLESELDHQRNLALRHIEHHKLSGIVHFAGLNNIYDLDFFVKIRDIEVFGTWPMALLSANRKRVVVEGPVCESSQVLGWHLRKINNETETKPPIHISSFAFNSSILWDPERWGRPSSVEGTKQDSIKYVKQVVLEDDTKLKGLPAQDCSKIMLWRLKFPTRTRLST

SEQ ID NO: 1517 - DNA, 1531 bp, Panicum virgatum
  misc_feature: Ceres Clone ID no. 1724055
  misc_feature: Encodes the peptide sequence at SEQ ID NO. 1518
actcgatcccagctagcctccgactcatctctctccctcgctctagtccccaatacctctccaacatactcgtattggttcgtgggcaacaatggcgaggagccgcccggccgtcctcttgtccctcgccgttgtggcgttggcggccacggcgctggctccggcgccggcggcggcgaccaagtacaacatcaccaagctgctggcgccgtacaagcagtactcgaggttcaacgagatgctgtccaggacgcggctggcgtacgacatcaaccggcggcagaccatcacggtgctcgccgtcgacaacgcggccatgtcggcgctggaccactactcgctgcagaccatccggcacatcctctcgctgcacgtcctcgtcgactactacggcgacaagaagctcaagaagctcgcccacggctccaccgcctcttcctccatgtatcaggccaccggcgccgcgtcaggcatgtccgggtacgtgaacatcacccgcaaggacggcaaggtcagcttcacgacggacgacgccgacgccaccgcgaagcccacccggtacatcaggtccatcaaggagtacccctacgacatcgcggtgctcgaggtgagctccatcatctcctccgccgacgccgaggcgcccgtgccgccgccggcgcccgtcgacctcgtcgagctcctctccaagaagtactgcaagtccttcgcgtccctcctctcggccaacgccgacgtgctccgcaccttgaacgagaccaaggacaacgggctgacgctcttctgccccgtcgactccgccgtcgcggcgttcgcggccacctacaagaacctcacggccaaggccaagacggccatcctgctctaccacggcgtgccggactacttctcgctgcagctgctcaagtccaacaacggcatggtcaccacgctcgccaccgccaacgagaacaagaaggactacagctacgacgtgcagaacaagggcgagacggtcaccctccagaccagggtcgtcacctccagcatcacggccaccgtcggcgacatggagccgctcgccgtctacgccgtgaacaagttcctcaagccgaaggagatattcaaggtcgtcgaggcacccgcgcccgcaccagagccgtccaagaagaagagcaaggcagctgacggcggagatgactcgtccgacaattccggcgacgtgacggccgacaagggcgacgctgcgccagccgccatgctcgctcggtgggtggccgcagccacaacagcggtagcggcatttgcgttgatgggctaaatagttgtttcaaatcttattattctttttattttcatggtagattgttttcctatttaatggcgctcggcaaagggggaaaattgaaacacattgttctgcatgcgccctgtagcaagaaacgtggaggaaggaactcgggattgtggcttgtagtgctttgagttttcgtcaattagcttgatatcgatgtaattattttgtaattaatacagttgttgtcagagtttg

SEQ ID NO: 1518 - protein, 402 aa, Panicum virgatum
  misc_feature (202)..(334): Pfam Name: Fasciclin Pfam Description: Fasciclin domain
  misc_feature: Ceres Clone ID no. 1724055
  misc_feature: Bit score of 893.0 for HMM based on sequences of Figure 8
  misc_feature: Functional Homolog Of SEQ ID NO. 1518
  misc_feature: in Figure 8
MARSRPAVLLSLAVVALAATALAPAPAAATKYNITKLLAPYKQYSRFNEMLSRTRLAYDINRRQTITVLAVDNAAMSALDHYSLQTIRHILSLHVLVDYYGDKKLKKLAHGSTASSSMYQATGAASGMSGYVNITRKDGKVSFTTDDADATAKPTRYIRSIKEYPYDIAVLEVSSIISSADAEAPVPPPAPVDLVELLSKKYCKSFASLLSANADVLRTLNETKDNGLTLFCPVDSAVAAFAATYKNLTAKAKTAILLYHGVPDYFSLQLLKSNNGMVTTLATANENKKDYSYDVQNKGETVTLQTRVVTSSITATVGDMEPLAVYAVNKFLKPKEIFKVVEAPAPAPEPSKKKSKAADGGDDSSDNSGDVTADKGDAAPAAMLARWVAAATTAVAAFALMG

SEQ ID NO: 1519 - DNA, 1487 bp, Zea mays
  misc_feature: Ceres Clone ID no. 1671049
  misc_feature: Encodes the peptide sequence at SEQ ID NO. 1520
tcgtatcccctctcattaattccagctccaacatctctctcctagctacatctctccactgtctgtttgcctgtcgaggccgggcgccagcagcaacaatggcgaggatgatcagccggccggccgtcctcctctcccccctggccatgatcgtcgtggccgccgccgtcatggcgctggcaccggcgccggtggccgcgaccaagtacaacatcaccaagattctggcgccctacaaggagtactccaagttcaacgacatgctgtccaagacgcgcctcgcgtacgacatcaaccggcgccagaccatcaccgtgctggccgtcgacaactccgccatgtcggcgctcgaccactactcgctgcagaccatccgccacatcctcgagctgcacgttctcgtcgactactacggcgacaagaagctcaagaagctcgcccatggctccaccgcttcctcctccatgttccaggctaccgggtcggcgtctggcatgtcggggtacgtgaacatcacccggaaggacggcaaggttagcttcatgacggaggacgccgacgacaccgcgaagccgtcccggtacgtcaagtccgtcaaggagttcccctacgacatcgccgtgctccaggtgagctccatcatctcgtccgccgaggccgaggcgccggtgccgcccccggcgcccgtggacctcgaggagctcctatccaagaggtactgcaagtccttcgcgtccctgctctccgccaacgccgaggtgttccgcgccgtgaacgagaccaaggacaacgggctgacgctcttctgccccgtcgactcggccgtcgcggccttcgcggccacgtacaagaacctcacggccaaggccaaggcggccatcctcctctaccacgccgtgccggactacttctcgctgcagctgctcaagtccaacaacggcatggtcaccacgctggccaccgccagcgacaagaagatggactacagctacgacgtcaagaacaaaggcgagacggtcacgctgcagaccagggtcgtcacgtccagcgtcaccgccaccgttggcgacatggagccgttggccgtgtatgccgtgaacaagttcctgcagcccaaggagctcttcaaggtcgtcgaggcgcccgcgcccgcgccggagccgtccaagaagaagaaggctggtcgcggcgggagtgacgacgattcctcggacgattcgggagattcgaccgccgatgctgagaagggcgacgcagcaccggctctgctcgtgcgatggctagtcaccgcggtcgcgacagcgggagttgcatatgccctgatgggataaacttctatcagtcacctgaattatattcggactttcatttgatttgagtattctttttctttcagtgttaaatttgttttcacttattataatggtgctctcgatcggttaaggtatataaactataagagtttattataagctttttatccaggc

SEQ ID NO: 1520 - protein, 410 aa, Zea mays
  misc_feature (207)..(339): Pfam Name: Fasciclin Pfam Description: Fasciclin domain
  misc_feature: Ceres Clone ID no. 1671049
  misc_feature: Bit score of 897.0 for HMM based on sequences of Figure 8
  misc_feature: Functional Homolog Of SEQ ID NO. 1518
  misc_feature: in Figure 8
MARMISRPAVLLSPLAMIVVAAAVMALAPAPVAATKYNITKILAPYKEYSKFNDMLSKTRLAYDINRRQTITVLAVDNSAMSALDHYSLQTIRHILELHVLVDYYGDKKLKKLAHGSTASSSMFQATGSASGMSGYVNITRKDGKVSFMTEDADDTAKPSRYVKSVKEFPYDIAVLQVSSIISSAEAEAPVPPPAPVDLEELLSKRYCKSFASLLSANAEVFRAVNETKDNGLTLFCPVDSAVAAFAATYKNLTAKAKAAILLYHAVPDYFSLQLLKSNNGMVTTLATASDKKMDYSYDVKNKGETVTLQTRVVTSSVTATVGDMEPLAVYAVNKFLQPKELFKVVEAPAPAPEPSKKKKAGRGGSDDDSSDDSGDSTADAEKGDAAPALLVRWLVTAVATAGVAYALMG

SEQ ID NO: 1521 - DNA, 1218 bp, Sorghum bicolor
  misc_feature: Ceres Annot ID no. 8651870
  misc_feature: Encodes the peptide sequence at SEQ ID NO. 1522
atggcaagaagccggccgggcattctgctctccgtggcggccctcgccgttgcggcggtggcggcactggcgccggcgccggtggccgcgacaaagtacaacatcaccaagattctggcaccgtacaaggagtactccaagttcaacgagatgctgtccaagacgcggctggcgtacgacatcaaccggcggcagaccatcaccgtgctggccgtcgacaactctgccatgtcggcgctcgaccactactcgctgcagacgatccggcacatcctgtcgctgcacgtcctcgtcgactactacggggataagaagctcaagaagcttgcccacggcgccaccgcctcctcctccatgttccaggctaccgggtcggcgtccggcatgtcggggtacgtgaacatcacccgaaaagacggcaaggtgagtttcatgacggaggacgccgacgacacggcgaagccgtcccggtacgtcaagtccgtgaaggagtacccctacgacatcgcggtgctccaggtgagctccatcatctcgtcggcggaggcggaggcgcccgtcccggccccggcgcccgtggacctggtggagctcctctccaagcgctactgcaagtcgttcgcgtccctgctctccgccgacgccgaggcgttccgcgccgccaacgagagcaaggacaacggcctcacgctcttctgccccgtggactcggccgtcgcgtcgttcgcggccacctacaagaacctgacggccaaggccaagacggccatcctcctctaccacgccgtgccggactacttctcgctgcagctgctcaagtccaacaacggcatggtcaccacgctcgccaccgccagcgagaagaagatggactacagctacgacgtcaagaacaaggacgagacggtcacgctgcagaccagggtcgtcacgtccagcgtcaccgccaccgtcggcgacatggagccgctggcagtctacgccgtcgacaagttcctgcagcccaaggagctgttcaaggtcgtcgaggcgcccgcgccggcgccggagccgtcgtccaagaagaagaaggccggtcgcggcgggggtgacgacgacgacgattcctccgacgattccacggccgatgcggaaaagggcgacgccgcaccggctctgctcgcgcgatgggtagtcaccgcggccgccgcggcggtagctgcatatgcgttgatctga

SEQ ID NO: 1522 - protein, 405 aa, Sorghum bicolor
  misc_feature (203)..(335): Pfam Name: Fasciclin Pfam Description: Fasciclin domain
  misc_feature: Ceres Annot ID no. 8651870
  misc_feature: Bit score of 900.4 for HMM based on sequences of Figure 8
  misc_feature: Functional Homolog Of SEQ ID NO. 1518
  misc_feature: in Figure 8
MARSRPGILLSVAALAVAAVAALAPAPVAATKYNITKILAPYKEYSKFNEMLSKTRLAYDINRRQTITVLAVDNSAMSALDHYSLQTIRHILSLHVLVDYYGDKKLKKLAHGATASSSMFQATGSASGMSGYVNITRKDGKVSFMTEDADDTAKPSRYVKSVKEYPYDIAVLQVSSIISSAEAEAPVPAPAPVDLVELLSKRYCKSFASLLSADAEAFRAANESKDNGLTLFCPVDSAVASFAATYKNLTAKAKTAILLYHAVPDYFSLQLLKSNNGMVTTLATASEKKMDYSYDVKNKDETVTLQTRVVTSSVTATVGDMEPLAVYAVDKFLQPKELFKVVEAPAPAPEPSSKKKKAGRGGGDDDDDSSDDSTADAEKGDAAPALLARWVVTAAAAAVAAYALI

SEQ ID NO: 1523 - protein, 401 aa, Oryza sativa subsp. japonica
  misc_feature: Public GI ID no. 115478142
  misc_feature: Bit score of 891.9 for HMM based on sequences of Figure 8
  misc_feature: Functional Homolog Of SEQ ID NO. 1518
  misc_feature: in Figure 8
MAAARLWVVAVAVAVAVAVMAAAVEGKSYNITKILAAHPEFSKFNEMLSKTRLAYDINRRQTITVLAVDNSAMASLDHFTLPTIRHILSLHILVDYYGSKKLHALSHGATASSSMFQATGSAPGTTGYVNITSHKGGKIDFISEDADESAKPSRYVKSVKEIPYDISVLQVSSVLSSSEAEAPVPPPAPVNLTELLSKKYCKSFAGLLAANADVFRAVNETKDNGLTLFCPVDAAVAAFMPSYKNLTAKAKTAILLYHAVPDYFSLQLLKSNNGMVTTLATASESKKDYSYDVQNKGETVTLDTRVVNSAVTATVGDAEPLAVYAVTKFLKPKELYKVVEAPAPAPEPSKKHKSAADDSSDDSSDDSGDVKAHKGAAAPAPLARWVTAAAAAAVAALMLMA

SEQ ID NO: 1524 - protein, 402 aa, Triticum aestivum
  misc_feature (202)..(334): Pfam Name: Fasciclin Pfam Description: Fasciclin domain
  misc_feature: Public GI ID no. 115349940
  misc_feature: Bit score of 876.1 for HMM based on sequences of Figure 8
  misc_feature: Functional Homolog Of SEQ ID NO. 1518
  misc_feature: in Figure 8
MARSRQSILLAFAVGAMAAVLLASPAAAKSYNITKILAAHPEFSKFNAMLSKTRLASDINRRQTITVLALDNSAMAALDHYTLPTVRHILSLHVLVDYYGNKKLKQLSRGATASASMFQSTGTASGMSGYVNITSHKGGKVEFVSQDADDTVKPSRYVKSIKEIPYDISVLEIASVLSSSEAEAPVPPPAPVDLIELLSKKHCKSFAGLISGNADVFRTLNDTKDNGLTLFCPVDAAVAAFMPKYKNLTTKAKTAILLYHGVPDYFSLQLLKSNNGMVSTLATTSEVKKDYSYDVQNDDEKVTLVTKVVTSTVTATVGDSEPLAVYAVSKFLKPKELFKVAQAPTPAPSKKGKKEAGDDDDSSDDEDSDDATTDKGDAAPAVYGRWATAAATAGAVLALLMA

SEQ ID NO: 1525 - protein, 418 aa, Trifolium pratense
  misc_feature (204)..(333): Pfam Name: Fasciclin Pfam Description: Fasciclin domain
  misc_feature: Public GI ID no. 84468390
  misc_feature: Bit score of 912.3 for HMM based on sequences of Figure 8
  misc_feature: Functional Homolog Of SEQ ID NO. 1518
  misc_feature: in Figure 8
MKKQLAPLVLFSLTLLISLIHSTTAGAATSGSHNITRILAKHPGFSTFNHYLTITHLADEINRRQTITILAIDNAAMSSLLDKHLSVSTLKNVLSLHVLVDYFGAKKLHQITNGTTLVSSMFQATGSAAGTAGYVNVTNLKGGKVGFAAEDNDGLHSFYVKSIEELPYVISVLEISQPLSSADAEAPTAAPSDIDLIAIMSKQGCKAFADLLRVSKALPTFKETVDGGLTVFCPTDSAVNGFSAKYKNLTDSKKVSLLLYHGVPVYQSLQMLKSNNGIMNTLATEGANKYDFTVQNDGEDVNLETKVNTANIIGTLIDQDPFVVYKINKVLMPRELFKGVKEDLAPAESPKPAKKKKTTKKGKAPAADEDADSPADGPDADADSDDEKAADDNGVSGLNQGFRFVMVFFSLFIGFLVL

SEQ ID NO: 1526 - protein, 398 aa, Gossypium hirsutum
  misc_feature (194)..(323): Pfam Name: Fasciclin Pfam Description: Fasciclin domain
  misc_feature: Public GI ID no. 157273672
  misc_feature: Bit score of 902.4 for HMM based on sequences of Figure 8
  misc_feature: Functional Homolog Of SEQ ID NO. 1518
  misc_feature: in Figure 8
MSPATTALFLLLLLLFSTSNAHNITRILAKHPEFSTFNHYLTLTHLASEINRRETITVLALNNAAMSSLLSKQLSLYTLKNVLSLHVLVDYFGSKKLHQITNGTALTSTMFQASGAAPGSSGYINITDLKGGKVGFGAENNDGNLDAVYVKSVAEIPYNISVLQISQVLNSAEAEAPTAEPSKLNLTEIMSKQGCKSFADLLISSGADATFNENIDGGLTVFCPTDPVIKDFMPKYKNLTASKKASLLLYHGVPVYQSMQMLKSNNGIMNTLATDGANKYDFTIQNDGEVVTLETKVMTAKITGTLKDEEPLIVYKINKVLLPRELYKPVEAPAESPKPSKSKSKSKHKVADAPESDAPAESDPADDQTADNDSGVAGLDGRRLVMVMLSLCIGVLLM

SEQ ID NO: 1527 - DNA, 1435 bp, Arabidopsis thaliana
  misc_feature: Ceres Clone ID no. 4620
  misc_feature: Encodes the peptide sequence at SEQ ID NO. 1528
ataagactcctctccaaatgctaccacacaattcctctatcacagccgcccaatcctccatccaaaaatggcttatttccggcgagcagccaccgcattggttctcattttccagctccacctctttctctccctctcaaatgcacataacataacccgaatcttggccaaagaccctgatttctccactttcaaccactatctctcagcgactcatctcgccgacgagatcaaccgccggcaaacaatcaccgtcttggccgtcgataactcagcaatgtcctccatcctctctaacggatactcactctaccaaatccgcaacattctctctctccacgtcctggtcgattacttcggcaccaagaaacttcaccagatcaccgacggctccacctccactgcctccatgtttcaatccaccggatccgccaccggaacttctggatacatcaacatcaccgatataaaaggcggtaaagtcgcttttggtgtccaagacgacgatagcaagctcacagctcactacgtcaaatccgtctttgaaaagccttacaacatctctgttcttcacatcagccaagtcttaacctcgccggaagcagaagctcccacggcgagtcccagcgacctcatcctcaccacaatcctcgaaaaacaagggtgcaaagctttctccgacatcttgaagtcaaccggcgccgacaaaacgttccaagataccgtagacggaggcttaacggtgttctgtccctccgacagcgctgtcggtaagttcatgccgaaattcaaatccctttctccggcgaacaagactgcgttagtgctttaccacggcatgccggtttaccagtcgttacaaatgcttagatcaggtaacggcgccgttaacacgttagcgacggaaggtaacaacaagtttgatttcaccgttcaaaatgacggagaagacgtgacgctggagacggacgttgtgacggcgaaggtaatggggacgttaaaggatcaagagcctttgatagtttacaagattgataaagtgttgttgcctagagaaatctataaggccgttaagacgtccgctccagctcctaagtcgagtaagaaaaagcctaagaacgcggaggctgacgccgacggacctagcgccgatgctccgtcagatgatgatggtgaggtggctgacgataaaaacggcgccgtatcagcgatgattactcgaacaagtagtgtcgtaacggccattgtcgggctctgtttcggagtttggcttatgtgaagtgacgtggcatttacctcgctttgggaatcttgtttttctttttttctttgtgatctgtcggtttaatttattttacatattcttttttttgttcacgttgatacttggtgtggagatttggaataattaattgttccacttgtgttggatctg

SEQ ID NO: 1528 - protein, 403 aa, Arabidopsis thaliana
  misc_feature (199)..(328): Pfam Name: Fasciclin Pfam Description: Fasciclin domain
  misc_feature: Ceres Clone ID no. 4620
  misc_feature: Bit score of 872.3 for HMM based on sequences of Figure 8
  misc_feature: Functional Homolog Of SEQ ID NO. 1518
  misc_feature: in Figure 8
MAYFRRAATALVLIFQLHLFLSLSNAHNITRILAKDPDFSTFNHYLSATHLADEINRRQTITVLAVDNSAMSSILSNGYSLYQIRNILSLHVLVDYFGTKKLHQITDGSTSTASMFQSTGSATGTSGYINITDIKGGKVAFGVQDDDSKLTAHYVKSVFEKPYNISVLHISQVLTSPEAEAPTASPSDLILTTILEKQGCKAFSDILKSTGADKTFQDTVDGGLTVFCPSDSAVGKFMPKFKSLSPANKTALVLYHGMPVYQSLQMLRSGNGAVNTLATEGNNKFDFTVQNDGEDVTLETDVVTAKVMGTLKDQEPLIVYKIDKVLLPREIYKAVKTSAPAPKSSKKKPKNAEADADGPSADAPSDDDGEVADDKNGAVSAMITRTSSVVTAIVGLCFGVWLM

SEQ ID NO: 1529 - protein, 427 aa, Salicornia europaea
  misc_feature (207)..(337): Pfam Name: Fasciclin Pfam Description: Fasciclin domain
  misc_feature: Public GI ID no. 84871616
  misc_feature: Bit score of 862.9 for HMM based on sequences of Figure 8
  misc_feature: Functional Homolog Of SEQ ID NO. 1518
  misc_feature: in Figure 8
MQKAIVLGALLLLLTLTLTPTTTHAHNITKILAKFPDFSSFNHYLTTTHLAPEINTRQTITVLAIDNAAMASLTSKHLPISTLKNILSLHVLLDYFGAKKLHQITDGSALAATMYQATGSAPGTAGFVNITDLKGGKVGFAATNPASDEGDSDSTPSLNSTFIKSLKEIPYNISVIQISHILSSPTAEAPSPAPEATNITGIMSAHGCKEFADTLTSFPDALEVFTTNTEGGLTVFCPSDDAFKGFLPNFKNLTKEEKNSLLLFHGIPVYNSMALLKTSNGVMNTLATDGKNKFDFTVQNAGQKVTLKTKAVTATITATLLDEDPVAIYTIDKVLKPSEIFKKPEISPAPAPAPEAEAPSKGKRHHKSPPAPPSEDDSADSPADSPADGPNADDSTADDSSDGGERVKKGFWMVGVVSVVGVWSMWI

SEQ ID NO: 1530 - DNA, 1523 bp, Glycine max
  misc_feature: Ceres Clone ID no. 664500
  misc_feature: Encodes the peptide sequence at SEQ ID NO. 1531
actccgctgtcctctgtcgccgccagatctcagacgagactcagtcacactttctctctttctcttccacaatgcagctcctccgggcggtgctcgcggcggcgctgctcctcctcgccactctctccgacgcccacaacatcacaaccatcctctcaaagcaccctgagttctccaccttcaaccactacctgaccctgacccacctggccccggaaatcaacggcaaaaccaccatcaccgtctgcgccgtggacaacgccgccatgtcggacctcctcagcaagcacccctccatttacaccatcaagaacatcctctccctccacgtcctcctcgactacttcggcgccaagaagctccaccagatcaccaacggcaccgccctcgccgccaccatgtaccaggccaccggcagcgctcccggatccgccggctttgtcaacatcaccgacctccacggcggaaaggttggcttcggcgccgaaaacaacgacggcacactctcctcaactttcgtcaaatccgtagaagaaatcccttacaacatctcagtaatccagatcagcaaagttcttccctctgccgcagcggaagcccctgcacccgcacccacccaacaaaacctcaccaacattatgtcaaaacacggatgcaaggtcttcgccgacgctctctctgctcaacccgacgcgcttaacaccttcaatgacaacctcgacgggggcttaaccgtcttttgccccctcgacgacgcgttcaaagcgtttctccccaaattcaaaaacctaaccaaatccggtaaggtcgcgcttctcgaattccacggtgttccggtttaccagtccaaagccactctcaaatccaacaacggacttcagaacactctcgccactgatggcgctaacaagttcgacttcactgttcagaacgacggtgaagatgttactctgaaaacgaagctcaccactgcgaagatcaccgacacgttgattgacgaacagcctctcgcgattttcgctattagtaaggtgcttcagcccaaggagctgtttaagggtgaggcggaggctccggcgcctgcgccggagccttctgccgccgacgctcctgcgccggcgaagaaggggaagaagaagaagaaggcggctgatgcgccggcggatgattctgatgctcctgctgattctcccgatgatgctgctgatgtgaccgccgatgacagtaacggcgccgttaaaactaacggcgggaggtacggtggtggtgttgttgccttggctttaggtttggttttggggttaccgttagtgctgtgatgtgagttaattaattaaaaaagggagttttagggtttagttttttaaggggattcgaagtgatattcctttttttttttttctgtttttttaaatatttttatttaattattgtcgtatttgataatgttgtaattttggtggtgagagagcgggaattgatacactgacgtgaatgttttttataatgtaaacaatttgttt

SEQ ID NO: 1531 - protein, 415 aa, Glycine max
  misc_feature (194)..(324): Pfam Name: Fasciclin Pfam Description: Fasciclin domain
  misc_feature: Ceres Clone ID no. 664500
  misc_feature: Bit score of 872.1 for HMM based on sequences of Figure 8
  misc_feature: Functional Homolog Of SEQ ID NO. 1518
  misc_feature: in Figure 8
MQLLRAVLAAALLLLATLSDAHNITTILSKHPEFSTFNHYLTLTHLAPEINGKTTITVCAVDNAAMSDLLSKHPSIYTIKNILSLHVLLDYFGAKKLHQITNGTALAATMYQATGSAPGSAGFVNITDLHGGKVGFGAENNDGTLSSTFVKSVEEIPYNISVIQISKVLPSAAAEAPAPAPTQQNLTNIMSKHGCKVFADALSAQPDALNTFNDNLDGGLTVFCPLDDAFKAFLPKFKNLTKSGKVALLEFHGVPVYQSKATLKSNNGLQNTLATDGANKFDFTVQNDGEDVTLKTKLTTAKITDTLIDEQPLAIFAISKVLQPKELFKGEAEAPAPAPEPSAADAPAPAKKGKKKKKAADAPADDSDAPADSPDDAADVTADDSNGAVKTNGGRYGGGVVALALGLVLGLPLVL

SEQ ID NO: 1532 - DNA, 1560 bp, Panicum virgatum
  misc_feature: Ceres Clone ID no. 1995956
  misc_feature: Encodes the peptide sequence at SEQ ID NO. 1533
agctagcctccgactcatctctctccctcgctctagtccccaatacctctccaacacactcgtattggttcgtgggcaacaatggcgaggagccgcccggccgtcctcttgtccctcgccgttgtggcgttggcggccacggcgctggctccggcgccggcggcggcgaccaagtacaacatcaccaagctgctggcgccgtacaagcagtactcgaggttcaacgagatgctgtccaggacgcggctggcgtacgacatcaaccggcggcagaccatcacggtgctcgccgtcgacaacgcggccatgtcggcgctggaccactactcgctgcagaccatccggcacatcctctcgctgcacgtcctcgtcgactactacggcgacaagaagctcgcccacggctccaccgccacttcctccatgtatcaggccaccggcgccgcgtcaggcatgtccgggtacgtgaacatcacccgcaaggacggcaaggtcagcttcacgacggacgacgccgacgccaccgcgaagcccacccggtacatcaggtccatcaaggagtacccctacgacatcgcggtgctcgaggtgagctccatcatctcctccgccgacgccgaggcggccgtgccgccgccggcgcccgtcgacctcgtcgagctcctctccaagaagtactgcaagtccttcgcgtccctcctctcggccaacaccgacgtgctccgcaccttgaacgagaccaaggaggacaacgggctgacgctcttctgccccgtcgactccgccgtcgcggcgttcgcggccacctacaagaacctcacggccaaggccaagacggccatcctgctctaccacggcgtgccggactacttctcgctgcagctgctcaagtccaacaacggcatggtcaccacgctcgccaccgccagcgagaacaagaaggactacagctacgacgtgcagaacaagggtgagacggtcaccctccagaccagggtcgtcacctccagcatcacggccaccgtgggtgacatggagccgctcgccgtctacgccgtgaacaagttcctcaagccgaaggagatattcaaggtcgtcgaggcacccgcgcccgcaccagagccgtccaagaagaagagcaaggcagctgacagcggagatgactcgtccgacgattccggcgacgtgacggccgacaagggcgacgctgcgccagccgccatgctcgctcggtgggtggccgcagccacaacagcggtagcggcatttgcgttgatgggctaaatagttgtttcaaatcttattaggccatcttattattctttttattttcatggtaaattgttttcctatttaatggcgctcgggcaaagggggaaaattgaaacacattgtttctgcatgcgccctgtagcaagaaacgtggaggaaggaactcgggattgtggcttgtagtgctttgagttttcgtcaattagcttgatatcgatgtaattattttgtaattaatacagttgttgtcagagtttgaaaagaagtcaggaatggtttcaagtggtt

SEQ ID NO: 1533 - protein, 400 aa, Panicum virgatum
  misc_feature (199)..(332): Pfam Name: Fasciclin Pfam Description: Fasciclin domain
  misc_feature: Ceres Clone ID no. 1995956
  misc_feature: Bit score of 861.1 for HMM based on sequences of Figure 8
  misc_feature: Functional Homolog Of SEQ ID NO. 1518
MARSRPAVLLSLAVVALAATALAPAPAAATKYNITKLLAPYKQYSRFNEMLSRTRLAYDINRRQTITVLAVDNAAMSALDHYSLQTIRHILSLHVLVDYYGDKKLAHGSTATSSMYQATGAASGMSGYVNITRKDGKVSFTTDDADATAKPTRYIRSIKEYPYDIAVLEVSSIISSADAEAAVPPPAPVDLVELLSKKYCKSFASLLSANTDVLRTLNETKEDNGLTLFCPVDSAVAAFAATYKNLTAKAKTAILLYHGVPDYFSLQLLKSNNGMVTTLATASENKKDYSYDVQNKGETVTLQTRVVTSSITATVGDMEPLAVYAVNKFLKPKEIFKVVEAPAPAPEPSKKKSKAADSGDDSSDDSGDVTADKGDAAPAAMLARWVAAATTAVAAFALMG

SEQ ID NO: 1534 - protein, 416 aa, Zea mays
  misc_feature (213)..(345): Pfam Name: Fasciclin Pfam Description: Fasciclin domain
  misc_feature: Public GI ID no. 194706396
  misc_feature: Bit score of 884.1 for HMM based on sequences of Figure 8
  misc_feature: Functional Homolog Of SEQ ID NO. 1518
MARMISRPAVLLSPLAMIVVAAAVMALAPAPVAATKYNITKILAPYKEYSKFNDMLSKTRLAYDINRRQTITVLAVDNSAMSALDHYSLQTIRHILELHVLVDYYGDKKLKKLAHGSTASSSMFQAWTCIQATGSASGMSGYVNITRKDGKVSFMTEDADDTAKPSRYVKSVKEFPYDIAVLQVSSIISSAEAEAPVPPPAPVDLEELLSKRYCKSFASLLSANAEVFRAVNETKDNGLTLFCPVDSAVAAFAATYKNLTAKAKAAILLYHAVPDYFSLQLLKSNNGMVTTLATASDKKMDYSYDVKNKGETVTLQTRVVTSSVTATVGDMEPLAVYAVNKFLQPKELFKVVEAPAPAPEPSKKKKAGRGGSDDDSSDDSGDSTADAEKGDAAPALLVRWLVTAVATAGVAYALMG

SEQ ID NO: 1535 - protein, 415 aa, Oryza sativa subsp. japonica
  misc_feature (199)..(331): Pfam Name: Fasciclin Pfam Description: Fasciclin domain
  misc_feature: Public GI ID no. 115475872
  misc_feature: Bit score of 718.0 for HMM based on sequences of Figure 8
  misc_feature: Functional Homolog Of SEQ ID NO. 1518
MELLLRRLAVVVAVVALTAATAAEGYNITKILGDHPEYSQFNKLLTETRLAGDINRRRTITVLVVANGDMGALSGGHYTLPTLRHILEMHILVDYYGAKKLHQLARGDTASSSMFQESGSAPGTTGYVNITQHRGGRVSFTAEDAADSATPSSFVKSVKEIPYDLAVLQISKPLSSPEAEAPVAPPAPVNLTELLSKKYCKNFAGLLASNADVYSNINATKDNGLTLFCPVDAAVDAFLPKYKNLTAKGKAAILLYHAVPDYYSLQLLKSNSGKVSTLATASVAKKDYSYDVSNDRDSVLLDTKVNSASVTATVKDADPLAVYAISKFLQPKELFKVTEDLAPAPAPEGPKKKTKKKKPSTTSAAAAPSDDSSAADSPDGTPADDVADKAAAAPSVLARWVTAAATVAAALALAA

SEQ ID NO: 1536 - DNA, 1516 bp, Triticum aestivum
  misc_feature: Ceres Clone ID no. 700193
  misc_feature: Encodes the peptide sequence at SEQ ID NO. 1537
tacaccatcactcagtggtgctccgctctgctcagctcagcgccctccaccagtccgccccactccatcccgagctgagctgagccgccaccagcactagcggccaagctctagacgccggctgcctcaccgacgaggagaggataatggaggcgcggcggcggacgttgctggtggcgctggcggtgctggccctggcggcggcggcggcggaggggtacaacatcaccaagatcctggccgagtacccggagtactcgcagttcaacaagctgctgacgcagacgcggctggcgcaggacatcaacaagcgccgcaccatcaccgtgctcgtcgtggccaacggcgacatgggcggcctcgccggcgggggccgcacgctgcagaccatccgccacatgctccagattcacgtcctcgtcgactactacggcggcaagaagctccaccagctcgcccacggcgtcaccgcatgctccaccatgttccaggagtccggcgcggcccccggcatgtccgggtacgtgaacatcacgcagcaccggggcggcaaagtgacgttcacggcggaggacgcggaggacagcgcgccctcctccgccttcgtcaagtccgtcaaggagatcccctacgacctggcggtgctccagatcagcaaggtgctggcctcaccggaggccgaggcgcccgtggcggcgccggcgcccgtcaacatcaccgagctgctctccaagaagtactgcaagagcttcgccggcctgctggccgccgacgccgacgcctacagcaccatcaacgccaccaaggacaacgggctcaccctcttctgccccgtcgactccgccgtcgcctccttcatgcccaagtacaagaacctgacggccaagggccggacggccatcctgctctaccacgccgtgccggactactactcgctgcagctgctcacctccaacagcggcaaggtcagcacgctcgccacctccaacgtcgccaagaaggactacagcttcgacgtcgagaaggacggcgagaccgccgagctggacaccaaggtgaactcggcctcggtcacctacaccatcaaggacgacgacccgctcgccgtctacgccatctccaagttcctgcagcccaaggagctgtacaagatcgccaaggacatcgcccccgcgccggcgcccgaggcccccaagaagaagaagaccaccaagaagaagccctccgcggccgcctcgccctcggacgacgacgacgacgatgactccgccgcggactcgcccgacgactcctcatccgacgacgccaccgctgacaaggacggcgccgcgccgtccgcggtggccgggtgggtgacggccgccgtggccgtggcctcggcgctggcattggcagcttaataaggtgtgtgaactagtgtgtttttgtgctgagttctcccaaaattcgtggcccttgttatttagcgcgaaaaacaagaagggccatttcattcatatttattaccgcatgtcct

SEQ ID NO: 1537 - protein, 417 aa, Triticum aestivum
  misc_feature (198)..(330): Pfam Name: Fasciclin Pfam Description: Fasciclin domain
  misc_feature: Ceres Clone ID no. 700193
  misc_feature: Bit score of 724.3 for HMM based on sequences of Figure 8
  misc_feature: Functional Homolog Of SEQ ID NO. 1518
MEARRRTLLVALAVLALAAAAAEGYNITKILAEYPEYSQFNKLLTQTRLAQDINKRRTITVLVVANGDMGGLAGGGRTLQTIRHMLQIHVLVDYYGGKKLHQLAHGVTACSTMFQESGAAPGMSGYVNITQHRGGKVTFTAEDAEDSAPSSAFVKSVKEIPYDLAVLQISKVLASPEAEAPVAAPAPVNITELLSKKYCKSFAGLLAADADAYSTINATKDNGLTLFCPVDSAVASFMPKYKNLTAKGRTAILLYHAVPDYYSLQLLTSNSGKVSTLATSNVAKKDYSFDVEKDGETAELDTKVNSASVTYTIKDDDPLAVYAISKFLQPKELYKIAKDIAPAPAPEAPKKKKTTKKKPSAAASPSDDDDDDDSAADSPDDSSSDDATADKDGAAPSAVAGWVTAAVAVASALALAA

SEQ ID NO: 1538 - protein, 416 aa, Triticum aestivum
  misc_feature (197)..(329): Pfam Name: Fasciclin Pfam Description: Fasciclin domain
  misc_feature: Public GI ID no. 115349890
  misc_feature: Bit score of 725.7 for HMM based on sequences of Figure 8
  misc_feature: Functional Homolog Of SEQ ID NO. 1518
MEARRRTLLVALAVLALAAAAEGYNITKILAAYPEYSQFNKLLTQTRLAQDINKRRTITVLVVANGDMGSLAGGGRTLQTIRHMLQIHVLVDYYGGKKLHQLAHGVTACSSMFQESGAAPGMSGYVNITQHRGGKVTFTAEDAEDSAPSSAFVKSVKEIPYDLAVLQISKVLASPEAEAPVAAPAPVNITELLSKKYCKSFAGLLAADADAYSTINATKDNGLTLFCPVDSAVASFMPKYKNLTAKGRTAILLYHAVPDYYSLQLLTSNSGKVSTLATSNVAKKDYSFDVEKDGETAELDTKVNSASVTYTIKDDDPLAVYAISKFLQPKELYKIAKDIAPAPAPEAPKKKKTTKKKPSAAASPSDDDDDDDSTADSPDDSSSDDATADKDGAAPSAVAGWVTAAVAVASALALAA

SEQ ID NO: 1539 - DNA, 1257 bp, Sorghum bicolor
  misc_feature: Ceres Annot ID no. 8725185
  misc_feature: Encodes the peptide sequence at SEQ ID NO. 1540
atggacctgcggcggcggcggctggcgctggctgtgttggcggcggtggccatgtgcgccgccacactgacggcggtggtggaggggttcgacatcctggagatcctggggaagcacgacgagttctcgcagttctgcaagctgctcaacgagacgcacctcgccggggacatcaaccgcgaccggaccatcaccgtgctcgccgtcgccaacggcgacatgggccacctcaccggcggccactactcgctcggcacgctccgtcacatcctcgagctccacgtcgtcgccgactactacgacgataagaagctcaagcagctgtcgcacgccgccaccgccgcatccaccatgttccagcgatccggatttgcccccggcatggcaggatacgtgaacataacgcagcaccgcggcggcaaggtgtcgttcatcgtggatgacgcagcggacagcgtgaagcccgtcacctacgtgaagcagatcgagagccaccggtacgactactcggtgctccaggtgagcggcgtgctgtcgtcgccggaggcggaggcgcccgtggccccgccggcgcccgtcaacctcaccgacatcctctccaagaagtactgcaagagcttcgcggcgctgctggccgccgacgccaaggtgttcgacgccatcaatggcaccaaggacacggcgctgaccgtcttctgccccgtcgacgcggcggtggcggcattcatgcccaagttcaagaacctgacggcgaaggcgaagacagccatcctgctgtaccatgccatcccggactactactccatgcagttcctcaagtccaacaagggcaaggtcaccacgctcgccaccaccaacaccaacaagaaggactacacgtatgaggccgagagcaaggatgacacggtcacgctcgacaccaccgtcgtcacctccaccatccaggccaccgtcagggacgacgacccacttgccgtctatgctgtgtccaagttcctgcagcctaaggagctgttcaaggcgaagacggcagaccttgcgcctgcgcctgctccggaagggccaaagaagaagaagaagaagaagcccgccagcggctctgcagccgctgcgccttcggacgatgactctgcagatggcccgtctgccgacgactcatccgatgacgccgccgacaaggccgccgctgcgccggcgtccctgtttgcccggtgggtgacgatcgccgtggcgctggcgctggcgttggcagcctaa

SEQ ID NO: 1540 - protein, 418 aa, Sorghum bicolor
  misc_feature (203)..(335): Pfam Name: Fasciclin Pfam Description: Fasciclin domain
  misc_feature: Ceres Annot ID no. 8725185
  misc_feature: Bit score of 635.2 for HMM based on sequences of Figure 8
  misc_feature: Functional Homolog Of SEQ ID NO. 1518
MDLRRRRLALAVLAAVAMCAATLTAVVEGFDILEILGKHDEFSQFCKLLNETHLAGDINRDRTITVLAVANGDMGHLTGGHYSLGTLRHILELHVVADYYDDKKLKQLSHAATAASTMFQRSGFAPGMAGYVNITQHRGGKVSFIVDDAADSVKPVTYVKQIESHRYDYSVLQVSGVLSSPEAEAPVAPPAPVNLTDILSKKYCKSFAALLAADAKVFDAINGTKDTALTVFCPVDAAVAAFMPKFKNLTAKAKTAILLYHAIPDYYSMQFLKSNKGKVTTLATTNTNKKDYTYEAESKDDTVTLDTTVVTSTIQATVRDDDPLAVYAVSKFLQPKELFKAKTADLAPAPAPEGPKKKKKKKPASGSAAAAPSDDDSADGPSADDSSDDAADKAAAAPASLFARWVTIAVALALALAA

SEQ ID NO: 1541 - DNA, 1620 bp, Zea mays
  misc_feature: Ceres Clone ID no. 1409995
  misc_feature: Encodes the peptide sequence at SEQ ID NO. 1542
attccactccatcagtgggcagcgctctgctctcctccactcactcactccccttgcccccatccatccgctagccactagctccagcaggctcgccgccgacactccactagtgctctgctctctccgctccactcacaaactcccctcgctccccccccccccccccaatcggcgatggatctgctgctgcggcggcggctgctggccgtggtggccacggcggcggtgctggccgtgtgcgccttcacggcggcggaggggttcgacatcctgcagatcctggggaagcacgacgagttctcgcagttctgcaagctgctcaacgagacgcacctggccggcgacatcaaccgcgaccgcacaatcaccgtgctggccgtggccaacggcgacatgggccacctcgccgccggccactactcgctcggcaccatccgccacatcctcgagctgcacgtcgtcgccgactactacgacgacaagaagctcaagcagctgtcgcacgccgccaccgccgcgtccaccttgttccagcgatccggatttgcccccggcatggcaggatacgtgaacataacgcagcaccgcggcggcaaggtgtcgttcatcgtggacgacgcggcggacagcgtcaagcccgtcacttacgtgaagcagatcgagagccaccgctacgactactcggtgctccaggtcagcggcgtcctgtcctccccggaggccgaggcacccgtcgccccgccggcgcccgtcaacctcaccgacatcctctccaagaagtactgcaagagcttcgcgggcctcctcgccgccgaccccaaggtcttcgacaccctcaacggcaccaaggacaccgcgctcaccgtcttctgccccgtcgacgcggcggtggccgccttcatgcccaagttcaagaacctcacggccaaggccaagacggccatcctgctctaccacgccgtgccggactactactccatgcagttcctcaagtccaacaagggcaaggtcaccacgctcgccaccaccagcgtcgccaagaaggactacacctacgaagcggagagcaaggacgacaccgtcacgctcgacaccaccgtcgtcacctccaccatccaggccaccgtcagggacgacgacccgctcgccgtctacgcttgctccaagttcctgcagcctaaggagctgttcaaggccaagaccgctgatctcgcgcctgcgccggctccgcaagggcccaagaagaagagcaagaagaagcccaccggcacctcggcggcctccgcgccctcggacgatgaatctgcagatggcccgtctgccgacgacgactcgtccgatgatgccgcggacaaggctgccgccgcgccgtcgtacctgtccgctcgatgggtgaccgccgcagtgacgaccgccgtcgcgctggcgctggcggcgtaaggtgtgcgctcatgtgctatgttttttttataacttattggaccccctatcttcttttcttttgtccaagtcgtgtcccttccttgttggtgaacaaaataagaagggctatttttgtttttttatatttattaccgcattccattaaaaaaaattagaggtgtgtgtgagtgatgt

SEQ ID NO: 1542 - protein, 421 aa, Zea mays
  misc_feature (203)..(335): Pfam Name: Fasciclin Pfam Description: Fasciclin domain
  misc_feature: Ceres Clone ID no. 1409995
  misc_feature: Bit score of 641.3 for HMM based on sequences of Figure 8
  misc_feature: Functional Homolog Of SEQ ID NO. 1518
MDLLLRRRLLAVVATAAVLAVCAFTAAEGFDILQILGKHDEFSQFCKLLNETHLAGDINRDRTITVLAVANGDMGHLAAGHYSLGTIRHILELHVVADYYDDKKLKQLSHAATAASTLFQRSGFAPGMAGYVNITQHRGGKVSFIVDDAADSVKPVTYVKQIESHRYDYSVLQVSGVLSSPEAEAPVAPPAPVNLTDILSKKYCKSFAGLLAADPKVFDTLNGTKDTALTVFCPVDAAVAAFMPKFKNLTAKAKTAILLYHAVPDYYSMQFLKSNKGKVTTLATTSVAKKDYTYEAESKDDTVTLDTTVVTSTIQATVRDDDPLAVYACSKFLQPKELFKAKTADLAPAPAPQGPKKKSKKKPTGTSAASAPSDDESADGPSADDDSSDDAADKAAAAPSYLSARWVTAAVTTAVALALAA

SEQ ID NO: 1543 - DNA, 1712 bp, Panicum virgatum
  misc_feature: Ceres Clone ID no. 1726596
  misc_feature: Encodes the peptide sequence at SEQ ID NO. 1544
caccatcatcactccattagtgctctgctctccagtcgctcccctcccggcctcccctagctaagaaaagggccaaattaagctcgccgccgacgggagcagcagctactagctagacagagagcccggagtgatggaccttatgaggccgctggccgtggtggtggcgctgctggccgtgtgggccgccgcggcggaggggttcgacatcctccagatcctgggcaagcaggacgagttctcgcagttctgcaagctgctcaacgagacgcacctggccggcgacatcaaccgagaccgcactatcaccgtgctcgccgtggccaacggcgacatgggacacctcaccagcggccactactcgctcgggaccatccgccacatcctcgagctgcacgtcgtcgccgactactacgacgagaagaagctcaagcagctgtcgcacggcgccaccgccgcatccaccttgttccagcgatccgggtttgcccccggcatggcaggttacgtcaacataacgcagcaccgcggcggcaaggtgacatttatcgtcgatgacgcagccgactccgtgaagccggtcacctttgtcaagcagatcgagagccaccgctacgattactcggtgctccaggtcagcagtgtgctctcctcgccggaggccgaggcgcccgtggccccgccggctcccgtcaacctcaccgacctcctctccaagaagtactgcaagagcttcgcgggccttcttgctgccgacgctaaggccttcgacaccatcaacggaaccaaggacaccgcgctgacgctcttttgccctgtcgacgccgccgtggccgccttcttgcccaagttcaagaacctgacggccaaggccaagacggccatcctgctctaccacgccgtgccggactactactccatgcagttcctcaagtccaataaaggcgaggtgaccacgctcgccaccaccagcgtcgccaagaaggactacacctacgaagcgcagaccgaggctgacaccgtcacgctcgacaccacggtcaccacctctaccatccaggccaccgtcagggacgacgacccgctcgccatctacgccgtctccaagttcctgcagcccaaggagctgtttaagtccaaaaccaaggacctcgcgccggcgcccgcgccagaggaggccaagaagaagaccaagaagaagcccggcagcacctcgacggctgccgcgccctcaggcgacgaagccgcggacggcccggctgccgacaactcagctgacgacgctgcggacaaggccggcgccgcgccgtctccgctcgtccggtgggtcaccgcggttgcgacggtggcagccgtgctggcgctggtggcctaaggtgtgccctgatgtgttatgttttctttttaacttattggaaccctcttcttttctttgtccaattcgtgtcccttgttggtgcagaaaataagaagggtcattttactttatttttatatttattgctgcattctcatggaaaaggggaaaaaaagaggaaagcttagaggtgtgtcagatcatgtagctctttggattgtggtgatcattttgtaatgatagtgatcaatggaattgaagagtgtgtttatatgtgcactacgatgcatcacggagtttagagttgtatactcccaccgttttgctttcggtctgtccaagcttgagctttcgg

SEQ ID NO: 1544 - protein, 413 aa, Panicum virgatum
  misc_feature (197)..(329): Pfam Name: Fasciclin Pfam Description: Fasciclin domain
  misc_feature: Ceres Clone ID no. 1726596
  misc_feature: Bit score of 645.0 for HMM based on sequences of Figure 8
  misc_feature: Functional Homolog Of SEQ ID NO. 1518
MDLMRPLAVVVALLAVWAAAAEGFDILQILGKQDEFSQFCKLLNETHLAGDINRDRTITVLAVANGDMGHLTSGHYSLGTIRHILELHVVADYYDEKKLKQLSHGATAASTLFQRSGFAPGMAGYVNITQHRGGKVTFIVDDAADSVKPVTFVKQIESHRYDYSVLQVSSVLSSPEAEAPVAPPAPVNLTDLLSKKYCKSFAGLLAADAKAFDTINGTKDTALTLFCPVDAAVAAFLPKFKNLTAKAKTAILLYHAVPDYYSMQFLKSNKGEVTTLATTSVAKKDYTYEAQTEADTVTLDTTVTTSTIQATVRDDDPLAIYAVSKFLQPKELFKSKTKDLAPAPAPEEAKKKTKKKPGSTSTAAAPSGDEAADGPAADNSADDAADKAGAAPSPLVRWVTAVATVAAVLALVA

SEQ ID NO: 1545 - DNA, 1629 bp, Panicum virgatum
  misc_feature: Ceres Clone ID no. 1790253
  misc_feature: Encodes the peptide sequence at SEQ ID NO. 1546
accatatcactccattagtgctctgctctcgactcgctcccctcccctagctaagaaagggccaaattaagctcgccgccgacggcagcagcagctacttgctagacagagagcctggagtgatggacctgatgaagccgctggccgtggtggtggctctgctggccgtgtgcgccgccgcggcggagggattcgacatcctccagatcctgggcaagcacgacgagttctcgcagttctgcaagctgctcaatgagacgcacctggccggcgacatcaatcgggaccgcaccatcaccgtgctcgccgtggccaacggcgacatgggacacctcaccagcggccactactcgctcgggaccatccgccacatcctcgagctgcacgtcgtcgccgactactacgacgagaagaagctcaagcagctgtcgcacggcgccaccgccgcatccacgttgttccagcgatccgggtttgcccccggcatggcggggtacgtcaacattacgcagcaccgcggcggcaaggtgacatttatcgtcgatgacgcagccgactccgtgaagccggtcaccttcgtcaagcagatcgaaagccaccgctacgattactcggtgctccaggtcagcagtgtgctctcctccccggaggccgaggcgcccgtggccccgccggctcccgtcaacctcaccgacctcctctccaagaagtactgcaagagcttcgcgggccttcttgctgccgacggcaaggccttcgacaccatcaacggaaccaaggacaccgcgctgacgctcttttgccctgtcgacaccgccgtggcctccttcttgcccaagttcaagaacctgacggccaaggccaagacggccatcctgctctaccacgccgtgccggactactactccatgcagttcctcaagtccaataaaggcaaggtgaccacgctcgccaccaccagcgtcgccaagaaggactacacctacgaagcgcagaccgaggctgacaccgtcacgctggacaccacggtcaccatctccaccatccaggccaccgtcagggacgacgacccgctcgccgtctacgccgtctccaagttcctgcagcccaaggagctgttcaagtccacaaccaaggacctcgcgccggcgcccacgccagagggacccaagaagaagaccaagaaaaagcccagccgcacctcggcggctgccgcaccctcggacgacgaagccgcggatggcccgtctgcggatgactcagttgacgacgcggacaaagccgccggcgccgagcggtccctgctcgcccggtgggtcaccgcggctgcgacgttggcagctgcgctggcgctggcggcctaaggtgggtgctgatatgttatgtttttcttttaatttattggaccctcttcttttctttgtccaattcgtgtcccttgttggtgaagaaaataagaagggccattttactttatttttatatttattgctgcattctcatggaaaaggggaaaaaagagaggaaaacttagaggtgtgtcggatcatgtagctctttggattgttttgttgggttgtggtgatcattttgtaatgacagtgatcaatggaattgaagagtgtgttt

SEQ ID NO: 1546 - protein, 413 aa, Panicum virgatum
  misc_feature (197)..(329): Pfam Name: Fasciclin Pfam Description: Fasciclin domain
  misc_feature: Ceres Clone ID no. 1790253
  misc_feature: Bit score of 624.0 for HMM based on sequences of Figure 8
  misc_feature: Functional Homolog Of SEQ ID NO. 1518
MDLMKPLAVVVALLAVCAAAAEGFDILQILGKHDEFSQFCKLLNETHLAGDINRDRTITVLAVANGDMGHLTSGHYSLGTIRHILELHVVADYYDEKKLKQLSHGATAASTLFQRSGFAPGMAGYVNITQHRGGKVTFIVDDAADSVKPVTFVKQIESHRYDYSVLQVSSVLSSPEAEAPVAPPAPVNLTDLLSKKYCKSFAGLLAADGKAFDTINGTKDTALTLFCPVDTAVASFLPKFKNLTAKAKTAILLYHAVPDYYSMQFLKSNKGKVTTLATTSVAKKDYTYEAQTEADTVTLDTTVTISTIQATVRDDDPLAVYAVSKFLQPKELFKSTTKDLAPAPTPEGPKKKTKKKPSRTSAAAAPSDDEAADGPSADDSVDDADKAAGAERSLLARWVTAAATLAAALALAA

SEQ ID NO: 1547 - protein, 392 aa, Oryza sativa subsp. japonica
  misc_feature (157)..(308): Pfam Name: Fasciclin Pfam Description: Fasciclin domain
  misc_feature: Public GI ID no. 125602970
  misc_feature: Bit score of 611.8 for HMM based on sequences of Figure 8
  misc_feature: Functional Homolog Of SEQ ID NO. 1518
MELLLRRLAVVVAVVALTAATAAEGYNITKILGDHPEYSQFNKLLTETRLAGDINRRRTITVLVVANGDMGALSGGHYTLPTLRHILEMHILVDYYGAKKLHQLARGDTASSSMFQESGSAPGTTGYVNITQHRGGRVSFTAEDAADSATPSSFVKSVKEIPYDLAVLQISKPLSSPEAEAPVAPPGAGEPHRAPVQEDNGLTLFCPVDAAVDAFLPKYKNLTAKGKAAILLYHAVPDYYSLQLLKSNSGKVSTLATASVAKKDYSYDVSNDRDSVLLDTKVNSASVTATVKDADPLAVYAISKFLQPKELFKVTEDLAPAPAPEGPKKKTKKKKPSTTSAAAAPSDDSSAADSPDGTPADDVADKAAAAPSVLARWVTAAATVAAALALAA

SEQ ID NO: 1548 - DNA, 1445 bp, Gossypium hirsutum
  misc_feature: Ceres Clone ID no. 1895671
  misc_feature: Encodes the peptide sequence at SEQ ID NO. 1549
agatccaaccaaccctctcctatcttctccattcccaacccaccatgtcacctgcaaccaccgccctcttcttcctcctcctcctcttctccacctcaaatgcacacaacatcacacgcatactcgccaaacaccctgagttctccaccttcaaccactacctcaccctcactcatttggcttccgagatcaaccgacgcgaaaccattactgttctggccctcaacaatgctgccatgtcatctctcttgtctaaacaactctccctctacaccctcaagaacgtcctctctctccatgtcctcgtcgactacttcggttccaagaagcttcaccagattaccaatggaactgctttgacgtccaccatgttccaggctagtggcgccgctcctggttcctctggctacatcaacatcactgatcttaaaggcggaaaagtcggcttcggggctgaaaacaacgatggaaatctcgatgctgtttacgttaagtccgttgcagagattccttacaacatctctgtcttacaaatcagtcaggttttgaattcagctgaagctgaagccccaaccgcggagccaagcaagcttaatctaacagagataatgtcaaagcaaggatgcaaagcttttgcagatttgcttatctcttcaggagctgatgcaacatttaacgaaaacatcgatgggggtttaacagtgttttgccccaccgaccctgttattaaggatttcatgcccaaatacaagaacttgacagcatccaagaaagcgtccctgctgttgtaccacggcgttcccgtgtatcagtccatgcaaatgctgaaatccaacaacgggattatgaacacattggccactgatggagcaaacaagtatgatttcaccattcaaaacgacggcgaggtgatgacattggagactaaagttatgactgcaaagattacagggactttgaaggatgaagagcctttgattgtttacaaaattaacaaggtattattgcccagggagttgtacaagccagtggaagcgccggctgagtcacccaagccatcaaaatccaaatccaaatccaaacacaaggtagccgatgcaccggaatccgatgcaccagcggagagtgatccagctgatgatcagacggcagataatgacagtggggttgcaggactggacggtaggagattggtgatgatgatgctgagcctgtgcattggggtattgctgatgtgaatacactgatatagaaatatttatcagattgatacaaattgtatgggagacaatactttttaggccattggataacgagaaatgggtccttatttcatgtgagagatttgaaattttcttttcttttaatttctttggtggtttgtgagcaaaagagcaataagtgatgaatcccacttgcatggggtcattttctttattcttttt

SEQ ID NO: 1549 - protein, 397 aa, Gossypium hirsutum
  misc_feature (193)..(322): Pfam Name: Fasciclin Pfam Description: Fasciclin domain
  misc_feature: Ceres Clone ID no. 1895671
  misc_feature: Bit score of 891.6 for HMM based on sequences of Figure 8
  misc_feature: Functional Homolog Of SEQ ID NO. 1518
MSPATTALFFLLLLFSTSNAHNITRILAKHPEFSTFNHYLTLTHLASEINRRETITVLALNNAAMSSLLSKQLSLYTLKNVLSLHVLVDYFGSKKLHQITNGTALTSTMFQASGAAPGSSGYINITDLKGGKVGFGAENNDGNLDAVYVKSVAEIPYNISVLQISQVLNSAEAEAPTAEPSKLNLTEIMSKQGCKAFADLLISSGADATFNENIDGGLTVFCPTDPVIKDFMPKYKNLTASKKASLLLYHGVPVYQSMQMLKSNNGIMNTLATDGANKYDFTIQNDGEVMTLETKVMTAKITGTLKDEEPLIVYKINKVLLPRELYKPVEAPAESPKPSKSKSKSKHKVADAPESDAPAESDPADDQTADNDSGVAGLDGRRLVMMMLSLCIGVLLM

SEQ ID NO: 1550 - protein, 403 aa, Arabidopsis thaliana
  misc_feature (199)..(328): Pfam Name: Fasciclin Pfam Description: Fasciclin domain
  misc_feature: Public GI ID no. 13377778
  misc_feature: Bit score of 871.0 for HMM based on sequences of Figure 8
  misc_feature: Functional Homolog Of SEQ ID NO. 1518
MAYFRRAATALVLIFQLHLFLSLSNAHNITRILAKDPDFSTFNHYLSATHLADEINRRQTITVLAVDNSAMSSILSNGYSLYQIRNILSLHVLVDYFGTKKLHQITDGSTSTASMFQSTGSATGTSGYINITDIKGGKVAFGVQDDDSKLTAHYVKSVFEKPYNISVLHISQVLTSPEAEAPTASPSDLILTTILEKQGCKAFSDILKSTGADKTFQDTVDGGLTVFCPSDSAVGKFMPKFKSLSPANKTALVLYHGMPVYQSLQMLRSGNGAVNTLATEGNNKFDFTVQNDGEDVTLETDVVTAKVMGTLKDQEPLIVYKIDKVLLPREIYKAVKTSAPAPKSSKKKPKNAEADADGPSADAPSDDDVEVADDKNGAVSAMITRTSSVVTAIVGLCFGVWLM

SEQ ID NO: 1551 - DNA, 1423 bp, Gossypium hirsutum
  misc_feature: Ceres Clone ID no. 1929508
  misc_feature: Encodes the peptide sequence at SEQ ID NO. 1552
agtctccacctctgttccaccatgtcgccaccaaaagccgccaccctcttcctcctcttcttcctcttcctcctctcttccaccaccacctcaaatgcacacaacatcacacgcctcctcgccaaatatccccaattctccaccttcaaccactacctcaccaccactcacctggcctcccagatcaaccgacgccaaaccataaccgtcctagccctcgacaacaccgccatgtcgtctctcctggccaagcattactccctctacaccctcaagaacatcatctccctccacgttctcgttgactacttcggttccaagaagcttcaccgcatttccaaaggatcaactttgacttccaccatgttccaggccaccggcaccgcccctggaacttcggggtacgtcaacattactaaccttaaaggcggaaaagttgggttcggggctgaagacaacgagggaaaactcgatgctactttcgttaaatccataaaagagattccttacaatatctccattgtgcaaatcagtcatgctttgaattcagctgaagctgaagcaccaacggcggcaccaagccagcttaacctaacggaaatcatgtcgaagcaaggatgtaaagcttttgcggatttgctgacagcttcgggagccgatgacaaatttaacgaaaacatggatgcgggtttaacggtgttttgcccgaccgacagtgccgtcaaaggtttcatgcccaaatacaagaatctgacggcgtcgaagaaagtgtcgctgctgttgtaccatgggattccggtgttcatgtcgttgcaaatgctgaagaccaacaatggagttatgaacacgttggcaacggatggagcgaacagctacgatttctcggtgagcaacgaagacgaggtggtgtccttggatacgactgtcgtgaccgccaaggttttggggattttgaaagaggaagagccgttgattgtgttcaaaatcaataaggtgttgatgccaaaggagctgttcaagccggtggtagcgaaggaggcaaatgcgccggaggcagatgcaccggcggacagcgagccggctgatgcggaagataacactaatggggttcaaggattgggcggtgggagattggtaatgttggtgttgagcttgtggattgggatattgttgatatgattgattcaaattgcaacacagaacacacaatcgggtcttaattcatgtgaaaatatttggatatttccagcaataagtgatcagtcccacttccatgctcttctttttcttatcattattttggttgaatagatatagagttatgatgcacattgtttgagctgtaaatgcatttttctttttgtattgtttacaaataaaatggcccatgcaaggctgtaaatccaattttctttttaaattt

SEQ ID NO: 1552 - protein, 385 aa, Gossypium hirsutum
  misc_feature (199)..(328): Pfam Name: Fasciclin
  misc_feature: Ceres Clone ID no. 1929508
  misc_feature: Bit score of 733.3 for HMM based on sequences of Figure 8
  misc_feature: Functional Homolog Of SEQ ID NO. 1518
MSPPKAATLFLLFFLFLLSSTTTSNAHNITRLLAKYPQFSTFNHYLTTTHLASQINRRQTITVLALDNTAMSSLLAKHYSLYTLKNIISLHVLVDYFGSKKLHRISKGSTLTSTMFQATGTAPGTSGYVNITNLKGGKVGFGAEDNEGKLDATFVKSIKEIPYNISIVQISHALNSAEAEAPTAAPSQLNLTEIMSKQGCKAFADLLTASGADDKFNENMDAGLTVFCPTDSAVKGFMPKYKNLTASKKVSLLLYHGIPVFMSLQMLKTNNGVMNTLATDGANSYDFSVSNEDEVVSLDTTVVTAKVLGILKEEEPLIVFKINKVLMPKELFKPVVAKEANAPEADAPADSEPADAEDNTNGVQGLGGGRLVMLVLSLWIGILLI

SEQ ID NO: 1553 - DNA, 1221 bp, Populus balsamifera subsp. trichocarpa
  misc_feature: Ceres Annot ID no. 1494487
  misc_feature: Encodes the peptide sequence at SEQ ID NO. 1554
atgcagcttactgtactcctttctctactttttctcctctccaccgccaccaccatcacttatggccacaacattacttccatactaggccagcacccatctctctccactttcaatcactacctcaccctaacccacctcgccggagaaatcaatcggcgtacaaccatcaccgtctgtgccgtcgacaacgcagccatgtctgaaatcctttcaaaaaagccatcaatctccaccatcaaaaacatcctttccctccacgtcctcttggattacttcggtaccaagaagctccaccagataagagacggcaccgcgttggcagccaccatgttccaggccaccgggtcagctcctgggtctaccgggttcgttaacataacggatgttaaaggagggaaagtggcttttggaccgaaagataatggagggaaccttgatgtgttttatgtcaagtctgtagaggagataccctacaacatttcagttatacagatcagtaagttgttgccatcggatgtggcggcggcgcccacaccagagccaagtgctatgaatataacggatataatgtcagctcatgggtgtaaggtttttgctgatactttgattgcaaaccctgatgcttcaaagacatatcaggacactattgatggaggattaacagtgttttgccctcttgacgatccatttaaggcctttttaccaaaattcaagaatttaacagcttctggcaaagagtcactccttcaattcttcggtgttcctgtttatcagtcattagcaatgttaaaatccaacaatggaatcatgaacaccttagctacaaatggggataagaagtttgatttcacagtgcaaaatgatggcgaggatgtgaccctcaagacaaggggtaccactgcaaaaatagttgggactttgatcgatgagcagccacttgctatatactccattgataaggtcttgttgcccaaggaattgtttaaagcagcactgaccccagctccagcacctgccccggaggaggtggcagatgcaccaaaatctagcaagcataagaagccctccgccgatgatgcgccatcagactcaccagctgattcacctgatggcgacgcagcagaccaaacagctgataacaatgctagtgtgagacttgatggtggaagacttgttgccatggtattgagtttgtgcttagggcttttgatgctgtag

SEQ ID NO: 1554 - protein, 406 aa, Populus balsamifera subsp. trichocarpa
  misc_feature (195)..(325): Pfam Name: Fasciclin Pfam Description: Fasciclin domain
  misc_feature: Ceres Annot ID no. 1494487
  misc_feature: Bit score of 755.4 for HMM based on sequences of Figure 8
  misc_feature: Functional Homolog Of SEQ ID NO. 1518
MQLTVLLSLLFLLSTATTITYGHNITSILGQHPSLSTFNHYLTLTHLAGEINRRTTITVCAVDNAAMSEILSKKPSISTIKNILSLHVLLDYFGTKKLHQIRDGTALAATMFQATGSAPGSTGFVNITDVKGGKVAFGPKDNGGNLDVFYVKSVEEIPYNISVIQISKLLPSDVAAAPTPEPSAMNITDIMSAHGCKVFADTLIANPDASKTYQDTIDGGLTVFCPLDDPFKAFLPKFKNLTASGKESLLQFFGVPVYQSLAMLKSNNGIMNTLATNGDKKFDFTVQNDGEDVTLKTRGTTAKIVGTLIDEQPLAIYSIDKVLLPKELFKAALTPAPAPAPEEVADAPKSSKHKKPSADDAPSDSPADSPDGDAADQTADNNASVRLDGGRLVAMVLSLCLGLLML

SEQ ID NO: 1555 - protein, 407 aa, Vitis vinifera
  misc_feature (197)..(326): Pfam Name: Fasciclin Pfam Description: Fasciclin domain
  misc_feature: Public GI ID no. 147798736
  misc_feature: Bit score of 735.0 for HMM based on sequences of Figure 8
  misc_feature: Functional Homolog Of SEQ ID NO. 1518
  misc_feature (5)..(5): Xaa is any aa, unknown, or other
  misc_feature (23)..(23): Xaa is any aa, unknown, or other
  misc_feature (226)..(226): Xaa is any aa, unknown, or other
MQHAXVFTRLLTLSVCLLFLSCXTHAHNITHILAKYPEFSTFSHYLTVTHLAGEINRRQTITVLAVSNAGMADLLSKHLSVYVIKNVLSLHVLVDYFGARKLHQITDGTASSATLFQSTGSAPGTAGFVNITDLKHGKVGFGAQDSGHLNAYFVKSVVEIPYNISVLEISQILTSAVAEAPAEAPSLNLTIMLSKQGCKAFGDLLEASGAIKTFEENADGGLTVFXPSDDVIKGFMPKYKNLTAAGKVSLLLYHGIPIYQSMQMLKSSNGLTNTLATDGAKKYDFTVQTEGEDITLETKVVTARVTGTVLDQEPVVLYKINKVLLPRELFKGTVEDDEAESPKAASPKSSKKSKDDTADSPDADSPESDDSEDSTADQDDENSGGRFDGGRWASVLLTVFAGAFVLF

SEQ ID NO: 1556 - DNA, 1236 bp, Solanum lycopersicum
  misc_feature: Ceres Annot ID no. 8461260
  misc_feature: Encodes the peptide sequence at SEQ ID NO. 1557
atgcagcttccgtcgtcggccaccgtggctgcggtggttctctccgtagtcctttttatttgtgccactgaagctcataacattactcacattctagccgaccataaacagttctccactttcaaccattacttaacaactacacacctcgccgctgaaattaaccgccggcaaaccatcactgtttgtgctgtagataatgccggaatgtcagatctactctccaaacaactatctatctacactataaaaaacgttctctcttttcacgtgcttctcgattacttcgacgctaaaaagcttcaccagattactaacggcacggcacttgccgccacaatgtttcaagctaccggctcagctaccggatcttctggattcgtaaacattactgatctaagaggaggtaaagtcgggctcagtccggctgattacaacggtcctcctccggctaaatttgtaaaatcaatcgccgagattccttacaacatctccgttattcaaataagtacgattttaccctcagacgaagctgaagctccgactccaggaccaagccaaatgaatctcacttctctaatgtcagctaaaggctgcaaagttttcgccgagactctattagcttctccggctgaaaaaacgtttgaggataacgttgatggcggagtaacaatattttgtccacgagatgatgcaatgaagaaatttttgcctaaatttaagaatttaacagcggaagggaagcaatcactgctcgaatatcatggaattcctatataccaatcgatttcgaatttgaaatcgaataatggagatatgaacactttagctactgacggagctaagaagtacgctgtagtcattcaaaatgacggtgaagatgttactataaaaacgaaaattgtgacggcgaagatcacggctactgtggttgataaactgccattagcgatttactcgcttgataaggtgttattacccgaggaattgttcaaggctagtcctactccggcgccggcgccggcaccggaggcacgtgctgaatctcctaagcactccaagtcaccaccggcacctgcatctccggctgagtctccagcggattctccggcggatggtcccaacggtgatgctgatgatttgacagatagcggtgctgttaagtacaatgccggagcatcacttgccgccgttttcagtttatggtttgccttcaacgtgttgatggaagtttga

SEQ ID NO: 1557 - protein, 411 aa, Solanum lycopersicum
  misc_feature (198)..(327): Pfam Name: Fasciclin Pfam Description: Fasciclin domain
  misc_feature: Ceres Annot ID no. 8461260
  misc_feature: Bit score of 693.4 for HMM based on sequences of Figure 8
  misc_feature: Functional Homolog Of SEQ ID NO. 1518
MQLPSSATVAAVVLSVVLFICATEAHNITHILADHKQFSTFNHYLTTTHLAAEINRRQTITVCAVDNAGMSDLLSKQLSIYTIKNVLSFHVLLDYFDAKKLHQITNGTALAATMFQATGSATGSSGFVNITDLRGGKVGLSPADYNGPPPAKFVKSIAEIPYNISVIQISTILPSDEAEAPTPGPSQMNLTSLMSAKGCKVFAETLLASPAEKTFEDNVDGGVTIFCPRDDAMKKFLPKFKNLTAEGKQSLLEYHGIPIYQSISNLKSNNGDMNTLATDGAKKYAVVIQNDGEDVTIKTKIVTAKITATVVDKLPLAIYSLDKVLLPEELFKASPTPAPAPAPEARAESPKHSKSPPAPASPAESPADSPADGPNGDADDLTDSGAVKYNAGASLAAVFSLWFAFNVLMEV

SEQ ID NO: 1558 - protein, 414 aa, Gossypium hirsutum
  misc_feature (197)..(327): Pfam Name: Fasciclin Pfam Description: Fasciclin domain
  misc_feature: Public GI ID no. 157273654
  misc_feature: Bit score of 778.3 for HMM based on sequences of Figure 8
  misc_feature: Functional Homolog Of SEQ ID NO. 1518
MQRRHPLLLLLIFSVFLSFQTSNGHNITRLLAKHPSLSTFNHYLTLTHLAQEINRRTTITVLALDNAAMSSLLNKNPSIYTMKNVLSLHVLLDYFGAKKLHQITNGTALAATMFQATGVAPGVSGFVNITDFKGGKVGFGAEDNGGDLDSFFVKSVEELPYNISVIQISKALPSAIAEAPTPGPSELNITGIMSAHGCKVFAGTLLANPEAMGTYEDNLNGGLTVFCPLDDAFKAFLPKYKNLTASGKESFLEFFGVPVYQSLSMLKSNNGLMNTLATDGASKFDFTVQNDGEQVTLKTKINTVKITGTLLDEQPVAIYTIDKVLMPRELFKAAPTPAPAPAPEEAADAPKASKSKSKSKSKSKSAPTPESDAPADSPDDDPADQTADDNAASSFKGGRFVAVGLSFLLVFLLL

SEQ ID NO: 1559 - DNA, 1541 bp, Gossypium hirsutum
  misc_feature: Ceres Clone ID no. 1884727
  misc_feature: Encodes the peptide sequence at SEQ ID NO. 1560
ctctgtaaccctttccttcccctcatccaaaccacaaaaacacacaactcagagaagagaaggggaagggaaacaacaatgatggggcaaaggcaacacgttgtccttctcattttctcagcttttcttctcttccaaacctcaaacgcccataatattacacgtctacttgcaaagcacccctctttgtccacattcaatcattacctcaccctcactcacttagctcccgagatcaaccgccgcaccaccatcactgtccttgccttagacaacgccgccatgtcttccctcttggataaaaacccttccatttacaccatcaagaacatcctttcccttcatgtcctccttgactactttggtgccaagaagcttcaccaaataaggaatggtactgcactagctgctactatgttccaagctactggtgtggctcctggggtttctgggtttgttaatataaccgattttaaaggtgggaaagttggttttggagctgaagacaatggtggaagtttgaattctttttttgttaaatctgtggaggaacttccttacaatatatctgtgattcagatcagcaaggctttgccttctgttgtagctgaggctcctactccagggccaagtgagctgaatatcactggcattatgtcagcacatgggtgtaaagtgtttgctgatacccttttggctaaccctgaagccatgagaacatatgaggataatgttaatggaggattgactgtgttctgccctatggatgatccattcaaagcctttttaccaaagtacaagaacttgacagcttctaagaaagcatctttcctcgaattctttggtgtgcctgtgtaccaatctttgtccatgttgaagtccaacaatggactcatgaacacattagctaccgacggagccagcaagttcgatttcactgtgcaaaacgagggtgaagaggtgacactaaagaccagggttaacactgtcaaaataaccgggactctgatcgacgagcagccggtagcaatttatacaattgataaagtgttgatgcctaaagaattgttcaaggcagctcttagtccagccccagcccctgccccagaggaggcagcagatgcaccaaagggatctaaatccaaaaccaagtccaagtctaagactaagtctaaggcagcaccaacaccggattcagactcaccagctgagtcaccagatgatgacccagctgatcaggtagctgatgatgataatgctgctatgtgttttggggctgaaaggcttgctgttgttggattgagcttcttgttagtgtttttcttgctgtaagtgatgcctgatatgaggctaacttattagtcgccatcagtgtggttactccttttttcttttggtactgtttgttttgtagtgtgtgatgagtatttttgtggtgttatattcgctgagtaaatgcaaattgtgatgttagttgatagcaattaagttttgttagtatgattttccttttgaactttaaaagtaacaaaatgttatgg

SEQ ID NO: 1560 - protein, 416 aa, Gossypium hirsutum
  misc_feature (196)..(326): Pfam Name: Fasciclin Pfam Description: Fasciclin domain
  misc_feature: Ceres Clone ID no. 1884727
  misc_feature: Bit score of 768.4 for HMM based on sequences of Figure 8
  misc_feature: Functional Homolog Of SEQ ID NO. 1518
MGQRQHVVLLIFSAFLLFQTSNAHNITRLLAKHPSLSTFNHYLTLTHLAPEINRRTTITVLALDNAAMSSLLDKNPSIYTIKNILSLHVLLDYFGAKKLHQIRNGTALAATMFQATGVAPGVSGFVNITDFKGGKVGFGAEDNGGSLNSFFVKSVEELPYNISVIQISKALPSVVAEAPTPGPSELNITGIMSAHGCKVFADTLLANPEAMRTYEDNVNGGLTVFCPMDDPFKAFLPKYKNLTASKKASFLEFFGVPVYQSLSMLKSNNGLMNTLATDGASKFDFTVQNEGEEVTLKTRVNTVKITGTLIDEQPVAIYTIDKVLMPKELFKAALSPAPAPAPEEAADAPKGSKSKTKSKSKTKSKAAPTPDSDSPAESPDDDPADQVADDDNAAMCFGAERLAVVGLSFLLVFFLL

SEQ ID NO: 1561 - DNA, 1227 bp, Populus balsamifera subsp. trichocarpa
  misc_feature: Ceres Annot ID no. 1466294
  misc_feature: Encodes the peptide sequence at SEQ ID NO. 1562
atgcagcggcttactatactcctttctctacttttcctcctctccacttccaccaccttcactcgtggccacaatattactcatatacttggcaagcacccatctttctccactttcaaccactacctcaccctaacccacctcgccggagaaatcaacagccgaaacaccatcaccgtctgcgccgtcgacaacgcagcgatgtctgaactcctttcaaaacacccatcaatcgccaccatcaaaaacatcctttccctccatgtcctcttggattacttcggcaccaagaaactccaccagatacgagagggcacggcgttggcagccaccatgttccaggccaccgggtcggctcctgggtcgaccggattcgttaacataacggatgttaagggagggaaagtggcttttggacctgaggataatgaagggaatcttgatgtcttttatgtcaagtctttggaggagataccttacaacatctccgttatacagatcagtaaggtgttgccgtcggacgtggcagcggcgcctacaccagagccaagtgctatgaatataacagatataatgtcagctcatgggtgtaaggtttttgctgacactttgattgcaaatcctgaagcttcaaagacatatcaggacagtgttgatggaggattaacagtgttttgccctctcgacgatccattcaaggcctttttccctaaattcaagaatttaacagcttctggcaaagtgtcatttcttgaattcttcggtgtccctatttatcagtccttagctatgttaaaatccaacaatggaatcatgaacactttagctacagatggcgaaaagaagtttgatttcacagttcaaaatgatggtgaggatgtgacactcaagaccaggagtatcactgcaaaaatagttgggactttgatcgacgaacagccactagctatatataccattgataaggtcttgctgccgaaggaattgtttaaagcagcaccaacaccagctccagcgcccgccccggagaaggaggtggctgatgcaccaaaatctagcaaacataagaagccatcctccgatgttgttccatcagactcaccggccgattcacctgatggcgacctagcagatcaaacagctgatgacaatgctagtgtgacattatatggtggaagacttgttgccatgttattgagtttgtgctcagggcttttgctgctgtga

SEQ ID NO: 1562 - protein, 408 aa, Populus balsamifera subsp. trichocarpa
  misc_feature (196)..(326): Pfam Name: Fasciclin Pfam Description: Fasciclin domain
  misc_feature: Ceres Annot ID no. 1466294
  misc_feature: Bit score of 761.4 for HMM based on sequences of Figure 8
  misc_feature: Functional Homolog Of SEQ ID NO. 1518
MQRLTILLSLLFLLSTSTTFTRGHNITHILGKHPSFSTFNHYLTLTHLAGEINSRNTITVCAVDNAAMSELLSKHPSIATIKNILSLHVLLDYFGTKKLHQIREGTALAATMFQATGSAPGSTGFVNITDVKGGKVAFGPEDNEGNLDVFYVKSLEEIPYNISVIQISKVLPSDVAAAPTPEPSAMNITDIMSAHGCKVFADTLIANPEASKTYQDSVDGGLTVFCPLDDPFKAFFPKFKNLTASGKVSFLEFFGVPIYQSLAMLKSNNGIMNTLATDGEKKFDFTVQNDGEDVTLKTRSITAKIVGTLIDEQPLAIYTIDKVLLPKELFKAAPTPAPAPAPEKEVADAPKSSKHKKPSSDVVPSDSPADSPDGDLADQTADDNASVTLYGGRLVAMLLSLCSGLLLL

SEQ ID NO: 1563 - protein, 417 aa, Gossypium hirsutum
  misc_feature (197)..(327): Pfam Name: Fasciclin Pfam Description: Fasciclin domain
  misc_feature: Public GI ID no. 157273656
  misc_feature: Bit score of 767.2 for HMM based on sequences of Figure 8
  misc_feature: Functional Homolog Of SEQ ID NO. 1518
MMGQRQHVVLLIFSAFLLFQTSNAHNVTRLLAKHPSLSTFNHYLTLTHLAPEINRRTTITVLALDNAAMSSLLDKNPSIYTIKNILSLHVLLDYFGAKKLHQIRNGTALAATMFQATGVATGVSGFVNITDFKGGKVGFGAEDNGGSLNSFFVKSVEELPYNISVIQISKALPSVVAEAPTPGPSELNITGIMSAHGCKVFADTLLANPEAMGTYEDNVNGGLTVFCPMDDPFKAFLPKYKNLTASKKASFLEFFGVPVYQSLSMLKSNNGLMNTLATDGASKFDFTVQNEGEEVTLKTRVNTAKITGTLIDEQPVAIYTIDKVLLPKELFKAALSPAPAPAPEEAADAPKGSKSKTKSKSKTKSKAAPTPDSDSPAESPDDDPADQVADDDNAAMCFGAERLAVVGLSFLLVFFLL

SEQ ID NO: 1564 - protein, 426 aa, Vitis vinifera
  misc_feature (235)..(364): Pfam Name: Fasciclin Pfam Description: Fasciclin domain
  misc_feature: Public GI ID no. 157351001
  misc_feature: Bit score of 703.1 for HMM based on sequences of Figure 8
  misc_feature: Functional Homolog Of SEQ ID NO. 1518
MPTKGHYIHCHHCRAPLPLNSLLHSSHHHLPIFILTGKMQHAPVFTRLLTLSVCLLFLSCATHAHNITHILAKYPEFSTFSHYLTVTHLAGEINRRQTITVLAVSNAGMADLLSKHLSVYVIKNVLSLHVLVDYFGARKLHQITDGTASSATLFQSTGSAPGTAGFVNITDLKHGKVGFGAQDSGHLNAYFVKSVVEIPYNISVLEISQILTSAVAEAPAEAPSLNLTIMLSKQGCKAFGDLLEASGAIKTFEENADGGLTVFCPSDDVIKGFMPKYKNLTAAGKVSLLLYHGIPIYQSMQMLKSSNGVTNTLATDGAKKYDFTVQTEGEDITLETKVVTARVTGTVLDQEPVVLYKINKVLLPRELFEGTVEDDEAESPKAASPKSDDSEDSTADQDDENSGGRFDGGRWASVLLTVFAGAFVLF

SEQ ID NO: 1565 - protein, 494 aa, Vitis vinifera
  misc_feature (201)..(330): Pfam Name: Fasciclin Pfam Description: Fasciclin domain
  misc_feature: Public GI ID no. 157353205
  misc_feature: Bit score of 760.9 for HMM based on sequences of Figure 8
  misc_feature: Functional Homolog Of SEQ ID NO. 1518
MQLLPGSARTLMLSLSALLLLLCCATEAHNITSILAKNPEFSTFNHYLTVTHLANEINLRETITVCAVDNPGMSDLLAKGLSIYAIKNVLSLHILLDYFGAKKLHQITNGTALAATMYQATGSAPGSSGFVNITDLKGGKVGFGAGGNDGDLTATFVKSVEEIPYNISVIQISKILPSEEAEAPTPGPSEQNLTALMSAHGCKVFADTLVASDAQKTYEDNLEGGLTVFCPMDDVFKSFLPKYKNLTADGKLSLLLYHGIPVYQSLSLLKSSNGVMNTLATDGAKKYDFTVQNDGEVVTLKTKIVTARITGTLLDEQPLGIFTIDKVLLPKELFKAEAPAPAPAPAPEADAPTTKKSSPPAPVSPAEAPNEDPADQTADDNGSVRYNGGRFVALLLSSSLGLLVLSRITSETPTKVRYLLEGSSSRIRRNMAPRVKVQRKVTAPLQKTKRGAEVKEQSSFDWEDIHKVLEDHKGSIEPEQEGYSLDLVSMVMPV

SEQ ID NO: 1566 - DNA, 1601 bp, Arabidopsis thaliana
  misc_feature: Ceres Clone ID no. 257067
  misc_feature: Encodes the peptide sequence at SEQ ID NO. 1567
actttaagctcttcttcactcacactctctcaaaaatcaccaaacgaaactcttcactctctccaacaatggccaagaagatgagttctctcatcatcatcttcaacattctccttctcctcacaactcaaacccacgcgcacaacgtcacgcgcctcctagcaaaccacccatcattctcttccttcagccatttcctaacacaaacacacctcgccgacgaaatcaaccggagaagaaccataaccgtttgcgcagtagataacgccgccatgtcagcattaacctctaaaggctatacactctcaactctcaaaaacattctctccctccacgtccttttagattacttcggaaccaaaaaactccaccagatccgtgacggctctgctctcgccgctactctgtttcaagccaccggagctgctcctggaacctcaggattcgttaacataacggatctgagaggtggtaaagttgggtttggtcctgacggtggagatctgtcttctttctttgttaaatctattgaagaagttccgtataacatctccattattcagatcagtagagttttaccgtcggagactgcggcggctccgactcctgctccggcggagatgaatcttaccggaataatgtcggctcatggatgcaaagtgtttgctgagactcttctcactaaccctggagcttcaaaaacctatcaggagagtttagaaggaggcatgacagtgttctgtccaggagatgatgcaatgaaaggtttcttgcccaaatacaagaacttgacagctccaaagaaagaagcatttctcgatttcctcgctgtcccgacatattactcaatggcgatgctcaaatccaacaatggtccgatgaacacacttgcgacagatggagctaacaagtttgagcttactgtacagaacgatggagagaaggttaccctcaagacaaggatcaacactgtcaagatcgttgatactcttattgatgagcagcctttagctatatatgcgactgataaggttttgttgcctaaagagttgtttaaggcttcggctgttgaagctccggctcctgctccggcaccagaggatggtgatgttgcggattctccaaaagcggctaaagggaaagcgaaaggaaagaagaagaaggctgcaccgtcgccagataatgatccttttggtgactcggattcgcctgccgaagggcctgacggagaggccgatgatgcgacggcagatgatgcttgtgcggttaggatcatcggaggagctaaggctggtttggtggtgagcttgctctgcttgtttgcttcttcttggcttctatagtttcacttcttgtttcttcgattcttccatgttttttttttttttgtgaatcttttatttatggtttttgggggagagtaaatgaggattatttatttccctctattgttgagtttttttatttatttaaaagttggttgtcgaattaaatagtcggtagtttatatatttgtgtgttcttgtttcacgtgtttgtttagttgatgatgtaaacaagtcctgattttggtgatcttgtcatatttttcttgtttttgt

SEQ ID NO: 1567 - protein, 424 aa, Arabidopsis thaliana
  misc_feature (195)..(325): Pfam Name: Fasciclin Pfam Description: Fasciclin domain
  misc_feature: Ceres Clone ID no. 257067
  misc_feature: Bit score of 701.9 for HMM based on sequences of Figure 8
  misc_feature: Functional Homolog Of SEQ ID NO. 1518
MAKKMSSLIIIFNILLLLTTQTHAHNVTRLLANHPSFSSFSHFLTQTHLADEINRRRTITVCAVDNAAMSALTSKGYTLSTLKNILSLHVLLDYFGTKKLHQIRDGSALAATLFQATGAAPGTSGFVNITDLRGGKVGFGPDGGDLSSFFVKSIEEVPYNISIIQISRVLPSETAAAPTPAPAEMNLTGIMSAHGCKVFAETLLTNPGASKTYQESLEGGMTVFCPGDDAMKGFLPKYKNLTAPKKEAFLDFLAVPTYYSMAMLKSNNGPMNTLATDGANKFELTVQNDGEKVTLKTRINTVKIVDTLIDEQPLAIYATDKVLLPKELFKASAVEAPAPAPAPEDGDVADSPKAAKGKAKGKKKKAAPSPDNDPFGDSDSPAEGPDGEADDATADDACAVRIIGGAKAGLVVSLLCLFASSWLL

SEQ ID NO: 1568 - DNA, 1693 bp, Panicum virgatum
  misc_feature: Ceres Clone ID no. 1900097
  misc_feature: Encodes the peptide sequence at SEQ ID NO. 1569
atagagacaagtaccctcaccatggtgagcattagaatgaatacgtactaatcaccgtcacaaagccacaccatggataaataaacacctcacagaaaagaattttgaacgtcctcccctgtctataagtactcatcttgtacaacctcaatgtgccgcaccaccctccacagcacacattaagcacaagcacaagctagcaagagctgcgtgtagctgcgccaaagccaccatggtgaaaatcaccgtaacaaggaaatcccagtccttcgtcgtgccggcatccgagccggcgccgccgtcggccgagacgacgacgctcgagctgtcggcgatcgaccgcgtgccgggccttcgccacacggtgcggtcactgcacgtgttccacaacaagaagaagtcctccaccaccggctgcggcgacgacgacgacgatgctgccaggccgggggaggtgatccgcgcggcgctgtcccgcgcgctggtggattaccgcccgttcgccggccgcttcgtcggctcggtcgccgccggggaggcctgcgtcgagtgcaccgacgacggcgcgtggttcgtggaggccgtcgccgactgcagcctcgaggacgtgaatggcctcgactacccgctcctggtctccgaggaagagctgctgcccgctccagaggaaggcgttgaccctacaagtattccggtcatgatgcaggttacagaatttgcatgtggaggatttgtggtcgggctggtagcagtccacacacttgcagatgggctgggtgcagcccaattcatcaacgcaatttctgagtttgctcgtggaatggagaagcccacagtagcacccatatgggctcgggctttaataccgaacccacccaaactgcttcctggggcaccaccatccttccattccttcgggttccaacacttcaccatggatgtgacctctgacctcattgccaatgttaagacccagtaccatcaggccacaggacagtactgttccagctttgatgttgccattgccaaggtttggcaagcaagaaccaaggcactcaggtacaacttggagtcccaagttcatgtctgcttcttcgccaacacccgccacctcctcactcaggtgctgcctaagaatgggggcttctatggtaactgcttctatccagtttctgtgacggctactgctgaggaggttgtcactgctgggttgcttgatgtgataaggatgataaggaatgggaaggctaggcttcccctggagttttccaagtgggcagcaggggatgcgagtgtggatccataccagttgacatttgagcacaatgtgttgtttgtgtctgattggacaaggcttgggttctttgaggttgactatgggtggggtgcaccaaaccatattgtaccattcacttatgcagactacatggcagtggcggttcttggggctccaccttcaccgaagaagggaactcgcatcatgacgcagtgtgtggaggagaagcatctcatggacttcaaggatgagatgaaggccttcttttaggggcttgtcatgtatctttagtgtgccaatgctatgtgtctctgtttatgtatatgatcgatcagaataaaattgttgttgaccagtttctgtcataagaaatgtaacattactgtctacagagttatattaagccatgattcatac

SEQ ID NO: 1569 - protein, 437 aa, Panicum virgatum
  misc_feature (4)..(436): Pfam Name: Transferase Pfam Description: Transferase family
  misc_feature: Ceres Clone ID no. 1900097
  misc_feature: Bit score of 1206.0 for HMM based on sequences of Figure 44
  misc_feature: Functional Homolog Of SEQ ID NO. 1569
  misc_feature: in Figure 44
MVKITVTRKSQSFVVPASEPAPPSAETTTLELSAIDRVPGLRHTVRSLHVFHNKKKSSTTGCGDDDDDAARPGEVIRAALSRALVDYRPFAGRFVGSVAAGEACVECTDDGAWFVEAVADCSLEDVNGLDYPLLVSEEELLPAPEEGVDPTSIPVMMQVTEFACGGFVVGLVAVHTLADGLGAAQFINAISEFARGMEKPTVAPIWARALIPNPPKLLPGAPPSFHSFGFQHFTMDVTSDLIANVKTQYHQATGQYCSSFDVAIAKVWQARTKALRYNLESQVHVCFFANTRHLLTQVLPKNGGFYGNCFYPVSVTATAEEVVTAGLLDVIRMIRNGKARLPLEFSKWAAGDASVDPYQLTFEHNVLFVSDWTRLGFFEVDYGWGAPNHIVPFTYADYMAVAVLGAPPSPKKGTRIMTQCVEEKHLMDFKDEMKAFF

SEQ ID NO: 1570 - DNA, 1442 bp, Zea mays
  misc_feature: Ceres Clone ID no. 347043
  misc_feature: Encodes the peptide sequence at SEQ ID NO. 1571
acccacacctacacctacacattacagccagtactgctgtcacctcacttagcaaagctaatacgtatgtcatagcagcttgccaccatggcgagcatcaccgtgacaaggaaatcccaatccttcgtcgtgccatcgtccacgccaactccgacgaccgagacgctcgagttgtcggccatcgaccgcgttccaggcctgcgccacacggtgcgatccctgcacgtgttccgccgcaaggacgccgccgcctccgccgcccactacgatgctgctgccgccggcaggccggccgaggtgatccgcgcggcgctgtcccgcgcgctggtggactaccgcccgttcgccggccgtttcgtcggctcactgtacgccggggaggcgagcgttgagtgcaccgacgacggtgcgtggttcgtggacgctgtcacagattgcagcctcgaggacgtgaacggcctcgactacccgcttatggtctccgaggaagagctgctgccggctccagaggaaggtgttgacccaaccagtattccgattatgatgcaggtcacggaatttgcttgtggaggatttgtggtggggctagtcgcagtgcacacccttgctgacgggctcggtgcagctcaattcatcaatgcaatttctgagtttgcccgtggagtagttaaacctacaatagcacctatatgggcacgggagttaataccaaacccacctaaaatgcctcctgggccaccaccatccttcgagtgcttcgggttcaaacattttgttatggatgtggcagttaacaatattgcacatgtcaagagtgaatactttcaaaccaatggacactattgctctacatttgatgttgccattgccaaggtttggcaagctaggacaagggcaatcaagtacgaaccaaatttcaaggtgcatgtttgcttctttgccaacactcgccacctcctcacacatgtgctacccaaggttggtggcttctatggaaattgcttctatccagtgactgtcacagcaactgctgaggtagttgctagttcaagattgcttgatgtgattaggatgataagggatgggaaggctaggcttcctttagagttttccagatggtccacgggcaatgtgaaagtagacccatatcaactaacattcaagcacaatgttctatttgtgtccgattggacacggcttggattctttgaagttgactatgggtggggtgtaccaaaccatatcctccctttcacttatgcagactacatggctgtagcagttcttggggctccaccgtctatgaagaaggggactcgaataatgacacaatgtgtcgaggaggagcatctcgtggacttcaaggccgagatgaaagccttcttttaggtcctcggattttacttgaaagttcaaacattatgcatttatgtgttcaattc

SEQ ID NO: 1571 - protein, 433 aa, Zea mays
  misc_feature (4)..(432): Pfam Name: Transferase Pfam Description: Transferase family
  misc_feature: Ceres Clone ID no. 347043
  misc_feature: Bit score of 1184.9 for HMM based on sequences of Figure 44
  misc_feature: Functional Homolog Of SEQ ID NO. 1569
  misc_feature: in Figure 44
MASITVTRKSQSFVVPSSTPTPTTETLELSAIDRVPGLRHTVRSLHVFRRKDAAASAAHYDAAAAGRPAEVIRAALSRALVDYRPFAGRFVGSLYAGEASVECTDDGAWFVDAVTDCSLEDVNGLDYPLMVSEEELLPAPEEGVDPTSIPIMMQVTEFACGGFVVGLVAVHTLADGLGAAQFINAISEFARGVVKPTIAPIWARELIPNPPKMPPGPPPSFECFGFKHFVMDVAVNNIAHVKSEYFQTNGHYCSTFDVAIAKVWQARTRAIKYEPNFKVHVCFFANTRHLLTHVLPKVGGFYGNCFYPVTVTATAEVVASSRLLDVIRMIRDGKARLPLEFSRWSTGNVKVDPYQLTFKHNVLFVSDWTRLGFFEVDYGWGVPNHILPFTYADYMAVAVLGAPPSMKKGTRIMTQCVEEEHLVDFKAEMKAFF

SEQ ID NO: 1572 - protein, 432 aa, Oryza sativa subsp. japonica
  misc_feature (4)..(431): Pfam Name: Transferase Pfam Description: Transferase family
  misc_feature: Public GI ID no. 115462965
  misc_feature: Bit score of 1180.6 for HMM based on sequences of Figure 44
  misc_feature: Functional Homolog Of SEQ ID NO. 1569
  misc_feature: in Figure 44
MVAVTVMRKSRNFVGPSPPTPPAEITTTLELSSIDRVPGLRHNVRSLHVFRRHKNSGPVVDGDSRRPAAVIRAALARALADYPAFAGRFVGSLLAGDACVACTGEGAWFVEAAADCSLDDVNGLEYPLMISEEELLPAPEDGVDPTSIPVMMQVTEFTCGGFILGLVAVHTLADGLGAAQFITAVAELARGMDKLRVAPVWDRSLIPNPPKLPPGPPPSFQSFGFQHFSTDVTSDRIAHVKAEYFQTFGQYCSTFDVATAKVWQARTRAVGYKPEIQVHVCFFANTRHLLTQVLPKDGGYYGNCFYPVTVTAIAEDVATKELLDVIKIIRDGKARLPMEFAKWASGDVKVDPYALTFEHNVLFVSDWTRLGFFEVDYGWGTPNHIIPFTYADYMAVAVLGAPPMPKKGTRIMTQCVENKCIKEFQDEMKAFI

SEQ ID NO: 1573 - DNA, 1524 bp, Triticum aestivum
  misc_feature: Ceres Clone ID no. 615256
  misc_feature: Encodes the peptide sequence at SEQ ID NO. 1574
aacgataccttaaggtagaagaaccagagctaggaatcggtacctatggggttcgcggtgacgaggacgagcaggtcgctggtggcgccgtcgtcgccgacgccggccggggagacgctgcggctgtcgtccctggaccgcgtgccggggctgcgccacctcgtgctgtcgctgcacgcgttcgacagcgccacgcgggtcgacgccgccgtcggcgagggggaagctgccgccagcccggcaagggcggtgcgggaggccctggggaaggcgctggtggactactacccgttcgccgggcggttcctggagccggaggaggagggcggcgaggtgagggtggcgtgcaccggcgagggcgtgtggttcgtggaggccacggcggcgtgcagcctggaggacgtgaagcacctggaccacccgatggtgatccccaaggaggagctgctgccggagccgtcgccggacgtgccggcgctcgacatgccgctcatgatgcaggtgacggagttcacgtgcggcgggttcgtggtgggcctgatatcggtgcacacgattgccgacggcctcggcgccgggcagttcatcaacgcggtgggggactacgcgcgcggcctgcccaagccccgcgtgtccccggtctgggcgcgggacctcattccggaccctccccggatgccggccccgccgccgaagctggagctcctcgacctccgcgagttcaccgtcgacctcaccccggaccacatcgccaaggccaagtccgacttcttcatgtccatggggcagcgctgctccgcctttgacgtctgcgtcgccaagacgtggcagtcccgcacccgcgcgctccgcctcgccgggcgcctcgccgacgaccaccccgtccacgtctgcttcttcgccaacacgcgccacctcatgctcgccggcgccgccgaggggttctacggaaactgcttctacccggtgacggtgacgtgcagcagcgcggaggtggcgacgggggaggtggtggacgtggtgcgcgcggtgcgggacgccaaggcgcggctcgccggcgacgtggcgcgctgggcggtgggagggttcgcgcaggacccctacgagctgaggttcacgtacgactcgctgttcgtctccgactggacgcggctcgggttcctggaggcggactacgggtggggcgcgcccacgcacgtcgtgcccttctcgtaccacccgttcatggccgtcgccgtcatcggcgcgccgccggcgcccaagatcggcgcgcgggtcatgaccatgtgcgtcgaggaggcgcacctaccagagttccgggaccagatgaacgccttcgccgccggcaagtaattgatcgtcgccgatcgacacccaaccaagtgtgcaatgcaagctgttaatttctacttttaatctagctctttatacttgtcgaaacggccgtcacggttcgtgtgggtgtgtaatttggtttgctttgaatttccttaatcaatctggcgcaattagcgttatgcttat

SEQ ID NO: 1574 - protein, 435 aa, Triticum aestivum
  misc_feature (3)..(431): Pfam Name: Transferase Pfam Description: Transferase family
  misc_feature: Ceres Clone ID no. 615256
  misc_feature: Bit score of 1138.6 for HMM based on sequences of Figure 44
  misc_feature: Functional Homolog Of SEQ ID NO. 1569
  misc_feature: in Figure 44
MGFAVTRTSRSLVAPSSPTPAGETLRLSSLDRVPGLRHLVLSLHAFDSATRVDAAVGEGEAAASPARAVREALGKALVDYYPFAGRFLEPEEEGGEVRVACTGEGVWFVEATAACSLEDVKHLDHPMVIPKEELLPEPSPDVPALDMPLMMQVTEFTCGGFVVGLISVHTIADGLGAGQFINAVGDYARGLPKPRVSPVWARDLIPDPPRMPAPPPKLELLDLREFTVDLTPDHIAKAKSDFFMSMGQRCSAFDVCVAKTWQSRTRALRLAGRLADDHPVHVCFFANTRHLMLAGAAEGFYGNCFYPVTVTCSSAEVATGEVVDVVRAVRDAKARLAGDVARWAVGGFAQDPYELRFTYDSLFVSDWTRLGFLEADYGWGAPTHVVPFSYHPFMAVAVIGAPPAPKIGARVMTMCVEEAHLPEFRDQMNAFAAGK

SEQ ID NO: 1575 - protein, 424 aa, Vitis vinifera
  misc_feature (3)..(418): Pfam Name: Transferase Pfam Description: Transferase family
  misc_feature: Public GI ID no. 225437789
  misc_feature: Bit score of 1124.9 for HMM based on sequences of Figure 44
  misc_feature: Functional Homolog Of SEQ ID NO. 1569
  misc_feature: in Figure 44
MALSVIRTNQGLVQPSKKTPSGTLDLSIIDRLPVLRCNARTLHVFRHGPGAAQVIREALSTALVPYYPLAGRLKESSHGELQIECSGEGVWFVEASAECMLDSVHYFDDTASIPYDELLPDHIPEAEGINPLVLMQVTQFACGGFVMGLIFCHSICDGLGVAQFLNAVGEMARGLENPSIAPVWCRDFSPPPPQVPQTNPTVLPNLPPPMPDYQLQHANIDIPLDQINQLKHEFQKSTGQTCSTFELVVASIWHHRTQAINLGENTQVKLVFFANCRPFLQPPLPQGFYGNCFFPVTITASSETLARSSTADVVKLIQEEKVKLSNEFCRWLKGELVEDGVDPFAPPLIYTTLFISEWGRLGFNQIDYGWGAPVHVVPIQGSAIIPVCIVGLLPSPKKGIRLMTWCVEEAHQQPFLDLMLKSST

SEQ ID NO: 1576 - DNA, 1266 bp, Populus balsamifera subsp. trichocarpa
  misc_feature: Ceres Annot ID no. 1471495
  misc_feature: Encodes the peptide sequence at SEQ ID NO. 1577
atggctttctccgtaatcagatcaagccgaggcctgattaggccgcttgagcggacaccatccggcattctcgatctctcagtcattgacagattgcctgtgctaagatgcaatgctcgaacactacacgtgtttaggcacggtcctgaagcagcacaggtgatcaaagaagccctgtccaaggcattggttccgtattatcctcttgcaggatggcttaaagagtccagccagggtcagcttcaaatcgaatgttctgcacaaggtgtatggttcgttgaggcatcagctaattgtactctcgacactgttagttactttgataatgtcatgtctatcccctatgatgatctgcttccggattatgttcctgaaactgaagggacagaacctcttgtgcaaatgcaggttactcaatttgaatgtgggggttttgtgattggactcatattctgccacgctatctgtgatggccttggtgctgcgcaattcctcaacgctgttggggagaatgctagaggccttgagcatccaagcactacaccagtgtggtgtagagacttttgtccgctcccaccccagcaagaaaagatgtatactttgccaatactaccaccagcaatgcccaattacaggctacagcatgccaacatagacatttctcttgatcaaattaaacaggtcaagatagaatttcatgattcaactagtcaaatgtgctccacatttgaagccgtcgcggctacattttggaaattccgaactctagctgtcaacttcgagcaaaatactgaggtcaagcttgttttctttgcaaattgtcgtcagctcttggaacctccgttgcctaaaggattctatggcaactgtttcttcccagtgacagtcacaacttcaagtgagacactagcacaagcatcaaatgttgaggtgataaagctaatacaagaagcaaagggtaacctaccagtagaattctccaagtatatgaagggtgactatatgaaaaatggagaggacccgtttgcaccaccgctaatctacaccactctgtttatatcagaatggggcagattaggattcaatcaggtggattatggatggggtcctccagttcacattgttcccattcaagggtccagcattattcctgttggcattgttggatcactgccattgccgaagaaaggcatccgtttgatgacatggtgtgtcgaagaggtccatcgccaaccattcatcgatcaaatggtgaaagttatttga

SEQ ID NO: 1577 - protein, 421 aa, Populus balsamifera subsp. trichocarpa
  misc_feature (3)..(420): Pfam Name: Transferase Pfam Description: Transferase family
  misc_feature: Ceres Annot ID no. 1471495
  misc_feature: Bit score of 1121.9 for HMM based on sequences of Figure 44
  misc_feature: Functional Homolog Of SEQ ID NO. 1569
  misc_feature: in Figure 44
MAFSVIRSSRGLIRPLERTPSGILDLSVIDRLPVLRCNARTLHVFRHGPEAAQVIKEALSKALVPYYPLAGWLKESSQGQLQIECSAQGVWFVEASANCTLDTVSYFDNVMSIPYDDLLPDYVPETEGTEPLVQMQVTQFECGGFVIGLIFCHAICDGLGAAQFLNAVGENARGLEHPSTTPVWCRDFCPLPPQQEKMYTLPILPPAMPNYRLQHANIDISLDQIKQVKIEFHDSTSQMCSTFEAVAATFWKFRTLAVNFEQNTEVKLVFFANCRQLLEPPLPKGFYGNCFFPVTVTTSSETLAQASNVEVIKLIQEAKGNLPVEFSKYMKGDYMKNGEDPFAPPLIYTTLFISEWGRLGFNQVDYGWGPPVHIVPIQGSSIIPVGIVGSLPLPKKGIRLMTWCVEEVHRQPFIDQMVKVI

SEQ ID NO: 1578 - protein, 439 aa, Oryza sativa subsp. japonica
  misc_feature (3)..(437): Pfam Name: Transferase Pfam Description: Transferase family
  misc_feature: Public GI ID no. 115436066
  misc_feature: Bit score of 904.9 for HMM based on sequences of Figure 44
  misc_feature: Functional Homolog Of SEQ ID NO. 1569
MGFAVVRTNREFVRPSAATPPSSGELLELSIIDRVVGLRHLVRSLHIFSAAAPSGGDAKPSPARVIKEALGKALVDYYPFAGRFVDGGGGPGSARVECTGEGAWFVEAAAGCSLDDVNGLDHPLMIPEDDLLPDAAPGVHPLDLPLMMQVTEFSCGGFVVGLISVHTMADGLGAGQFINAVGDYARGLDRPRVSPVWAREAIPSPPKLPPGPPPELKMFQLRHVTADLSLDSINKAKSAYFAATGHRCSTFDVAIAKTWQARTRALRLPEPTSRVNLCFFANTRHLMAGAAAWPAPAAGGNGGNGFYGNCFYPVSVVAESGAVEAADVAGVVGMIREAKARLPADFARWAVADFREDPYELSFTYDSLFVSDWTRLGFLEADYGWGPPSHVIPFAYYPFMAVAIIGAPPVPKTGARIMTQCVEDDHLPAFKEEIKAFDK

SEQ ID NO: 1579 - DNA, 1829 bp, Panicum virgatum
  misc_feature: Ceres Clone ID no. 1792947
  misc_feature: Encodes the peptide sequence at SEQ ID NO. 1580
catcatgcatgagcactctctcacacactactacctccctatcttataacgcgatcgatcgaccctgattaaaggtagccaagtgatcatcgtatcactcgagggaggagttaaagaaaaattaaaggaaggtgcggctccgttgaagtggccggctggccggtgagctagctagggagcgagcgagcatgggtaccatcgggttcccggtgacgaggaggagcaggtcgctggtggcgccgtcgtcggcgacgccgcaggagacgctgcggctgtcggtgatcgaccgcgtggcggggctgcggcacctggtgcggtcgctgcacgtgttcgacggccggcgcggcggggaggcggtggtgaataataataagacgccggcgccggcgccggcggagacggtgcgggaggcgctggggaaggcgctggtggactactacccgttggcggggcggttcgtggaggaggacggggaggtgcgggtggcgtgcacggcggagggcgcgtggttcgtggaggcggaggcggcgtgcaccctggaggaggtgaagcacctggaccaccccatgctcatccccaaggaggacctgctgccggagccgccggcgccggacgtcgaccccctcgacatgccgctcatgatgcaggtgaccgagttcgcgtgcggcggcttcgtggtggggctcatctccgtgcacaccatcgccgacggcctcggcgccgggcagttcctcaacgcggtggcggactacgcgcgcggcctccccaggccccgcgtgtcccccgtctgggcgcgcgacctcatcccggcgccgtccaggatcgtgtcgccgccgccgcgcttcgagctgctggacctccgctacttcaccgtggacctgagcccggagcacatcgccaaggtcaagtccatcttcttcgaggcgacggggcagcgctgctcggcgttcgacgtgtgcgtcgccaagacctggcagtcccgcgtccgcgcgctccggctggacggcggcgacccggcgcggcccgtgcacgtgtgcttcttcgccaacacgcggcacctcctgccgcagctgtcggcgcccggcgggttctacggcaactgcttctacacggtgagggcgacgcggccgtgcggcgaggtggcgggcgccggcgtggtggaggtggtgcgcgccgtccgggacgccaaggcgcggctggcggcggacttcgcgcggtgggcagcgggcgggttcgagcgggacccctacgagctcaccttcagctacgactcgctcttcgtctcggactggacgcggctggggttcctggaggcggactacgggtggggcgcgccggcgcacgtcgtgcccttctcctaccaccccttcatggccgtcgccgtcatcggcgcgccgccggcgcccaagcccggcgcgcgcgtcatgaccatgtgcgtcacggagaagcacctgccggagttccaggaccagatgaacgccttcgccgccgggaaccaccagtgacgacgacggcgtgcgcccatcgccattatggatcgatcgatcgtctagcttgctatgcctctctcaagaactgcatgctgagtggatctatttgcatgctgcttgtaatttgtatttcaaattcgccacaactagcgttgcctgccagcaggctctgcccgaaaatggaagcgtctgtaaatcatcgcggatgaaataaaaaccgagatgcacgattaatttgtgcatggctagctagatcgagtttggttgtgtgctagctgcaagtgtgtgtcttattgtctgcgtctgtgctttgtaaaaagaaaatggtcttgcaacgtt

SEQ ID NO: 1580 - protein, 438 aa, Panicum virgatum
  misc_feature (6)..(432): Pfam Name: Transferase Pfam Description: Transferase family
  misc_feature: Ceres Clone ID no. 1792947
  misc_feature: Bit score of 917.2 for HMM based on sequences of Figure 44
  misc_feature: Functional Homolog Of SEQ ID NO. 1569
MGTIGFPVTRRSRSLVAPSSATPQETLRLSVIDRVAGLRHLVRSLHVFDGRRGGEAVVNNNKTPAPAPAETVREALGKALVDYYPLAGRFVEEDGEVRVACTAEGAWFVEAEAACTLEEVKHLDHPMLIPKEDLLPEPPAPDVDPLDMPLMMQVTEFACGGFVVGLISVHTIADGLGAGQFLNAVADYARGLPRPRVSPVWARDLIPAPSRIVSPPPRFELLDLRYFTVDLSPEHIAKVKSIFFEATGQRCSAFDVCVAKTWQSRVRALRLDGGDPARPVHVCFFANTRHLLPQLSAPGGFYGNCFYTVRATRPCGEVAGAGVVEVVRAVRDAKARLAADFARWAAGGFERDPYELTFSYDSLFVSDWTRLGFLEADYGWGAPAHVVPFSYHPFMAVAVIGAPPAPKPGARVMTMCVTEKHLPEFQDQMNAFAAGNHQ

SEQ ID NO: 1581 - protein, 436 aa, Oryza sativa subsp. japonica
  misc_feature (3)..(432): Pfam Name: Transferase Pfam Description: Transferase family
  misc_feature: Public GI ID no. 115461963
  misc_feature: Bit score of 946.5 for HMM based on sequences of Figure 44
  misc_feature: Functional Homolog Of SEQ ID NO. 1569
MGFTVTRTSRSLVAPSSPTPAETLPLSVIDRVAGLRHLVRSLHVFEAGGRNGGGEPARVVIREALGKALVEYHPFAGRFVEGDGGGEVAVACTGEGAWFVEATAACSLEEVKLLDHPMVIPKEELLPEPAPDVQPLDIPLMMQVTEFTCGGFVVGLISVHTIADGLGAGQFINAVADYARGLAKPRVSPVWARDAIPDPPRMPAPPPRLELLDLRYFTVDLSPDHIAKVKSAFFESTGHRCSAFDVCVAKTWQARTRALVAAAAAAGDDDQERRTVRVCFFANTRHLMLKGDGAAAAATGFYGNCFYPVAAVASGGEVAGADIVDVVRIVRDAKARLAADVARWAVGGFEEDPYELTFTYDSLFVSDWTRLGFLDADYGWGTPSHVVPFSYHPFMAVAVIGAPPAPKLGARVMTMCVEEAHLPEFRDQMNAFAAAN

SEQ ID NO: 1582 - DNA, 1592 bp, Panicum virgatum
  misc_feature: Ceres Clone ID no. 1804757
  misc_feature: Encodes the peptide sequence at SEQ ID NO. 1583
tcatcgatcatgagcactcgcaaactacaagctaccaccttatcacaacgcgatcgatcgacccaaccaaaggtagcttaattagtgatcatcgatcactcgagggaggaggagaaaattaaagaaaaaggaagcaggtgctgcggtgaagtggccggtgagggagcgagctgatcgaccatgggtaccatcgggttcccggtgacgaggacgagcaggtcgctggtggcgccgtcgtcggcgacgccgcaggagacgctgcacctgtcggtgatcgaccgcgtggcggggctgcggcacctggtgcggtcgctgcacgtgttcgacggccgccgcggcgaggcggcggtgaggacgccggcggagacgctgcgggcggcgctggggaaggcgctggtggactattacccgctggcggggcggttcgtggaggaggacggggaggtgcgggtggcgtgcacggcggggggcgcctggttcgtggaggcggcggcggcgtgcaccctggaggaggtgaagcacctggaccaccccatggtcatccccaaggaggacctgctgccggagccgacgccggacgtcaaccccctcgacatgccgctcatgatgcaggtgacggagttcgcgtgcggcggcttcctggtgggcctcatctccgtgcacaccatcgccgacggcctgggcgccgggcagttcatcaacgcggtggcggactacgcgcgtggcctcccgaggccccccgtgctccccgtctgggcgcgcgacgtcatcccggcgccgtccacgatcgtgtccccgccgccgcggttcgacctcctggacctccgctacttcaccgtggacctcagcccggagcacatcgccaaggtcaagtccagcttcttcgaggcgacggggcagcgctgctcggcgttcgacgtgtgcgtcgccaagacctggcagtcccgcgtccgcgcgctccggctggacggcgacgacccggcgcggcccgtccacgtgtgcttcttcgccaacacgcggcacctcctgccgcagctggcgcccgggttctacrgcaactgcttctacaccgtgagggcgacgcggccctgckgcgaggtggcggcggccggcgtggtggaggtggtgcgcgccatccgggacgccaaggcgcggctgggcgcggacttcgcgcggtgggcggcgggcgggttcgagcgcgacccctacgagctcaccttcagctacgactcgctcttcgtctccgactggacgcggctggggttcctggaggcggactacgggtggggcgcgccggcgcacgtcgtgccattctcctaccaccccttcatggccgtcgccgtcatcggcgcgccgccggcgcccaagcccggcgcgcgcgtcatgaccatgtgcgtcacggagaagcacctgcccgagttccaggagcagatgaacgccttcgccgccgggaaccaccagtgacgacaacgtgtacgtacgcccatcgccatgatcgatccatccatcgtctagcttgctatgctatatatgcctcaacaactgctgaatggatttgtttgcttgcgtgtaatttggatttcaaattcgcc

SEQ ID NO: 1583 - protein, 427 aa, Panicum virgatum
  misc_feature (6)..(421): Pfam Name: Transferase Pfam Description: Transferase family
  misc_feature: Ceres Clone ID no. 1804757
  misc_feature: Bit score of 884.8 for HMM based on sequences of Figure 44
  misc_feature: Functional Homolog Of SEQ ID NO. 1569
  misc_feature (292)..(292): Xaa is any aa, unknown, or other
  misc_feature (305)..(305): Xaa is any aa, unknown, or other
MGTIGFPVTRTSRSLVAPSSATPQETLHLSVIDRVAGLRHLVRSLHVFDGRRGEAAVRTPAETLRAALGKALVDYYPLAGRFVEEDGEVRVACTAGGAWFVEAAAACTLEEVKHLDHPMVIPKEDLLPEPTPDVNPLDMPLMMQVTEFACGGFLVGLISVHTIADGLGAGQFINAVADYARGLPRPPVLPVWARDVIPAPSTIVSPPPRFDLLDLRYFTVDLSPEHIAKVKSSFFEATGQRCSAFDVCVAKTWQSRVRALRLDGDDPARPVHVCFFANTRHLLPQLAPGFYXNCFYTVRATRPCXEVAAAGVVEVVRAIRDAKARLGADFARWAAGGFERDPYELTFSYDSLFVSDWTRLGFLEADYGWGAPAHVVPFSYHPFMAVAVIGAPPAPKPGARVMTMCVTEKHLPEFQEQMNAFAAGNHQ

SEQ ID NO: 1584 - protein, 435 aa, Zea mays
  misc_feature (11)..(432): Pfam Name: Transferase Pfam Description: Transferase family
  misc_feature: Public GI ID no. 194707276
  misc_feature: Bit score of 868.8 for HMM based on sequences of Figure 44
  misc_feature: Functional Homolog Of SEQ ID NO. 1569
MGTIVDADVGFAVKRTSRSLVPPASATPRETLRLSVIDRVAGLRHLVRSLHVFAAGGDKKRQQATATPAKALREALGKALVDYYPFAGRFVVVDAEGGGETRVACTGEGAWFVEANAACSLEEARHLDHPMLIPKEQLLPEPSPDVNPLDMPLMMQVTEFSCGGFVVGLISVHTIADGLGAGQFINTVAAYARGATSATPKPVWARDVIPDPPKMPAPPPRLDLLDLRYFTADLSPDHIGKVKARYLESTGQRCSAFDVCVARTWQARVRALRLPDPAAPVHVCFFANTRHLLPAAATAGFYGNCFYTVKATRASGEVAAADVVDVVRAIRDAKARLGADFARWAAGGFDRDPYELTFTYDSLFVSDWTRLGFLEADYGWGTPTHVLPFSYHPFMAVAVIGAPPKPKPGARIMTMCVQEQHLPEFQEQMMSQQAA

SEQ ID NO: 1585 - DNA, 1869 bp, Panicum virgatum
  misc_feature: Ceres Clone ID no. 1993287
  misc_feature: Encodes the peptide sequence at SEQ ID NO. 1586
acacacgaaggcctgcagacatcgaacaatcacacacagtgccggccatggggttcgaggtgcggaggacgagccggtcgtacgtgcgcccggccgcggcgacgccggcgggctcgctggagctgtccgccattgaccgcgtggtggggctgcgccacatggtgccgtcgctgaacgtgtacccgccgcgcggctgcggcgccgccgccggcgaggggcagctgcagcagcagtccccggcgagcgtggtccgggaggcgctggggaaggcgctggtggactactacccgctcgccgggcggctcgtcggcgggcccggcgggccggcgagcgcccgcgtggagtgcaccggcgagggcgcgtggttcgtggaggccgtcgccgggtgcagcctggaggacgtcgggcgcctcgagaagtacccgttcgccatcccggagggcgacctgctcccggacgaggcgcctggtgtgcagccactcgacctccctctcatgatgcaggtgaccgagttcacgtgcggtggcttcgtggtggggatgacctccagccacgccatcactgacggcctgggcgctgggcagttcatcaccgccattggcgactacgcccgcggtctccccaagccccgtgtcactcccatctggtcccgcggcgagctcatcccaaacccgcccaagaagctcctctccggccctcttcccacgccgcggacgttccaactccggcacctcaccgtggacctgagctccgacagcatcgagcgtgccaagtcccagttcctgcagtccacggggcggcgctgctccaccttcgacgtcgccgtcgccaggctgtggcaggcgcggacgcggtcgctgcggctcgcggacccgtcgacgcgcgtcagcctcggcttcttcgccgacgctcgccgcctcctgcgcggcggcggcggcgccgccgggttctacggcaactgcttctacacggtgacggtgagcgcagagagcggcacggtggcgggcgcggacacggccggcgtggtcgccatgatccgggacgccaaggcgcggctccccgccgagttcgcgcggtgggcggcggggaagcgcgtggagccggacccctacgacctgagcttctcgtacgagtcgctgttcgtgtcggactggacccgcctggggttggacgccgactacggctgggggacgccgtcgtaggtgatatcctttgcgttcgtcccgttcatgcccaaagccattatcggcgcgccgccggcgcccaaggcgggggcaaggatcatgacacggtgcgtcgaggaggagaacttgccggagttcagggacgagatggaagcattctagaactcacaccactatgcatgctttgatataggggatgctctgatgatatatgaggatgctctgatacaagtgatcaaatttgaagtcagaaaatcaaacgaaatataatttgaaacagagagagtacctgctacctcatgctcgttgacattgtatctcatgtccagcattgcttgtggacttgtggttgtggtgtagtggttagaggtggtccaagattttgaactataaaatctaagagccggactcttaaaggattggactctaatataatataatttgaaactaataaattaaagagttttgttgggctgtgaagagatactagggccatggcctattaccacccctagtagtggtacgtgcgtgatgcacatacgcttcatcatgcgctagtgttttagcgggtttgggctgtatcttgggcattgtaatgagatacagtttgtaataagatacggtttgtaccgaggtctatttatggctttattaaaggaagaacaatccaagattgcttggctct

SEQ ID NO: 1586 - protein, 384 aa, Panicum virgatum
  misc_feature (3)..(384): Pfam Name: Transferase Pfam Description: Transferase family
  misc_feature: Ceres Clone ID no. 1993287
  misc_feature: Bit score of 572.4 for HMM based on sequences of Figure 44
  misc_feature: Functional Homolog Of SEQ ID NO. 1569
MGFEVRRTSRSYVRPAAATPAGSLELSAIDRVVGLRHMVPSLNVYPPRGCGAAAGEGQLQQQSPASVVREALGKALVDYYPLAGRLVGGPGGPASARVECTGEGAWFVEAVAGCSLEDVGRLEKYPFAIPEGDLLPDEAPGVQPLDLPLMMQVTEFTCGGFVVGMTSSHAITDGLGAGQFITAIGDYARGLPKPRVTPIWSRGELIPNPPKKLLSGPLPTPRTFQLRHLTVDLSSDSIERAKSQFLQSTGRRCSTFDVAVARLWQARTRSLRLADPSTRVSLGFFADARRLLRGGGGAAGFYGNCFYTVTVSAESGTVAGADTAGVVAMIRDAKARLPAEFARWAAGKRVEPDPYDLSFSYESLFVSDWTRLGLDADYGWGTPS

SEQ ID NO: 1587 - DNA, 1698 bp, Panicum virgatum
  misc_feature: Ceres Clone ID no. 1791289
  misc_feature: Encodes the peptide sequence at SEQ ID NO. 1588
aggtgagccacagctagccggtgcgcgcacccaccaccaccgccggtccaccgccgcgtccgcgtgcccctccagatcccccaccgccggcggccaccatgcggagcgaggcggcggcggcggcggcggcggccacggtgacgcgcgtggcgcagcgggtggtggccccgtcggcgcccacgccccgcggcgagctgccgctctcctggctcgaccgctacccgacgcagcgcgcgctcatcgagtccctccacgtcttcaagggccgcgccggcaacgacggcgacgccgaggtgcccgcccgggtcatcgagcgcgcgctggccaccgcgctcgtgagctactaccccatcgctggccggctcgcggtctccgacgagggggacctggtggtggactgcacgggcgagggcgtctggttcgtcgaggccacggcgagctgcaccctcgaggacgtggactacctcgagtacccgctcatggtgcccaaggacgagctcctgccgcaccccacctacccggcctccgaccccctccccgaggactcgctcatcctccttgtccaggtgacgcagttcgcgtgcggcggcttcgtggtggggttccggttcagccacgccgtcgccgacggccccggcgcggcgcagttcatggcggccgtgggcgacgtcgcgcgcgggcacgcggcgccgctgctggcccccgcgtgggcgcgcgaggcgatcccgaacccccccgccggcgcggcggtcggcccgctcccggtcccgacggagctccgcctccagtacctggccatggacatctcggcggagtacatcgagcacctcaaggcccggttcctggagcggacgggccagcggtgcagcgcgttcgaggtggtcatcgccaaggcgtggcagtcccgcacccgcgcggccggcttcgcggcgggctcacccgtgcacgtctgctttgccatgaacgcgcggccggcgctggcggcgctgcgcgggcgggcgctcccgggcgggttctacggcaactgctactacatcatgcgcgtgacggcggacgccggggcggtggcgggcgcggcggtgcacgacgtggtgcggctgatccgcgagggcaaaaggcggctgccgggcgagctggcgcggtggatcgccggcggcggcggcggcggggaggaggggggcgacccgtaccggatcacgtcggactaccggacgctgctggtgtcggactggtcgcggctggggttcgcggaggtggactacgggtggggcagccccgcgcacgtggtcccgctcaccaacctcgactacatcgcgacgtgcatcctggtccggccgccggcgcgcaagcccggcgcgcggctcatcacgcagtgcgtcgccgccgccgccgtcgacgacttccacaaggacatgatgcgcctcgactgatccctatgctcccccctggccctacgctacgacctgttattagtaatcccaagctgcataaattcaattaattcgttcgttggtgagtgggaactctttattatgtatacaaatatcttatgtcctaaaaaaagatcaagcagcgtgtgtgtgcgtgtgcctgtatcacgaagcatttgtttattcttccttcttctacagacggatgaaaactctaccagaaagagtaggtggggagccactgtctgctgtcccctctcgcttaagc

SEQ ID NO: 1588 - protein, 443 aa, Panicum virgatum
  misc_feature (12)..(442): Pfam Name: Transferase Pfam Description: Transferase family
  misc_feature: Ceres Clone ID no. 1791289
  misc_feature: Bit score of 589.2 for HMM based on sequences of Figure 44
  misc_feature: Functional Homolog Of SEQ ID NO. 1569
MRSEAAAAAAAATVTRVAQRVVAPSAPTPRGELPLSWLDRYPTQRALIESLHVFKGRAGNDGDAEVPARVIERALATALVSYYPIAGRLAVSDEGDLVVDCTGEGVWFVEATASCTLEDVDYLEYPLMVPKDELLPHPTYPASDPLPEDSLILLVQVTQFACGGFVVGFRFSHAVADGPGAAQFMAAVGDVARGHAAPLLAPAWAREAIPNPPAGAAVGPLPVPTELRLQYLAMDISAEYIEHLKARFLERTGQRCSAFEVVIAKAWQSRTRAAGFAAGSPVHVCFAMNARPALAALRGRALPGGFYGNCYYIMRVTADAGAVAGAAVHDVVRLIREGKRRLPGELARWIAGGGGGGEEGGDPYRITSDYRTLLVSDWSRLGFAEVDYGWGSPAHVVPLTNLDYIATCILVRPPARKPGARLITQCVAAAAVDDFHKDMMRLD

SEQ ID NO: 1589 - protein, 435 aa, Oryza sativa subsp. japonica
  misc_feature (14)..(434): Pfam Name: Transferase Pfam Description: Transferase family
  misc_feature: Public GI ID no. 125597752
  misc_feature: Bit score of 582.0 for HMM based on sequences of Figure 44
  misc_feature: Functional Homolog Of SEQ ID NO. 1569
MRGSAAAAAAAAAATVTRVAKRVVAPSAATPGGALPLSWLDRYPTQRALIESLHVFKGRADAAVAPAAAIERALAAALVSYYPIAGRLAERGDGGELVVDCTGEGVWFIEATASCSLEDVDYLEYPLMVDKDELLPHPTYPASESHPEDSLILLVQVTQFACGGFVVGFRFSHAVADGPGAAQFMTAVGEIARGRAAPALAPAWGRDAIPCPPSAAVGPLPVPTELRLQYLAMDISTDYIDHFKARFLEQTGHRCSAFEVLIAKAWQSRTRAAGFAPGSPVHVCFAMNARPVLRRALPDGFYGNCYYIMRVTAAAGAVADASVNDVVRLIREGKKRLPGEFARWSGGGGGGEDDPYRITSDYRTLLVSDWSRLGFAEVDYGWGAPVHVVPLTNLDYIATCILVRPSAHKPGARLITQCVAADAVDAFHNDMMRLD

SEQ ID NO: 1590 - DNA, 1591 bp, Zea mays
  misc_feature: Ceres Clone ID no. 346820
  misc_feature: Encodes the peptide sequence at SEQ ID NO. 1591
aaacgctcaacttgaaagtcacaggacagcacacaccccacccacaactaccaaccttctccggaaggccaaatccccccgggccaagggaaacgagggagagagaccctccgcccctctcctctccctctccttccggtgaggcggtgagctatggagtcggcagcggccgcgaagacggtggagcggctggcgcagcgcctggtgccgccggcggagcccacccccactgccccccaccgcctgtcgtggctggaccggtacccgacgcagatggcgctcatcgagtcgctgcacgtcttcaagcccgacccggcgcgtgacgggctcagccccgcggagaccatagagcgggccctcgcacgggcgctggtcgactactacccgctcgccggccgcctcgccgtgtccgagagcgccgggggcctgcacgtcgactgcagcgctgagggcgtctggttcatcgaggccgccgtacggtgccgccttgaggacgtcgactacctcgagtacccgctccagatccccaaggacgagctgctcccgcacccgctgccgaggcccagccacgaggaggagagcaagctcatcctgctcgtccaggtgacggcgttcgcgtgcggcggcttcgtggtgggcttccgcttcagccacgcggtggcggacgggctcggcgcggccaagttcatgggcgcggtgggggagctggcgcgcggggcggaccaggtgtccgtggcgcccacctgggcccgcgacgccatcccagacccgtcgggcgcgctggtcggcagcctccccgagcccacgggcgccaagcgcctcgagtacctggccatcgacatctccgccgactacatcgaccacttcaagtcccagttcgccgcggccacgggcgggggccgctgctcggccttcgaggtcctcatcgccaaggcgtggcagagccgcacccgcgccgcggggttcgaggaccccgacacccccgtgcagctctgcttcgccatgaacgcgcgcccgctcctcggcgcccgcctcccgcggggcggcgccggcttctacggcaactgctactacatcatgcgcgtggcgtccacggccgacaaggtgtcctcgtcgtccgtcaccgacgtggtgaagatcatcagggaggggaagaagcggctgccattggagtttgcscggtgggcggcgggggaggagggcgccgacggcgtggacccctaccagatcacctccgactaccggacgctgctggtgtcggattggacgcgcctcggcttcgcggaggtggactacgggtggggcccgccagcccacgtggtaccgctgacgaacctggactacatcgccacgtgcatcctcgtcaagccatgggcccacaagccaggggcgaggctcatcacgcagtgcgtgacgcccgaccgcgtctcgcgcttccacgacgccatggtggacatgaactagcgccccgcctcgtcctgcgttcaccacggcctcccgtttgttcatgggtttcttgttttttttcctcctctcagttactgtggtaattattagttggtattataattactaatcacattgctgcctc

SEQ ID NO: 1591 - protein, 436 aa, Zea mays
  misc_feature (8)..(435): Pfam Name: Transferase Pfam Description: Transferase family
  misc_feature: Ceres Clone ID no. 346820
  misc_feature: Bit score of 566.9 for HMM based on sequences of Figure 44
  misc_feature: Functional Homolog Of SEQ ID NO. 1569
  misc_feature (342)..(342): Xaa is any aa, unknown, or other
MESAAAAKTVERLAQRLVPPAEPTPTAPHRLSWLDRYPTQMALIESLHVFKPDPARDGLSPAETIERALARALVDYYPLAGRLAVSESAGGLHVDCSAEGVWFIEAAVRCRLEDVDYLEYPLQIPKDELLPHPLPRPSHEEESKLILLVQVTAFACGGFVVGFRFSHAVADGLGAAKFMGAVGELARGADQVSVAPTWARDAIPDPSGALVGSLPEPTGAKRLEYLAIDISADYIDHFKSQFAAATGGGRCSAFEVLIAKAWQSRTRAAGFEDPDTPVQLCFAMNARPLLGARLPRGGAGFYGNCYYIMRVASTADKVSSSSVTDVVKIIREGKKRLPLEFXRWAAGEEGADGVDPYQITSDYRTLLVSDWTRLGFAEVDYGWGPPAHVVPLTNLDYIATCILVKPWAHKPGARLITQCVTPDRVSRFHDAMVDMN

SEQ ID NO: 1592 - DNA, 1718 bp, Panicum virgatum
  misc_feature: Ceres Clone ID no. 1991829
  misc_feature: Encodes the peptide sequence at SEQ ID NO. 1593
agagccaggtcaagccaacaaccaaatcaaaatcaaagcctagcaaggagagcagagcacccgcggccaccaccagctccagcctccagctaccaggtcatccgcctcgttcgttggctttccagcatctccattccgcgattcatggcggcggccaagtccatcaagcggctgccggcgcggcgggtggtcccggccgagcccacgccggccggcccgctccgcctctcgtggctggaccggtaccccacgcagatggcgctcatcgagtcgctccacgtgttcaagccggccgctgaccgcgtcgccgccggcggcggcgacgtcgatgcctccgccagcccggccaggacgatcgagcgcgccctggcccgcgcattggtgcgctactacccgctggccgggcggctggtgctctcggcggacggcgcgcagcaggcggtggactgcagcaacgcgggcgtgtggttcacggaggccgcggcggcgtgcagcctcgaggacgtggactacctggaggccccgctgatgatccccaaggacgagctcctcccgcccacgcccgccggcgaggacgagcgcgcgctcgtcctgctcgtccaggtcaccgccttcgcgtgcggcggcttcgtcgtcggcttccggttcagccacgcggtcgccgacgggcccggcgccgcgcagttcatgaacgccgtcggggagctggcgcgcggcgcggaggcggaggccgcgccggtggagccgcagtggggccgcgacgcgatcccggaccccgcggccgccctggtcggcagcctcccgcggcccgacggcgccaagcggctcgagtacctcgccatcgacatctccgccgactacatcaaccacttcaagggccagtacagcgcggcgcacggcggcggcggcgcctggtgctcggcgttcgaggtgctgatcgccaaggcgtggcagagccgcacccgggccgccggcttcgagccggactcccccgtccacctctgcttcgccatgaacgcgcgccccatgctgcacgcctccctcccgcgcggcggcgccgggttctacggcaactgctactacatcatgcgcgtgtcggcgccggcgggcaaggtggccgggtcgtcggtgacggaggtggtcaggatcatcaaggacgggaagcgccgcatgcccgcggagttcgcgcggtgggcggcgggggagatgggagccgccgacggcgtcgacccgtaccagatcacgtccgactaccggacgctgctggtgtccgactggacgcggctcgggttcgcggaggtggactacggctggggcccgcccgcgcacgtcgtgccgctgacaaacctggactacatcgccacgtgtatcctggtgaagccttgggcccacaagccaggggcgcggctcatcacgcagtgcgtcaccccggaccgcgtcgccgccttccacgagggcatgctcgacatgaactgaacaagtctgaatgtctgatggaggagagcgagtcggtcagagaagcccaaggcgaaaagggagctcgtggttaaggctaatgacgtgtgattaggtggggttaattagagatggtagttggtgtcatgtggggattggtattggattagctaaccgatggggggttgatgagtgttgttggttggtgatgtgtgcgtagcatctgaataaccgaactcctgaattcaggaaggttttggcgg

SEQ ID NO: 1593 - protein, 443 aa, Panicum virgatum
  misc_feature (5)..(442): Pfam Name: Transferase Pfam Description: Transferase family
  misc_feature: Ceres Clone ID no. 1991829
  misc_feature: Bit score of 528.2 for HMM based on sequences of Figure 44
  misc_feature: Functional Homolog Of SEQ ID NO. 1569
MAAAKSIKRLPARRVVPAEPTPAGPLRLSWLDRYPTQMALIESLHVFKPAADRVAAGGGDVDASASPARTIERALARALVRYYPLAGRLVLSADGAQQAVDCSNAGVWFTEAAAACSLEDVDYLEAPLMIPKDELLPPTPAGEDERALVLLVQVTAFACGGFVVGFRFSHAVADGPGAAQFMNAVGELARGAEAEAAPVEPQWGRDAIPDPAAALVGSLPRPDGAKRLEYLAIDISADYINHFKGQYSAAHGGGGAWCSAFEVLIAKAWQSRTRAAGFEPDSPVHLCFAMNARPMLHASLPRGGAGFYGNCYYIMRVSAPAGKVAGSSVTEVVRIIKDGKRRMPAEFARWAAGEMGAADGVDPYQITSDYRTLLVSDWTRLGFAEVDYGWGPPAHVVPLTNLDYIATCILVKPWAHKPGARLITQCVTPDRVAAFHEGMLDMN

SEQ ID NO: 1594 - protein, 434 aa, Oryza sativa subsp. indica
  misc_feature (13)..(433): Pfam Name: Transferase Pfam Description: Transferase family
  misc_feature: Public GI ID no. 125555936
  misc_feature: Bit score of 576.2 for HMM based on sequences of Figure 44
  misc_feature: Functional Homolog Of SEQ ID NO. 1569
MRGSAAAAAAAAATVTRVAQRVVAPSAATPGGALPLSWLDRYPTQRALIEFLHVFKGRADAAATHAAAIERALAAALVSYYPIAGRLAERGDGGELVVDCTGEGVWFIEATASCSLEDVDYLEYPLMVDKDELLPHPTYPASESHPEDSLILLVQVTQFACGGFVVGFRFSHAVADGPGAAQFMTAVGEIARGRAAPALAPAWGRDAIPCPPSAAVGPLPVPTELRLQYLAMDISTDYIDHFKARFLEQTGHRCSAFEVLIAKAWQSRTRAAGFAPGSPVHVCFAMNARPVLRRALPDGFYGNCYYIMRVTAAAGAVADASVNDVVRLIREGKKRLPGEFARWSGGGGGGEDDPYRITSDYRTLLVSDWSRLGFAEVDYGWGAPVHVVPLTNLDYIATCILVRPSAHKPGARLITQCVAADAVDAFHNDMMRLD

SEQ ID NO: 1595 - protein, 437 aa, Oryza sativa subsp. japonica
  misc_feature (5)..(436): Pfam Name: Transferase Pfam Description: Transferase family
  misc_feature: Public GI ID no. 115434876
  misc_feature: Bit score of 532.9 for HMM based on sequences of Figure 44
  misc_feature: Functional Homolog Of SEQ ID NO. 1569
MAAAKSVERLGQRRVVPAEPTPAGPLRLSWLDRYPTQMALIESLHVFKPALDRAIGGDDVAVGPARTIERALARALVHYYPLAGRLAFSDSGEVCVDCGDAGVWFTEAEASCSLEDVDYLEYPMMVPKDELLPPTPAGEEERELVLLVQVTAFACGGFVVGFRFSHAVADGPGAAQFMAAVGELARGAGGVSVDPVWGRDAIPDPAAAVIGSLPDPAGAKRLEYLAVDISADYINHFKNQYNAEAHAAAAGVARCSAFEVLIAKAWRSRTRAAGFEPDTTVNLCFAMNARPLLHASLPRGGAGFYGNCYYIMRVSAPAGKVAGSSVTEVVKIIKDGKRRMPSEFSRWAAGDMAGGDPYQITSDYRTLLVSDWTRLGFAEVDYGWGPPAHVVPLTNLDYIATCILVRPWAHKPGARLITQCVTPDRVAAFHEGLLDLN

SEQ ID NO: 1596 - protein, 439 aa, Oryza sativa subsp. japonica
  misc_feature (8)..(438): Pfam Name: Transferase Pfam Description: Transferase family
  misc_feature: Public GI ID no. 115462409
  misc_feature: Bit score of 541.8 for HMM based on sequences of Figure 44
  misc_feature: Functional Homolog Of SEQ ID NO. 1569
MAAAAPDKAVERLSQKLVHPSSPTPSAPLRLSWLDRYPTQMALIESLHVFKPDPARDAAGQGLAPARAIETALARALVEYYPLAGRLAVSRDSGELQVDCCGGAGGHGGVWFIEAAVPCRLEDVDYLEYPLAISKDELLPHPRPRPTRDEEDKLILLVQVTTFACGGFVVGFRFSHAVADGPGAAQFMGAVGELARGGERITVAPSWGRDAVPDPAGAMVGALPEPAGASRLEYLAIDISADYINHFKSQFAAATGGARCSAFEVLIAKAWQSRTRAAAFDPSTPINLSFAMNARPLLLPRGGAGFYGNCYYIMRVASTAGRVATASVTDVVRMIREGKKRLPSEFARWAAGEMAGVDPYQITSDYRTLLVSDWTRLGFAEVDYGWGPPGHVVPLTNLDYIATCILVKPWAHKPGARLITQCVTPDRVTAFHDAMVDIN

SEQ ID NO: 1597 - DNA, 1988 bp, Panicum virgatum
  misc_feature: Ceres Clone ID no. 1790661
  misc_feature: Encodes the peptide sequence at SEQ ID NO. 1598
aactccaatttcacttcacctcgacagcgcacaccccacccaccggtctccctcctccaccaccaccgaattagccaaggcacaggcggagcaggggggcctctcctctccttcccttcctcgccgccttcgcccggcgagccagccagccatggagccggcggcgaagacggtggagcggctggcgcagcgcctggtgccgccggcggagcccacgcccaccggcccgcaccgcctgtcctggctcgaccgctacccgacccagatggcgctcatcgagtcgctgcacgtcttcaagcccgacccggcgcgggacggggtcagccccgcggagaccatccagcgcgccctggcgcgggcgctcgtcgagtactacccgctcgcgggccgcctcgccgtgtccgacgccgccggggggctccacgtcgactgcagcggcgagggcgtctggttcgtcgaggccgccgttcggtgccggctcgaggacgtcgactacctcgagtacccgctgcagatccccaaggacgacctgctcccgcacccgctgccgcgccccacccgcgaggaggagaacaagctcatcctgctcgtccaggtgaccacgttcgggtgcggcggcttcgtggtggggttccggttcagccacgcggtggcggacgggctgggcgccgccaagttcatgggcgcggtgggggagctggcgcgcggggcggaccagatctcgccgcccccaacctggggccgcgacgccatcccggacccggccggcgcgcacgtcggcagcctcccagagctggacggcgccaagcgcctcgagtacctggccatcgacatctccgccgactacatcgaccacttcaagtcccagttcgcggcggcgtcgggcgggggccgctgctctgcgttcgaggtgctcatcgccaaggcgtggcagagccgcacccgcgccgcggcgttcgacgccgacacccccgtccacctctgcttcgccgtgaacgcgcgcccgctcctcgccgcccgcctcccgcgcgccggcgtcggcttctacggcaactgctactacatcatgcgcgtgtcctccacggccgggaaggtctccacctcctcggtcaccgacgtggtgaggatcatcagggaggggaagaagcggctgccgtccgagttcgcgcggtgggcggccggggaggaggccggggacccctaccagatcacctccgactaccggacgctgctggtgtcggactggacgcggctgggcttcgccgaggtggactacgggtggggcccgccagcccacgtggtgccgctgacgaacctggactgcatcgccacgtgcatcctcgtcaagccctgggcccacaagccaggggcgcggctcatcacgcagtgcgtgacgcccgaccgcgtcgccgccttccacgacgccatggtggacatgaactgctagcaatccacaccttccattccatctgttgttcttttaaactcttcgattaaattaccgcggtacgtaattagcagggggtaatggcattaaacagcccttctggtgacgaagagcgacagcaaagaataaagtcagaaagtgacaaaatatcgataaagtacatagagccagcaggtttgggggactggtagacaactagacggtagttggcaatagtgggattggtattggattccttatttcctttggatgtcgtcttcttttgttggtggtggtgggaggcaggtctaggactctagctgtgtgtatacatgtcctcttttcttcttattttctgctgtcagttcttgggggggctttgattgaaggaaggatgatcaaagctggacttggtgggaagccaccaactaacctccccctaaatctcaatataaagatgtggattcgatgacctgtattatagtattcaacattttttttcttctttgtcatatactatacacaagccaataatgagtacagcctttgaattgcggattct

SEQ ID NO: 1598 - protein, 431 aa, Panicum virgatum
  misc_feature (6)..(429): Pfam Name: Transferase Pfam Description: Transferase family
  misc_feature: Ceres Clone ID no. 1790661
  misc_feature: Bit score of 536.3 for HMM based on sequences of Figure 44
  misc_feature: Functional Homolog Of SEQ ID NO. 1569
MEPAAKTVERLAQRLVPPAEPTPTGPHRLSWLDRYPTQMALIESLHVFKPDPARDGVSPAETIQRALARALVEYYPLAGRLAVSDAAGGLHVDCSGEGVWFVEAAVRCRLEDVDYLEYPLQIPKDDLLPHPLPRPTREEENKLILLVQVTTFGCGGFVVGFRFSHAVADGLGAAKFMGAVGELARGADQISPPPTWGRDAIPDPAGAHVGSLPELDGAKRLEYLAIDISADYIDHFKSQFAAASGGGRCSAFEVLIAKAWQSRTRAAAFDADTPVHLCFAVNARPLLAARLPRAGVGFYGNCYYIMRVSSTAGKVSTSSVTDVVRIIREGKKRLPSEFARWAAGEEAGDPYQITSDYRTLLVSDWTRLGFAEVDYGWGPPAHVVPLTNLDCIATCILVKPWAHKPGARLITQCVTPDRVAAFHDAMVDMNC

SEQ ID NO: 1599 - protein, 439 aa, Oryza sativa subsp. indica
  misc_feature (8)..(438): Pfam Name: Transferase Pfam Description: Transferase family
  misc_feature: Public GI ID no. 125551047
  misc_feature: Bit score of 542.6 for HMM based on sequences of Figure 44
  misc_feature: Functional Homolog Of SEQ ID NO. 1569
MAAAAPDKAVERLSQKLVHPSSPTPSAPLRLSWLDRYPTQMALIESLHVFKPDPARDAAGQGLAPARAIETALARALVEYYPLAGRLAVSRDSGELQVDCCGGAGGHGGVWFIEAAVPCRLEDVDYLEYPLAISKDELLPHPRPRPTRDEEDKLILLVQVTTFACGGFVVGFRFSHAVADGPGAAQFMGAVGELARGGERITVAPSWGRDAVPDPAGAMVGALPEPAGASRLEYLAIDISADYINHFKSQFAAATGGARCSAFEVLIAKAWQSRTRAAAFDPSTPINLSFAMNARPLLLPRGGAGFYGNCYYIMRVASTAGRVATASVTDVVRMIREGKKRLPSEFARWAAGEMAGVDPYQITSDYRTLLVSDWTRLGFAEVDYGWGPPAHVVPLTNLDYIATCILVKPWAHKPGARLITQCVTPDRVTAFHDAMVDIN

SEQ ID NO: 1600 - protein, 440 aa, Oryza sativa subsp. indica
  misc_feature (5)..(439): Pfam Name: Transferase Pfam Description: Transferase family
  misc_feature: Public GI ID no. 125524662
  misc_feature: Bit score of 529.2 for HMM based on sequences of Figure 44
  misc_feature: Functional Homolog Of SEQ ID NO. 1569
MAAAKSVERLGQRRVVPAEPTPAGPLRLSWLDRYPTQMALIESLHVFKPALDRAIGGDDVAVGPARTIERALARALVHYYPLAGRLAFSDSGEVCVDCGDAGVWFTEAEASCSLEDVDYLEYPMMVPKDELLPPTPAGEEERELVLLVQVTAFACGGFVVGFRFSHAVADGPGAAQFMAAVGELARGAGGVSVEPVWGRDAIPDPAAAVIGSLPDPAGAKRLEYLAVDISADYINHFKNQYNAEAHAAAAGVAGVARCSAFEVLIAKAWRSRTRAAGFEPDTTVNLCFAMNARPLLHASLPRGGAGFYGNCYYIMRVSAPAGKVAGSSVTEVVKIIKDGKRRMPSEFSRWAAGDMAGGDPYQITSDYRTLLVSDWTRLGFAEVDYGWGPPAHVVPLTNLDYIATCILVRPWAHKPGARLITQCVTPDRVAAFHEGLLDLN

SEQ ID NO: 1601 - DNA, 2048 bp, Panicum virgatum
  misc_feature: Ceres Clone ID no. 1844794
  misc_feature: Encodes the peptide sequence at SEQ ID NO. 1602
aactccaagcaaccaccaccactcccaatttcacttcacctcgacagcgcactccccacccaccggtctccctctccctcccctccaccaccaccgaatcccaggtaggggcaggcagagagcagagcggcggcagggggacctctccctcctctcctctccttcccttcctcacccccttcgcccggcgagccagccagccatggagccgccggcgaagacggtggagcggctggcgcagcgcctggtgccgccggcggagcccacgcccaccggcccgcaccgcctgtcctggctcgaccgctacccgacccagatggcgctcatcgagtcgctgcacgtcttcaagcccgacccggcgcgggacggggtcagccccgcggagaccatccagcgcgcgctggcgcgggcgctcgtcgactactacccgctcgcggggcgcctcgccgtgtccgacggcgccggcgggctccacgtcgactgcaacggcgagggcgtctggttcgtcgaggccgccgtgcggtgccggctcgaggacgtcgagtacctcgagtacccgctgcagatccccaaggacgacctgctcccgcacccgctgccgcgccccagccgcgaggaggagaacaagctcatcctgctcgtccaggtgaccacgttcgggtgcggcggcttcgtggtggggttccggttcagccacgcggtggcggacgggctgggcgccgccaagttcatgggcgcggtgggggagctggcgcgcggggcggaccagatctcgccgcccccgacctggggccgcgacgccatcccggacccggccggcgcgcacgtcggcagcctccccgagctggacggcgccaagcgcctcgagtacctggccatcgacatctccgccgactacatcgaccacttcaagtcccagttcgcggcggcgtcgggcgggggccggtgctcggccttcgaggtgctcatcgccaaggcgtggcagagccgcacccgcgccgcggcgttcgacgccggcaccaccgtccacctctgcttcgccatgaacgcgcggccgctcctcgccgcccgcctcccgcgcgccggcgtcggcttctacggcaactgctactacatcatgcgcgtgtcctccacggccgggaaggtctccacctcctcggtcaccgacgtggtgcggatcatcagggaggggaagaagcggctgccgtcggagttcgcgcggtgggcggccggggaggaggccggggacccgtaccagatcacctccgactaccggacgctgctggtgtcggactggacgcggctgggcttcgccgaggtggactacgggtggggcccgccggcccacgtggtgccgctgacgaacctggactgcatcgccacgtgcatcctcgtcaagccctgggcccacaagccaggggcgcggctcatcacgcagtgcgtgacgcccgaccgcgtcgccgccttccacgacgccatggtggacatgaactgctagtagtagtccacaccttccatctgacgcacatggttcttttaaactcttcaattaaattaccgcggtaattagcagggggtaatggcattaaacagcccttctggtggtgaagagcgacagcaaagaataaagtcagaaagtgacaaaatatcgataaaaagtacatagagccagcaggtacgggggacaccggtagacagctagatggtagttggcaaaatagtgggattggtattgttccttgtttcctttggatgtcttcttcttttgttggtggtggtgggaggcaaaggtctaggactctaggtgtgtgtgtatacatgtcctcgtttcttcttattttctgctgtcagttcttggggggctttgattgaaggaaggatgatcaaagctggacttggtgggaagccaccaactaacctccccctaaatctcaatacaaagatgtggattagatgacctgtattatagtattcaacatttttttttcttctttgtcacatatacacaagccaataataatgagtacagcctttgaaaagtggattct

SEQ ID NO: 1602 - protein, 431 aa, Panicum virgatum
  misc_feature (6)..(429): Pfam Name: Transferase Pfam Description: Transferase family
  misc_feature: Ceres Clone ID no. 1844794
  misc_feature: Bit score of 529.5 for HMM based on sequences of Figure 44
  misc_feature: Functional Homolog Of SEQ ID NO. 1569
MEPPAKTVERLAQRLVPPAEPTPTGPHRLSWLDRYPTQMALIESLHVFKPDPARDGVSPAETIQRALARALVDYYPLAGRLAVSDGAGGLHVDCNGEGVWFVEAAVRCRLEDVEYLEYPLQIPKDDLLPHPLPRPSREEENKLILLVQVTTFGCGGFVVGFRFSHAVADGLGAAKFMGAVGELARGADQISPPPTWGRDAIPDPAGAHVGSLPELDGAKRLEYLAIDISADYIDHFKSQFAAASGGGRCSAFEVLIAKAWQSRTRAAAFDAGTTVHLCFAMNARPLLAARLPRAGVGFYGNCYYIMRVSSTAGKVSTSSVTDVVRIIREGKKRLPSEFARWAAGEEAGDPYQITSDYRTLLVSDWTRLGFAEVDYGWGPPAHVVPLTNLDCIATCILVKPWAHKPGARLITQCVTPDRVAAFHDAMVDMNC

SEQ ID NO: 1603 - protein, 437 aa, Triticum aestivum
  misc_feature (5)..(436): Pfam Name: Transferase Pfam Description: Transferase family
  misc_feature: Public GI ID no. 151175361
  misc_feature: Bit score of 534.5 for HMM based on sequences of Figure 44
  misc_feature: Functional Homolog Of SEQ ID NO. 1569
MAAAKSVERLAQRLVTPAEPTPAGPLRLSWLDRYPTQMALIESLHVFKPAPDRDGGDAGPAGTIERALAQALVQYYPLAGRLGFTEEGGLLQVDCGGDGSGVWFTEAAAGCALEDVEYLEHPIMIAKDELLPPIPAQEEDPRKLVLLVQVTTFACGGFVVGFRFSHAVADGPGAAQFMAAVGELARGRSVEDLTVEPQWGREAIPDPAGAVIGSLPSPAGAKRLEYLAMDISADYINHFKSQYNSSHTGSWCSAFEVLVAKAWQSRTRAAGFEPDSTVHLCFAMNARPLLHASLPRAGAGFYGNCYYIMRVSAPAGKVSGSTIPEVVKIIKDGKRRMPSEFGRWATGEAGADGGVDPYQITSDYRTLLVSDWTRLGFAEVDYGWGPPAHVVPLTNLDYIATCILVKPWAHKPGARLITQCVTPDRIAAFHEGMLDMN

SEQ ID NO: 1604 - protein, 437 aa, Triticum aestivum
  misc_feature (5)..(436): Pfam Name: Transferase Pfam Description: Transferase family
  misc_feature: Public GI ID no. 151175359
  misc_feature: Bit score of 531.9 for HMM based on sequences of Figure 44
  misc_feature: Functional Homolog Of SEQ ID NO. 1569
MAAAKSVDRLAQRLVTPAEPTPAGPLRLSWLDRYPTQMALIESLHVFKPAPDRDGGDAGPAGTIERALAQALVQYYPLAGRLGFTEEGGLLQVDCGGGGSGVWFTEAAAGCALEDVEYLEHPMMIAKDELLPPTPAQEEDARKLVLLVQVTTFACGGFVVGFRFSHAVADGPGAAQFMAAVGELARGRTAEGLTVEPQWGREAIPDPAGAVIGSLPSPAGAKRLEYLAMDISADYINHFKSQYNSSHTGSWCSAFEVLVAKAWQSRTRAAGFEEDSIVHLCFAMNARPLLHASLPRAGAGFYGNCYYIMRVSAPAGKVAGSTIPEVVKIIKDGKRRMPSEFGRWATGEAGADGGVDPYQITSDYRTLLVSDWTRLGFAEVDYGWGPPAHVVPLTNLDYIATCILVKPWAHKPGARLITQCVTPDRIAAFHEGMLDMN

SEQ ID NO: 1605 - protein, 442 aa, Triticum aestivum
  misc_feature (6)..(441): Pfam Name: Transferase Pfam Description: Transferase family
  misc_feature: Public GI ID no. 150246875
  misc_feature: Bit score of 532.3 for HMM based on sequences of Figure 44
  misc_feature: Functional Homolog Of SEQ ID NO. 1569
MAAVNKSVERLAQRLVAPAEPTPVGPLRLSWLDRYPTQMALIESLHVFKPALDRHFDGGDDAGPARTIERALAQALVNYYPLAGHLGFTEEGGLLQVDCGGEGSGVWFTEAAAACALEDVEYLEHPMMIAKDELLPPTPAQEEDERRLVLLVQVTTFACGGFVVGFRFSHAVSDGPGAAQFMAAVGELARGRSSVEGLAVEPQWGREAIPDPAGAVVGSLPSPAGAKRLEYLAMDISADYINHFKSQYNSSHTGSWCSAFEVLVAKAWQSRTRAAGFEPDSTVHLCFAMNARPLLHASLPRAGAGFYGNCYYIMRVSAPAGKVSGSSIPEVVKIIKDGKRRMPSEFARWATGEAGADGGEDPYQITSDYRTLLVSDWTRLGFAEVDYGWGPPAHVVPLTNLDYIATCILVKPWAHKPGARLITQCVTPDRVAAFHQGMLDMN

SEQ ID NO: 1606 - DNA, 1618 bp, Panicum virgatum
  misc_feature: Ceres Clone ID no. 1811754
  misc_feature: Encodes the peptide sequence at SEQ ID NO. 1607
ctcctccatttaaggccagctcaagctcaccgaggctccaagctcctcccgcagcatctccacacaagcccgagacccgagaggaggtagagcagagcagagggggagtagtcgtcgtcgtcgtcggcggcggcggcggcgcgaggtggagatggcggggttcaaggtgacgcggatctcggagggcccggtgaagccggcgtcggcgaccccggaggagacgctgccgctggcgtgggtggaccggtacccgacccaccggggcctggtggagtcgatgcacatcttccggtcgggcgcggacgcggcgcccggcgtgatccgggaggcgctgggcaaggcgctggccttcttctacccgctggcggggcgcatcgtggagggcgcggaacccgggtgccccgccatccgctgcaccgccgacggcgtctacttcgcggaggccgaggcggactgcagcctcgaggacgtgcggttcctggagcgcccgctgctgctgcccaaggaggacctcgtcccctaccccggcgacgaccgctggggcgtcgagccgcacaacaccatcatgatgatgcagatcaccaagttcacctgcggcgggttcgtgatggggctccggttcaaccacgcgtcggcggacggcatgggcgccgcgcagttcatcaacgccgtcggcgacatggcgcgggggctcgcggagcccaaggtgaagcccgtctgggaccgtgagaagttccccaaccccaagatcaagcccggcccgctcccggagctccccgtgctggcgctggactacatcgtcctcgacttccccaccggctacatcgacggcctcaagaagcagtacaaggagcacagcggcaagttctgctcgggcttcgacgtgctcacggccaagctctggcagtgccgcacccgggcgctgaacctggagcccaacgccgaggtcaagctctgcttcttcgccagcgtccagcacctgctcaagcttgacagggggtactacggcaactccatcttcccggtgaagatgtccgcgccggctgagaaggtgctcagctcgtccatcatggaggtcgtggacatgatccggcaggccaaggacaggatggccgtggagttcttccagttcgccaaggaggagaccgaccaggacccgttccagatgaccttcaactacgagtccatctacatctcggactggagcaagctcgggttctcggaggtggactacggcttcggcccgccggtgttcgccggcccgctggtgaacaatgacttcatcgcctccgtcgtcatccttaaggcgccgctgccgctcgacggcacgcggatgctcgccagctgcgtcaccaaggagcattccgaggagttcgttcgtggcatgaaggcagacctgccctgaacttctttcctttttatagctgatgaaatggcaaaacttgactgcagggagatgaatggtgacgcaaaagatgcctctgtttggttaatgctgttgttacttttggttgtatttatttgtcacattatcttcgttaatactactttagacagcaaattcgatcttttgtaccatttggtatgagacaataagaggtagactgtcaatttgatt

SEQ ID NO: 1607 - protein, 417 aa, Panicum virgatum
  misc_feature (4)..(415): Pfam Name: Transferase Pfam Description: Transferase family
  misc_feature: Ceres Clone ID no. 1811754
  misc_feature: Bit score of 520.7 for HMM based on sequences of Figure 44
  misc_feature: Functional Homolog Of SEQ ID NO. 1569
MAGFKVTRISEGPVKPASATPEETLPLAWVDRYPTHRGLVESMHIFRSGADAAPGVIREALGKALAFFYPLAGRIVEGAEPGCPAIRCTADGVYFAEAEADCSLEDVRFLERPLLLPKEDLVPYPGDDRWGVEPHNTIMMMQITKFTCGGFVMGLRFNHASADGMGAAQFINAVGDMARGLAEPKVKPVWDREKFPNPKIKPGPLPELPVLALDYIVLDFPTGYIDGLKKQYKEHSGKFCSGFDVLTAKLWQCRTRALNLEPNAEVKLCFFASVQHLLKLDRGYYGNSIFPVKMSAPAEKVLSSSIMEVVDMIRQAKDRMAVEFFQFAKEETDQDPFQMTFNYESIYISDWSKLGFSEVDYGFGPPVFAGPLVNNDFIASVVILKAPLPLDGTRMLASCVTKEHSEEFVRGMKADLP

SEQ ID NO: 1608 - DNA, 1638 bp, Zea mays
  misc_feature: Ceres Clone ID no. 334953
  misc_feature: Encodes the peptide sequence at SEQ ID NO. 1609
aaactccaatccagcgttgagctcgacagctcgtgccaaactaggccgcagctggaaataccctccgctccacttacctgctgctggtgagcaccgcaagcaccaactcgcgcccaccgctccgctacaccagccgacgccatcatgtctaccgtcgccgccgcccccaccgtcgtgaaatcggctccggagctcgtcgcgccagtggggccaacacccggcggcaccctcccactgtcctccatcgacaagaccgcggcggtgcgtgtgtcggtggatttcatccaggtttttcccccggccgtaggagcaggcggggacaaagacgccgccgtggccgcgatgcgcgacggcttcgcgaaggcactggtgccgtactacccggtggccggccgcatcgcggacgccagccccggggagcccgtggtggagtgcaccgggcagggcgtctggttcgtggaggccgctgcgagctgcgcgctcgccgacgtcaactacctcgagcgccctctgctcatccccaaggaggagctcctcccgcgacctccccccgaggagaagctcgaggacctcgtcctcatggcacaggtgaccaagttcgcctgcggcgggttcgcggtcgggatctgcttcagccacctggtgttcgacgggcagggcgcggcgcagttcctcaaggcggccggcgagatggcgcgggggctgccggcgccgtcggttgcgccggtctgggaccgcgacgcgatcccggacccgcctaagctgccgcgcggccccccgccgtcgttcacggcgttcagcttcgtgacccaggtggtcgagatctcgccggagagcatcgcgcgcatcaaggacgacttcaaggacgcgacggggcagacctgctccaccttcgacgctgtcacggcggtggtgttcaagtgccgcgcgctggcgatggcgctccccgacgatgccgaggtccggctcggcttcgccgccagcacgcggcacctcctccacggcgtgctgccgtcggtggacggctactacggcaactgcgtgtaccccgtgggcatcacccggaccagcaaggcgatccgtgaggcgtcgcttccggaggtggtcggcgtgatgcgggaggccaaggaggcgcttaccacgcggttcacagactggatgcgcggcggcgccaaggacgaccactacaacgtgccgttggactacggcacggtgacggtgtcggactggagccgcgtcgggttcaacgaggtggactacggcttcggtgaaccggggtacgtcttcacgctcaacgacgacgtcaacatcgtcgcgtcggtgatctacctcaaaccgcccgcgcccaagcgcggcatccggctcatgcttcgctgcgtcgaggaacctcacgctgcggcgttcgccgaggagctcgccaaattcgcgtagatggttgtttagtcttggtttatctatacttcattggtgtcggacactcggacctcatcttttacaatattatccatacttcattggtgtcaggcgctcattgattgtcatcggcattgttggatgtgcgggggacatgaaaaagctattacaagaacatttctggtatgcctaaaagtacacatattaaatcatgaccatttatct

SEQ ID NO: 1609 - protein, 428 aa, Zea mays
  misc_feature (8)..(427): Pfam Name: Transferase Pfam Description: Transferase family
  misc_feature: Ceres Clone ID no. 334953
  misc_feature: Bit score of 504.1 for HMM based on sequences of Figure 44
  misc_feature: Functional Homolog Of SEQ ID NO. 1569
MSTVAAAPTVVKSAPELVAPVGPTPGGTLPLSSIDKTAAVRVSVDFIQVFPPAVGAGGDKDAAVAAMRDGFAKALVPYYPVAGRIADASPGEPVVECTGQGVWFVEAAASCALADVNYLERPLLIPKEELLPRPPPEEKLEDLVLMAQVTKFACGGFAVGICFSHLVFDGQGAAQFLKAAGEMARGLPAPSVAPVWDRDAIPDPPKLPRGPPPSFTAFSFVTQVVEISPESIARIKDDFKDATGQTCSTFDAVTAVVFKCRALAMALPDDAEVRLGFAASTRHLLHGVLPSVDGYYGNCVYPVGITRTSKAIREASLPEVVGVMREAKEALTTRFTDWMRGGAKDDHYNVPLDYGTVTVSDWSRVGFNEVDYGFGEPGYVFTLNDDVNIVASVIYLKPPAPKRGIRLMLRCVEEPHAAAFAEELAKFA

SEQ ID NO: 1610 - DNA, 1560 bp, Panicum virgatum
  misc_feature: Ceres Clone ID no. 1780550
  misc_feature: Encodes the peptide sequence at SEQ ID NO. 1611
aggctccaagctcccgcaacatctccacacaagcccgagccccgagagaggtagagcagagcaggggagagtagtagtcggcggcgcgcggtggacatggcgggcttcaaggtgacgcggatctcggagggcccggtgaagccggcgacggcgaccccggaggagacgctgccgctggcgtgggtggaccggtacccgacccaccggggcctggtggagtcgatgcacatcttccggtcgggcgcggacgcggcccccggcatgatccgggaggcgctgggcaaggcgctggccttcttctacccgctggcggggcgcatcgtggagggcgcggagccggggtgccccgccatccgctgcaccgccgacggcgtctacttcgcggaggccgaggcggactgcagcctcgaggacgtgcggttcctggagcgcccgctgctgctgcccaaggaggacctcgtcccctaccccggcgacgaccgctggggcgtcgagccgcacaacaccatcatgatgatgcagatcaccaagttcacctgcggcgggttcgtgatggggctccggttcaaccacgcgtcggcggacggcatgggcgccgcgcagttcatcaacgccgtcggcgacatggcgcgggggctcgcggagcccaaggtgaagcccgtctgggacagggagaagttccccaaccccaagatcaagcccggcccgctcccggagctccccgtgctggcgctggactacatcgtcctcgacttccccaccggctacatcgacggcctcaagaagcagtacaaggagcacagcggcaagttctgctcgggcttcgacgtgctcacggccaagctctggcagtgccgcacccgcgctctgaacctggagcccaacgccgaggtcaagctctgcttcttcgccagcgtccggcacctgctcaagctcgacaggggatactacggcaactccatcttcccggtgaagatgtccgcgccggctgagaaggtgctcggctcgtccatcatggaggtcgtggacatgatccggcaggccaaggacaggatggccgtggagttcttccagttcgccaaggaggagaccgaccaggacccgttccagatgaccttcaactacgagtccatctacgtgtcagactggagcaagctcgggttctcggaggtggactacggcttcgggccgccagtgttcgccggcccgctggtgaacaacgacttcatcgcctccgtcgtcatccttaaggcgccgctgccgctcgacggcacgcggatgctcgccagctgcgtcaccaaggagcattccgaagagttcgttcgtggcatgaaggcagacctgccatgaatttctttccttttatagctgaaatggcaaaactcaactgcagggagatgaatggtcacgcaaaagatgcctctgtttggttaatgctgttgttacttttggttgtatttatttatcatattgtcttggttaatactactttagacagcaaattcgatcatttgtaccatttgatatgagacaataaaaggttatactgtcaatttgatc

SEQ ID NO: 1611 - protein, 417 aa, Panicum virgatum
  misc_feature (4)..(415): Pfam Name: Transferase Pfam Description: Transferase family
  misc_feature: Ceres Clone ID no. 1780550
  misc_feature: Bit score of 517.8 for HMM based on sequences of Figure 44
  misc_feature: Functional Homolog Of SEQ ID NO. 1569
MAGFKVTRISEGPVKPATATPEETLPLAWVDRYPTHRGLVESMHIFRSGADAAPGMIREALGKALAFFYPLAGRIVEGAEPGCPAIRCTADGVYFAEAEADCSLEDVRFLERPLLLPKEDLVPYPGDDRWGVEPHNTIMMMQITKFTCGGFVMGLRFNHASADGMGAAQFINAVGDMARGLAEPKVKPVWDREKFPNPKIKPGPLPELPVLALDYIVLDFPTGYIDGLKKQYKEHSGKFCSGFDVLTAKLWQCRTRALNLEPNAEVKLCFFASVRHLLKLDRGYYGNSIFPVKMSAPAEKVLGSSIMEVVDMIRQAKDRMAVEFFQFAKEETDQDPFQMTFNYESIYVSDWSKLGFSEVDYGFGPPVFAGPLVNNDFIASVVILKAPLPLDGTRMLASCVTKEHSEEFVRGMKADLP

SEQ ID NO: 1612 - protein, 419 aa, Oryza sativa subsp. japonica
  misc_feature (7)..(417): Pfam Name: Transferase Pfam Description: Transferase family
  misc_feature: Public GI ID no. 115434962
  misc_feature: Bit score of 520.2 for HMM based on sequences of Figure 44
  misc_feature: Functional Homolog Of SEQ ID NO. 1569
MAGTGSFKVTRISEGAVKPAAATPEETLPLAWVDRYPTHRGLVESMHIFRSGADAAPGVIRDALARALVFFYPLAGRIVEPEAGSPAIRCTADGVYFAEAAADCSLEDVRFLERPLLLPKEDLVPYPGDDRWGVEPHNTIMMMQITKFTCGGFVMGLRFNHASADGMGAAQFINAVGDMARGLPEPRVKPVWDREKFPNPSIKPGPLPGLPVLALDYIVLDFPTGYIDGLKAQYKAHSGKFCSGFDVLTAKLWQCRTRALNLEPGATVKLCFFASVRHLLKLDRGYYGNSIFPVKMSAPSETVLSSSVMEVVDMIRQAKERMAVEFFQFAKEETEQDPFQMTFNYESIYVSDWSKLGFAEVDYGFGPPKFAGPLVNNDFIASVVILKAPLPLDGTRMLASCVTKEHSEEFVRGMKEDLP

SEQ ID NO: 1613 - protein, 419 aa, Oryza sativa subsp. japonica
  misc_feature (7)..(417): Pfam Name: Transferase Pfam Description: Transferase family
  misc_feature: Public GI ID no. 125569315
  misc_feature: Bit score of 520.9 for HMM based on sequences of Figure 44
  misc_feature: Functional Homolog Of SEQ ID NO. 1569
MAGTGSFKVTRISEGAVNPAAATPKETLPLPWVDRYPTHRGLVESMHIFRSGPNAAPGVIRDALARALVFFYPLAGRIVEPEAGSPAIRCTADGVYFAEAAADCSLEDVRFLERPLLLPKEDLVPYPGDDRWGVEPHNTIMMMQITKFTCGGFVMGLRFNHASADGMGAAQFINAVGDMARGLPEPRVKPVWDREKFPNPSIKPGPLPGLPVLALDYIVLDFPTGYIDGLKAQYKAHSGKFCSGFDVLTAKLWQCRTRALNLEPGATVKLCFFASVRHLLKLDRGYYGNSIFPVKMSAPSETVLSSSVMEVVDMIRQAKERMAVEFFQFAKEETEQDPFQMTFNYESIYVSDWSKLGFAEVDYGFGPPKFAGPLVNNDFIASVVILKAPLPLDGTRMLASCVTKEHSEEFVRGMKEDLP

SEQ ID NO: 1614 - DNA, 1555 bp, Gossypium hirsutum
  misc_feature: Ceres Clone ID no. 1973047
  misc_feature: Encodes the peptide sequence at SEQ ID NO. 1615
aaatcatcattttcttagccatattctttaccaatggcgctctgtgttgtgagatcaaggcgaagcctagtgactccatctcagcaaacaccatctggcaagcttgacttgtcattcattgataaagtgccggttctaagatgctatacccgcacattgcatgtatacaaacatggccctgaagcatcaaaggtcattagggaagctttgtccaaggccttggtgccttactatccacttgctggacggctaaaagagtccgataacaatcagcttcaggttgaatgttcgggagaaggtgcctggttcgtcgaggcatcagctgattctagccttcatgcattcaattacttcgacgatgctaattttgacattccttatgatgaacttcttcctgatcaagttcctaacagtgaaggcatggaacctcttgtacaaatgcaggtgacacaatttgcatgtggaggtttcgtcatagggttaatattttgccacaccatatgcgatggcttaggatctgcacagttcctaaacgctgtaggggagttcgcgagaggtatggaacatctaagcgttgaaccggtgtggcaaagggacttttttccaactccaacacaagaagcaaatgttatccaattggcaaacttgccagtgccaccacccccgatgcctggcaagccgctagagcatgtgagcattgatatttccatggatgaaatcaatcagctaaagaaacaattccatgaatcgacggggcaaacttgctctgctttcgaaatcgtggctgctaatttttggagccttcgaacaagagcaataaacttgaagccaggtactgaagtccggcttcttttctttgcaaattgccgtcagctagtggagcctcctttgcctaaaggcttctatggcaactgtttcttcccgataacaatcacagctccctgcgacttgcttaaacaagcatcagcaatcgaagtgattaaactgatacgagaagccaagactaagctaccttctgagtttggtaagttcaagaatggagattacttgagaaatgggaaggagccatttctagcacctctagggtacaccactttgtttatatcggaatggggtaggttggggttcaaccaggttgactatgggtggggccccccggtccacatggttccaattccgggctctagcatcatccctgttggcatcatgggatcgctgccattgcctagaaagggtgtccgcttgatgacatggtgtgttgagaaagaccatacccatcccttcgttgatctgatgacgaaactagtctaacaagttaccagtgcttgaagtcttgaactgctattgctttacccaacgccaatgtcaataaaacaacacagcgccaccacatgttcaaaacatttgtgctttttatttatttgtatttggtataatcttcaatttgatcttgaaaatcttctccttattaaaattatctcattcacttgtggtcattttcaaataaaattattatttctcattaagtaaatgccattgtgtgtagttttattag

SEQ ID NO: 1615 - protein, 425 aa, Gossypium hirsutum
  misc_feature (3)..(424): Pfam Name: Transferase Pfam Description: Transferase family
  misc_feature: Ceres Clone ID no. 1973047
  misc_feature: Bit score of 848.6 for HMM based on sequences of Figure 44
  misc_feature: Functional Homolog Of SEQ ID NO. 1569
MALCVVRSRRSLVTPSQQTPSGKLDLSFIDKVPVLRCYTRTLHVYKHGPEASKVIREALSKALVPYYPLAGRLKESDNNQLQVECSGEGAWFVEASADSSLHAFNYFDDANFDIPYDELLPDQVPNSEGMEPLVQMQVTQFACGGFVIGLIFCHTICDGLGSAQFLNAVGEFARGMEHLSVEPVWQRDFFPTPTQEANVIQLANLPVPPPPMPGKPLEHVSIDISMDEINQLKKQFHESTGQTCSAFEIVAANFWSLRTRAINLKPGTEVRLLFFANCRQLVEPPLPKGFYGNCFFPITITAPCDLLKQASAIEVIKLIREAKTKLPSEFGKFKNGDYLRNGKEPFLAPLGYTTLFISEWGRLGFNQVDYGWGPPVHMVPIPGSSIIPVGIMGSLPLPRKGVRLMTWCVEKDHTHPFVDLMTKLV

SEQ ID NO: 1616 - protein, 434 aa, Triticum aestivum
  misc_feature (21)..(432): Pfam Name: Transferase Pfam Description: Transferase family
  misc_feature: Public GI ID no. 151175355
  misc_feature: Bit score of 508.9 for HMM based on sequences of Figure 44
  misc_feature: Functional Homolog Of SEQ ID NO. 1569
MSTTEAQSRARAGAAMASSSFKVTRISEGAVKPASETPDHTLPLAWVDRYPTHRGLVESMHIFRSGADAAPAVIREALGKALAFFYPLAGRIVEQPEKGCPAIRCTADGVYFAEAVAECSLEDVRFLERPLLLPKEDLVPYPADDLWGVEPHNTIMMMQITKFTCGGFVMGLRFNHASADGMGAAQFIKAVGDMARGLPEPAVKPVWDREKFPNPSIKPGPLPELPVLALDYIVLDFPTGYIDALKTQYKAHSGKFCSGFDVLTAKLWQCRTRALNLEPDATVKLCFFASVRHLLKLDAGYYGNSIFPVKMSGTSREVLRSSVMEVIDMIREAKQRMAVEFFQFAKEETRQDPFQMSFDYESIYVSDWSKLGFSDVDYGFGPPMFAGPLVNNDFIASVVILKAPLPLDGTRMLASCVTKEHSEEFARGMKEDLP

SEQ ID NO: 1617 - DNA, 1696 bp, Zea mays
  misc_feature: Ceres Clone ID no. 283413
  misc_feature: Encodes the peptide sequence at SEQ ID NO. 1618
actacaaccagtacacgacgcgctgtgcagcctgcaagctgcaaggcaagttccgtccagctcctcctccatttaagccgcctgcctggtgcctccactccacccaacaaattcccgagacgccattctcaccatccacacaaagccacagcccaagagcagagtcgtcgtcgtcgtcgggcatggcggggttcaaggtgacgcggatctcggagggccccgtgaagccggcgtcggcgacgcccgaggagacgctgccgctggcttgggtggaccggtacccgacgcaccgtggcctggtggagtcgatgcacatcttccggtcgggcgcgggcgaggccccggccgtgatccgggcggcgctggccaaggcgctggccttcttctacccgctggcgggccgcatcgtggagggggagcagccggggcgccccgccatccgctgcaccgccgacggcgtctacttcgcggaggccgaggcggactgcagcctggaggacgtgcgcttcctggagcggcccctgctgctgcccaaggaggacctcgtgccttaccccggcgacgaccgctggcccgtcgagccgcacaacaccatcatgatgatgcagatcaccaagttcacctgcggcggcttcgtgatgggcctgcggttcaaccacgcgtcggcggacggcatgggcgcggcgcagttcatcaacgcggtgggggacatggcgcgggggctggcggagccgagggtgctgcccgtgtggcaccgggagaagttcccggacccgagcatcaagccaggcccgctcccggagctgcccgtgctggcgctggactacgtcgtgctcgacttccccacggcctacatcgacgggctcaagcgggagtacaaggcgcacagcggcaggttctgctccggcttcgacgtgctcacggccaagctctggcagtgccgcacccgggcgctggccctggacccggccgccgaggtcaagctctgcttcttcgccagcgtccgccacctgctcaagctcgaccgggggtactacggcaactccatcttccccgtcaagatgtccgcgccggccgacaaggtgctggcctcctcgctcgtggaggtggtcgacatcatccgggaggccaaggacaggatggccgtcgagttctmccgcttcgctggggaggagacggaccaggacccgttccagatgaccttcaactacgagtccatctacgtctccgactggagcaagctcggcttctccgaggtcgactacggcttcggcccgcccatcttcgccggcccgctcgtcaacaacgacttcatcgcctccgtcgtcttcctcaaggcgccgctcccgctcgacggcaccaggatgctcgccagctgcgtcaccaaggaacactccgaggagttcgcccgtggcatgaaggaagacctgccctgaacttgttcttcctagcttattatatactgctgatgatcatcctgagccctggctgcagggagatgatgaatggtgacgtaaacatgcttctgtttcgttgatgctgttgttacttttggttgtattttttttggggttcactttatcttggtcaatacgtaccacattagatcacagcaagcaaattcgatcttaatttgtactacaccatttgatatgagaccgagacaataaaaaaggttatactgtccaaaaaaagt

SEQ ID NO: 1618 - protein, 417 aa, Zea mays
  misc_feature (4)..(415): Pfam Name: Transferase Pfam Description: Transferase family
  misc_feature: Ceres Clone ID no. 283413
  misc_feature: Bit score of 508.1 for HMM based on sequences of Figure 44
  misc_feature: Functional Homolog Of SEQ ID NO. 1569
  misc_feature (325)..(325): Xaa is any aa, unknown, or other
MAGFKVTRISEGPVKPASATPEETLPLAWVDRYPTHRGLVESMHIFRSGAGEAPAVIRAALAKALAFFYPLAGRIVEGEQPGRPAIRCTADGVYFAEAEADCSLEDVRFLERPLLLPKEDLVPYPGDDRWPVEPHNTIMMMQITKFTCGGFVMGLRFNHASADGMGAAQFINAVGDMARGLAEPRVLPVWHREKFPDPSIKPGPLPELPVLALDYVVLDFPTAYIDGLKREYKAHSGRFCSGFDVLTAKLWQCRTRALALDPAAEVKLCFFASVRHLLKLDRGYYGNSIFPVKMSAPADKVLASSLVEVVDIIREAKDRMAVEFXRFAGEETDQDPFQMTFNYESIYVSDWSKLGFSEVDYGFGPPIFAGPLVNNDFIASVVFLKAPLPLDGTRMLASCVTKEHSEEFARGMKEDLP

SEQ ID NO: 1619 - protein, 419 aa, Triticum aestivum
  misc_feature (6)..(417): Pfam Name: Transferase Pfam Description: Transferase family
  misc_feature: Public GI ID no. 151175357
  misc_feature: Bit score of 503.7 for HMM based on sequences of Figure 44
  misc_feature: Functional Homolog Of SEQ ID NO. 1569
MASSSFKVTRISEGAVKPASETPDHTLPLAWVDRYPTHRGLVESMHIFRSGADAAPAVIREALGKALAFFYPLAGRIVEQPEKGCPAIRCTADGVYFAEAVAECSLEDVRFLERPLLLPKEDLVPYPAADLWGVEPHNTIMMMQITKFTCGGFVMGLRFNHASADGMGAAQFIKAMGDMARGLPEPSVKPVWDREKFPNPSIKPGPLPELPVLALDYIVLDFPTGYIDGLKTQYKAHSGKFCSGFDVLTAKLWQCRTRALNLEPDATVKLCFFASVRHLLKLDAGYYGNSIFPVKMSGSSKKVLESSVMEVIDMIREAKQRMAVEFFQFAKEETRQDPFQMSFDYESIYVSDWSKLGFSDVDYGFGPPMFAGPLVNNDFIASVVILKAPLPLDGTRMLASCVTKEHSEEFARGMKEDLP

SEQ ID NO: 1620 - DNA, 1476 bp, Gossypium hirsutum
  misc_feature: Ceres Clone ID no. 1978685
  misc_feature: Encodes the peptide sequence at SEQ ID NO. 1621
atcattttctttgccatattctttaccaatggcgctgtgtgttatgagatcaaggcgaagcctagtgactccatctcagcaaacaccatctggcaagcttgacttgtcattcattgataaagtgccggttctaagatgctatacccgcacattgcatgtatacaaacatggccctgaagcatcaaaggtcattagggaagccttgtccaaggccttggtgccttactatccacttgctggacggctaaaagagcccgataacaatcagcttcaggttgaatgttcgggagaaggtgcctggttcgtcgaggcatcagctgattctagccttcatgcattcaattacttcgacgatgctaattttgacattccttatgatgaacttcttcctgatcaagttcctaaaagtgaaggcatggaacctcttgtacaaatgcaggtgacacaatttgcatgcggaggtttcgtcatagggttaatattttgccacaccatatgcgatggcttaggatctgcacagttcctaaacgctgtaggggagttcgcgagaggcatagagcatctaagcgttgaaccggtgtggcaaagggacttttttccaactccaacacaagatgcaaatgttatccaattggcaaacttgccagtgccaccacccccgatgcctgccaagccgctagagcatgtgagcattgatatttccatggatgaaatcaatcagctaaagaaacaattccatgaatcgacggggcaaacttgctctgctttcgaaatcgtggctgctaatttttggagccttcgaacaagagcaataaacttggagccaggtactgaagtccggcttcttttctttgcaaattaccgtcagctagtggagcctcctttgcctaaaggcttctatggcaactgtttattcccgataacaatcacagctccctgcgacttgcttaaacaagcatcagcaatcgaagtgattaaactgatacgagaagccaagactaagctaccttctgagtttggtaagttcaagaatggagattacttgagaaatgggaaggacccatttctagcacctctagggtacaccactttgtttatatcggaatggggtaggttggggttcaaccaggttgactatgggtggggccctccggtccacatggttccaattccgggttctagcatcatccctgttggcatcatgggatcgctgccattgcctagaaagggtgtccgcttgatgacatggtgtgttgataaagaccaaacccagcccttcgttgatctgatgacgaaactagtctaacaagttaccaatgcttgaagtcttgaactgctattgctttacccaacgccaatgtctaaaataaaacaacacagcgccaccacatgttcaaaacatttgtggtttttatttattccgtttaataacattgtatttggtactatcttgatcttcaaaatcatctttttatt

SEQ ID NO: 1621 - protein, 425 aa, Gossypium hirsutum
  misc_feature (3)..(424): Pfam Name: Transferase Pfam Description: Transferase family
  misc_feature: Ceres Clone ID no. 1978685
  misc_feature: Bit score of 830.1 for HMM based on sequences of Figure 44
  misc_feature: Functional Homolog Of SEQ ID NO. 1569
MALCVMRSRRSLVTPSQQTPSGKLDLSFIDKVPVLRCYTRTLHVYKHGPEASKVIREALSKALVPYYPLAGRLKEPDNNQLQVECSGEGAWFVEASADSSLHAFNYFDDANFDIPYDELLPDQVPKSEGMEPLVQMQVTQFACGGFVIGLIFCHTICDGLGSAQFLNAVGEFARGIEHLSVEPVWQRDFFPTPTQDANVIQLANLPVPPPPMPAKPLEHVSIDISMDEINQLKKQFHESTGQTCSAFEIVAANFWSLRTRAINLEPGTEVRLLFFANYRQLVEPPLPKGFYGNCLFPITITAPCDLLKQASAIEVIKLIREAKTKLPSEFGKFKNGDYLRNGKDPFLAPLGYTTLFISEWGRLGFNQVDYGWGPPVHMVPIPGSSIIPVGIMGSLPLPRKGVRLMTWCVDKDQTQPFVDLMTKLV

SEQ ID NO: 1622 - protein, 428 aa, Arabidopsis thaliana
  misc_feature (3)..(421): Pfam Name: Transferase Pfam Description: Transferase family
  misc_feature: Public GI ID no. 15228696
  misc_feature: Bit score of 734.4 for HMM based on sequences of Figure 44
  misc_feature: Functional Homolog Of SEQ ID NO. 1569
MAFSLTRVNRVLIQACETTPSVVLDLSLIDNIPVLRCFARTIHVFTHGPDAARAIQEALAKALVSYYPLSGRLKELNQGKLQIDCTGKTGIWFVDAVTDVKLESVGYFDNLMEIPYDDLLPDQIPKDDDAEPLVQMQVTQFSCGGFVMGLRFCHAICDGLGAAQFLTAVGEIACGQTNLGVSPVWHRDFIPQQHRANDVISPAIPPPFPPAFPEYKLEHLSFDIPSDLIERFKREFRASTGEICSAFEVIAACFWKLRTEAINLREDTEVKLVFFANCRHLVNPPLPIGFYGNCFFPVKISAESHEISKEKSVFDVVKLIKQAKTKLPEEFEKFVSGDGDDPFAPAVGYNTLFLSEWGKLGFNQVDYGWGPPLHVAPIQGLSIVPAGIVGSVPLPKKGVRLMTWCVEETHCQLFDDLMTNKLTSNKTE

SEQ ID NO: 1623 - DNA, 1369 bp, Panicum virgatum
  misc_feature: Ceres Clone ID no. 1724569
  misc_feature: Encodes the peptide sequence at SEQ ID NO. 1624
gagaatctgaagttctgaacctgcacctgcagcagcagagtgcccggtccggcggctccccattcgaccatctccggccgccgcccctccgtcggcccgtctccccagcggcatgagcaccgtcacggccgccgatccgcacacctccttcctcgccgacaaggacgccaaggtcttcgtcgccgggcaccggggcctcgtcggttccgcggtcgtgcgccgcctcctctcgctcggcttcacctccgtcgtcgtccggacccacgccgagctcgacctcacccgccaggccgacgtcgaggccttcttcgccgccgagcgcccgcgctacgtcgtcctcgccgccgccaaggtcggcggcatccacgccaactccaccttccccgccgacttcatcgccgccaacctccagatccagaccaacgtcgtcgacgccgcgctgcgctccggctccgtccgcaagctcctcttcctgggctcctcctgcatctaccccaagttcgcgccgcagcccatcaccgagggcgcgctcctctccggcccgctcgagcccaccaacgagtggtacgccgtcgccaagatcgccggcatcaagatgtgccaggcataccgcatccagcacggcctcgacgccgtctccgccatgcccaccaacctctacggcccgcacgacaacttccacccggagaactcgcacgtcctgcccgcgctcatccgcaggttccacgaggccaaggcgtgcgacgcccccgaggtcgtcgtatggggctcgggctcgccgctgcgggagttcctgcacgtcgatgacctcgccgacgcggtcatcttcttgatggaccagtactccgggctggagcacgtcaacgtggggagtgggagcgaggtcgccatcaaggagctcgctgagctggtgaaggaggtggtggggttccaggggaagctggtgtgggactccagcaagccggacggcacacccaggaagctcatggatagctccaagatacaaggcatggggtggaagcctaagatcgccctcaaggagggcctcgtcgaaacctacaaatggtatgttgagaatgtcgtctctggcaagaagtagagccttgcttgccagtggtggtggtgtctttctctccatagctactcttgcaagttggtgtcatgatttctagtgttcctatggttgttgattatcagatcatacgattctgttttactacccacatagaagaggtttgttataatgttatgtgttggctgaataatctgtgggtcaaatttgtatactgctaggatcataattgatcttgaacactttttggtgattagaaagtttaacgaccatctgatggatggatgttcttggccg

SEQ ID NO: 1624 - protein, 328 aa, Panicum virgatum
  misc_feature (21)..(253): Pfam Name: Epimerase Pfam Description: NAD dependent epimerase/dehydratase fam
  misc_feature: Ceres Clone ID no. 1724569
  misc_feature: Bit score of 885.4 for HMM based on sequences of Figure 9
  misc_feature: Functional Homolog Of SEQ ID NO. 1624
  misc_feature: in Figure 9
MSTVTAADPHTSFLADKDAKVFVAGHRGLVGSAVVRRLLSLGFTSVVVRTHAELDLTRQADVEAFFAAERPRYVVLAAAKVGGIHANSTFPADFIAANLQIQTNVVDAALRSGSVRKLLFLGSSCIYPKFAPQPITEGALLSGPLEPTNEWYAVAKIAGIKMCQAYRIQHGLDAVSAMPTNLYGPHDNFHPENSHVLPALIRRFHEAKACDAPEVVVWGSGSPLREFLHVDDLADAVIFLMDQYSGLEHVNVGSGSEVAIKELAELVKEVVGFQGKLVWDSSKPDGTPRKLMDSSKIQGMGWKPKIALKEGLVETYKWYVENVVSGKK

SEQ ID NO: 1625 - DNA, 1337 bp, Zea mays
  misc_feature: Ceres Clone ID no. 292606
  misc_feature: Encodes the peptide sequence at SEQ ID NO. 1626
aaattctcatccgaacccgatcatctccggccgccgctccctccggaccctccgtcgacatgggcaccgtcactgccgcagatccgcacccgtccttcctcgccgacaaggacgccaaggtcttcgtcgccggccaccggggcctcgtcggctccgccatcgtgcgccgcctcctctcgctaggcttcacctccgtcgtcgtccgcacccacgccgagctcgacctgactcgccaggcggacgtcgaggccttcttcgccgcagaacgcccgcgctacgtggtcctcgccgccgccaaggtcggcggaatccacgccaactccaccttccccgccgacttcatcgccgccaacctccagatccagaccaacgtcgtcgacgccgcgctgcgctgcggctccgtccgcaagctcctcttcctcggctcctcctgcatctaccccaagttcgcgccgcagcccatcacggagggcgcgctcctctccggcccgctcgagcccaccaacgagtggtacgccgtcgccaagatcgccggcatcaagatgtgccaggcctaccgcatccagcacggcctcgacgccgtctctgccatgcccaccaacctgtatggcccgcacgacaacttccacccggagaactcgcacgtcctgcccgcgctcatccgtcgcttccacgaggccaaggctactaacgcccccgaggtcgtcgtctggggatcaggctcgcctctgcgcgagttcctgcacgtcgatgatctcgccgacgccgtcatcttcctgatggatcactactccggcatggagcatgtcaatgtggggagtgggagtgaggtcaccatcaaggagctcgccgaactagtcaaggaggtggtcggcttccaggggaacctggtgtgggactccagcaagccggacggcacacccaggaagctcatggatagctccaagatacaggggatggggtggaagcccaagatcgccctcaaggaaggcctcgtggaaacctacaaatggtacgtcgagaatgtcatctcgaacaagaagtagggccgtgacatgccagtggtgctgtcttgctctccgttgctgcttccacaaggtggttggatatctgatcatacggttatcagttttaagttaacccacatagaagaggcttgttatgttatgtgttgcctcacctgaataatctgtgggtcaagttagtatactgctacaagcataattgatctggaacactttttgttgaatagaggaagtttaatgaccaagatgatgatggattgatgttcttggtctagaaacaactgcttgctgaccaagctctgtttgatttct

SEQ ID NO: 1626 - protein, 328 aa, Zea mays
  misc_feature (21)..(253): Pfam Name: Epimerase Pfam Description: NAD dependent epimerase/dehydratase fam
  misc_feature: Ceres Clone ID no. 292606
  misc_feature: Bit score of 892.8 for HMM based on sequences of Figure 9
  misc_feature: Functional Homolog Of SEQ ID NO. 1624
  misc_feature: in Figure 9
MGTVTAADPHPSFLADKDAKVFVAGHRGLVGSAIVRRLLSLGFTSVVVRTHAELDLTRQADVEAFFAAERPRYVVLAAAKVGGIHANSTFPADFIAANLQIQTNVVDAALRCGSVRKLLFLGSSCIYPKFAPQPITEGALLSGPLEPTNEWYAVAKIAGIKMCQAYRIQHGLDAVSAMPTNLYGPHDNFHPENSHVLPALIRRFHEAKATNAPEVVVWGSGSPLREFLHVDDLADAVIFLMDHYSGMEHVNVGSGSEVTIKELAELVKEVVGFQGNLVWDSSKPDGTPRKLMDSSKIQGMGWKPKIALKEGLVETYKWYVENVISNKK

SEQ ID NO: 1627 - DNA, 987 bp, Sorghum bicolor
  misc_feature: Ceres Annot ID no. 8743842
  misc_feature: Encodes the peptide sequence at SEQ ID NO. 1628
atgggcaccgtcactgccgcagatccgcacccgtccttcctcgccgataaggacgccaaggtcttcgtcgccggccaccggggcctggtcgggtccgccatcgtgcgccgcctcctctcgctcggcttcacctccgtcgtcgtccgcacccacgccgagctcgacctcacccgccaggccgacgtcgaggccttcttcgccgccgagcgcccgcgctacgtggtcctcgcggccgccaaggtcggcggcatccacgccaactccacctaccccgccgacttcatcgccgccaacctccagatccagaccaacgtcgtggacgccgcgctgcgctgcgtttccgtccgcaagctcctcttcctcggctcctcctgcatctacccaaagttcgcgccgcagcccatcacggagggcgcgctcctctccggcccgctcgagcccaccaacgagtggtacgccgtcgccaagatcgccggcatcaagatgtgccaggcctaccgcatccagcacggcctcgacgccgtctccgccatgcccaccaacctctacggcccgcacgacaacttccaccccgagaactcgcacgtcctgcccgcgctcatccgtcgcttccacgaggccaaggccaccaacgcccctgaggtcgtcgtctggggatcaggctcgccgctgcgcgagttcctccacgtcgatgacctcgcggacggcgtcatcttcttgatggaacactactccggcctggagcatgtcaatgtggggagtgggagtgaggtcaccatcaaagagctcgccgagctagtcaaggaggtggtcggcttccaggggaaccttgtgtgggactccagcaagccggacggcacacccaggaagctcatggatagctccaagatacaggggatggggtggaagcccaagatcgccctcaaggaaggcctcatcgaaacctacaaatggtacgtcgagaatgtcatctcgaacaagaagtag

SEQ ID NO: 1628 - protein, 328 aa, Sorghum bicolor
  misc_feature (21)..(253): Pfam Name: Epimerase Pfam Description: NAD dependent epimerase/dehydratase family
  misc_feature: Ceres Annot ID no. 8743842
  misc_feature: Bit score of 889.0 for HMM based on sequences of Figure 9
  misc_feature: Functional Homolog Of SEQ ID NO. 1624
  misc_feature: in Figure 9
MGTVTAADPHPSFLADKDAKVFVAGHRGLVGSAIVRRLLSLGFTSVVVRTHAELDLTRQADVEAFFAAERPRYVVLAAAKVGGIHANSTYPADFIAANLQIQTNVVDAALRCVSVRKLLFLGSSCIYPKFAPQPITEGALLSGPLEPTNEWYAVAKIAGIKMCQAYRIQHGLDAVSAMPTNLYGPHDNFHPENSHVLPALIRRFHEAKATNAPEVVVWGSGSPLREFLHVDDLADGVIFLMEHYSGLEHVNVGSGSEVTIKELAELVKEVVGFQGNLVWDSSKPDGTPRKLMDSSKIQGMGWKPKIALKEGLIETYKWYVENVISNKK

SEQ ID NO: 1629 - protein, 328 aa, Oryza sativa subsp. japonica
  misc_feature (21)..(253): Pfam Name: Epimerase Pfam Description: NAD dependent epimerase/dehydratase fam
  misc_feature: Public GI ID no. 115469272
  misc_feature: Bit score of 890.1 for HMM based on sequences of Figure 9
  misc_feature: Functional Homolog Of SEQ ID NO. 1624
  misc_feature: in Figure 9
MGTVTTADPHASFLADKGGKVFVAGHRGLVGSAILRHLVSLGFTNVVVRTHAELDLTRQSDVEAFFAAELPRYVVLAAAKVGGIHANSTFPADFIAANLQIQTNVVDAALKCGSVRKLLFLGSSCIYPKFAPQPIPENSLLSGPLEPTNEWYAVAKIAGIKMCQAYRIQHGFDAISAMPTNLYGPQDNFHPENSHVLPALIRRFHEAKASNAAEVVVWGTGSPLREFLHVDDLADAVIFLMDHYSGLEHVNVGSGSEVTIKELAELVKEVVGFQGKLVWDSSKPDGTPRKLMDSSKIQEMGWKPKVPLKEGLVETYKWYVENVISAKK

SEQ ID NO: 1630 - protein, 355 aa, Vitis vinifera
  misc_feature (52)..(283): Pfam Name: Epimerase Pfam Description: NAD dependent epimerase/dehydratase fam
  misc_feature: Public GI ID no. 157343111
  misc_feature: Bit score of 886.8 for HMM based on sequences of Figure 9
  misc_feature: Functional Homolog Of SEQ ID NO. 1624
  misc_feature: in Figure 9
MAVGRSEVDSPNLTLVLTPVLSPTVTSDNGKLQSRILGTTVDSFLSNQSAKVFVAGHRGLVGSAIVRKLQQLGFTNLLLRTHAELDLTRQTDVDAFFAAEKPQFVILAAAKVGGIHANKTYPADFIAINLQIQTNVIDSSYRHGVKKLLFLGSSCIYPKFAPQPITEEALLTGPLEPTNEWYAVAKIAGIKMCQGYRLQHGFDAISGMPTNLYGPYDNFHPENSHVLPALIRRFHEAKVSGAKEVVVWGTGSPLREFLHVDDLADGVVFLMDKYSGLVHVNVGSGKEVTIKELAELVKEVVGFEGELVWDTSKPDGTPRKLMDSSKLAELGWVPKIALKEGLVDTYKWYLENVKQ

SEQ ID NO: 1631 - DNA, 1375 bp, Gossypium hirsutum
  misc_feature: Ceres Clone ID no. 1841546
  misc_feature: Encodes the peptide sequence at SEQ ID NO. 1632
agcatctgctctctttcgctcggcatcttcagttcttcacttccccagtctccagcaatgggagaaaccgattctttcttctcgaacaaatcagcgaagatcttcgtagcaggccatcgaggcctagttggttctgccatagttcgtaaacttcagtccctaggctttaccaacctcctactccgcacccatgccgatctggaccttactcgccaatccgacgtcgaatccttcttcgccgatgagaaacctcactatgtcgtactagctgccgctaaagttggtgggatccacgccaacaacacttaccctgccgatttcattgccatcaacctccaaatccagaccaacgtcatcgattcctcttaccgccacggcgttaagaaaatcctcttcctcggttcctcttgtatttatcccaaatttgcgccgcaacccatccctgaaaacgcgctcttatccggtcccctggaacccaccaacgaatggtatgccgttgccaagatcgcggggatcaaaatgtgccaagcgtacagaattcagcacggcttcgatgctatttccgctatgccgacaaatttgtacggccccaacgataatttccatccggaaaattcccacgttttgcccgctttgatgcggaggttccataaagccaaagtggaaggagcaaaagaagtagttatttggggaactggtagtccattaagggaatttttgcacgtcgacgatctagctgatgctgtggttttcttgctgggaaattatagtgggttggaacatgtgaatgtaggtagcggaaaagaggttactattaaggaattagctgaattggttaaggaagttgttgggtttgaaggggaacttgtttgggattcttcgaagcctgatgggactcctaggaaactcatggacagctcgaagcttgcttcattggggtggaatgccaagatttctttgaaagatgggcttattgatacttataaatggtacttggagaaagtcaagcaatgatggcagagcaggtgatattgttggtttcttccctgatgaattttttgatcggggtatttgttgttttgtgatgttgtcattattatcatcgcctattgtttgtttattgttatgtttggatacgccgtggaataatttgaggttaattttgtaccaattatatggcatccaagttgagcatgaggaattcctttgctatatattggatcaaactttctattgaggaactgactagatatttctttttatttaatttcgaactggattaaattatgttcaattatggttgaggtttattccatcttatagttatctttgtttgaaggatataaatgaaacagctatgaactaggtttctgct

SEQ ID NO: 1632 - protein, 318 aa, Gossypium hirsutum
  misc_feature (15)..(246): Pfam Name: Epimerase Pfam Description: NAD dependent epimerase/dehydratase family
  misc_feature: Ceres Clone ID no. 1841546
  misc_feature: Bit score of 883.5 for HMM based on sequences of Figure 9
  misc_feature: Functional Homolog Of SEQ ID NO. 1624
  misc_feature: in Figure 9
MGETDSFFSNKSAKIFVAGHRGLVGSAIVRKLQSLGFTNLLLRTHADLDLTRQSDVESFFADEKPHYVVLAAAKVGGIHANNTYPADFIAINLQIQTNVIDSSYRHGVKKILFLGSSCIYPKFAPQPIPENALLSGPLEPTNEWYAVAKIAGIKMCQAYRIQHGFDAISAMPTNLYGPNDNFHPENSHVLPALMRRFHKAKVEGAKEVVIWGTGSPLREFLHVDDLADAVVFLLGNYSGLEHVNVGSGKEVTIKELAELVKEVVGFEGELVWDSSKPDGTPRKLMDSSKLASLGWNAKISLKDGLIDTYKWYLEKVKQ

SEQ ID NO: 1633 - DNA, 1272 bp, Populus balsamifera subsp. trichocarpa
  misc_feature: Ceres Annot ID no. 1478288
  misc_feature: Encodes the peptide sequence at SEQ ID NO. 1634
atgccaagcaacccggcccatgaatacagggttataccccataatatagactccacctccctccgcgctaatccccagaaccacctccaccaaatgggcggccccagccacgattcctccgatttcctcaccgacaaatctgcaaaaatcttcgtggcgggacaccgtggtctagtcggctccgcaatcgtccgcaagctccaatcccacggcttgaccaatctcgttctccgttcccactccgagctcgacctcacgcgccaatccgatgtggactccttcttcgccgctgaaaagccccaatatgttatcctagccgccgctaaagttggcggaatacacgctaacaatacatatcctgccgatttcattgccataaatctccagatccaaactaatgtaatcgactcctcttttcgacatggagttaagaaactgttgtttttgggatcctcttgtatttaccctaagctagcaccgcagccgattcctgaaaatgcactgcttactgggcctttagagccaacgaatgagtggtacgcgattgcgaagatatctgggattaaaatgtgtcaggcttacaggattcagtataattgggatgctatttctggaatgcccacgaatttatatgggccgaatgataattttcatccagaaaattctcatgttttgccggcattgatgaggaggtttcatgaggcgaaggtgaataaggccaaagaagtggttgtttggggaactgggagtccgttgagggagtttttgcacgttgatgatttggcggatgcggtggtgtttttgatggacaagtatagtggattggagcatttaaatgtggggagtgggaaggaggttactataaaggagttggcggagttggtgaaggaggctgttggctttgaaggggagcttgtttgggatacatcaaagcccgatgggactccaaggaagttaatggatagttctaagttgttggggttgggttggatgccaaagatttcgctgaaggatgggctagttgatacttataagtggtatgtggagaatgtggcgattatagatagtgcagcaagcgatgggcaactgtttaggttgatcacttcaagcaaaacttttgctgtcagttccagtaggattactcagcaaatagcaggcagcagaggtttggggcttgggtggggaaatgggagctttttcccaacggagtatgcttcttcaactagcgtaaattcacagcctacgatttttcatctcaaagacagtagctaa

SEQ ID NO: 1634 - protein, 392 aa, Populus balsamifera subsp. trichocarpa
  misc_feature (19)..(250): Pfam Name: Epimerase Pfam Description: NAD dependent epimerase/dehydratase family
  misc_feature: Ceres Annot ID no. 1478288
  misc_feature: Bit score of 890.3 for HMM based on sequences of Figure 9
  misc_feature: Functional Homolog Of SEQ ID NO. 1624
  misc_feature: in Figure 9
MGGPSHDSSDFLTDKSAKIFVAGHRGLVGSAIVRKLQSHGLTNLVLRSHSELDLTRQSDVDSFFAAEKPQYVILAAAKVGGIHANNTYPADFIAINLQIQTNVIDSSFRHGVKKLLFLGSSCIYPKLAPQPIPENALLTGPLEPTNEWYAIAKISGIKMCQAYRIQYNWDAISGMPTNLYGPNDNFHPENSHVLPALMRRFHEAKVNKAKEVVVWGTGSPLREFLHVDDLADAVVFLMDKYSGLEHLNVGSGKEVTIKELAELVKEAVGFEGELVWDTSKPDGTPRKLMDSSKLLGLGWMPKISLKDGLVDTYKWYVENVAIIDSAASDGQLFRLITSSKTFAVSSSRITQQIAGSRGLGLGWGNGSFFPTEYASSTSVNSQPTIFHLKDSS

SEQ ID NO: 1635 - DNA, 1298 bp, Glycine max
  misc_feature: Ceres Clone ID no. 463953
  misc_feature: Encodes the peptide sequence at SEQ ID NO. 1636
gatagcagcatagagtgagtgagtgagtgagagaaggagattctgatttgatctcgccttaatctctcagatctgagcttgccgtcgtcggaatccaactcaatctgggtcggattcttaggtatcaccgctcctactattagtttaagcctctcaataaaaggtttttatttcgcttcaaattcgaggtttgatttgaagttggaatagcttaactgttgtgtaaaacagccagcacacacaagcatgggaagccaagacaacaacgtagcattgtcatcaaattcatttttagcttacaaatctgctaaggtgtttgtcgctggccaccgaggtcttgttggctcggccatagttcgcaagctcactcaacttgggttcactaatctggtcttgcactcccatgccgagcttgatctcactcgacaatctgatgttgaagccttctttgcctctgaaaaacctgaatttgtcattgtagctgcagccaaagttggtggcatccatgccaacaacacctaccctgccgatttcattgccatcaacctccaaatccagaccaatgtcattgattctgcttatcgcaacggtgctaagaaactattgtttttgggttcctcttgtatttaccccaaatatgcaccccaaccgattccggaagatgctttgcttactggaccgttagagcccaccaatgaatggtatgccattgccaagattgctgggatcaaaatgtgccaggcttacagaattcagcataagtgggatgcaatttctggaatgcccaccaacttatatggaccatacgacaattttcaccccgagaattcacatgtgttacctgctctcatgaggaggtttcatgaggcaaaggtcaatggtgccaaggaggtggtggtgtggggcacaggaagtccattgagggaattcttgcacgtcgacgatttggcagatgcagttgtcttcatgatggaaaagtatagcggacttgagcatttgaatgtagggagtggaaaggaggttactattaaggaattggccgagttgatgaaggaagtggtgggatttgagggtgatcttgtttgggattctacgaagccagatgggactccaaggaagctgatggatagctccaaacttgcaagtctgggttggacaccaaaagtctcactcaaggatgggcttgctgatacctacaaatggtacttggagaacgtcaatctatgattcggttaaacagaatatgtggtgtcaaattctataagtacttgttatttcacaacgaagaattttttgtg

SEQ ID NO: 1636 - protein, 326 aa, Glycine max
  misc_feature (23)..(254): Pfam Name: Epimerase Pfam Description: NAD dependent epimerase/dehydratase fam
  misc_feature: Ceres Clone ID no. 463953
  misc_feature: Bit score of 890.3 for HMM based on sequences of Figure 9
  misc_feature: Functional Homolog Of SEQ ID NO. 1624
  misc_feature: in Figure 9
MGSQDNNVALSSNSFLAYKSAKVFVAGHRGLVGSAIVRKLTQLGFTNLVLHSHAELDLTRQSDVEAFFASEKPEFVIVAAAKVGGIHANNTYPADFIAINLQIQTNVIDSAYRNGAKKLLFLGSSCIYPKYAPQPIPEDALLTGPLEPTNEWYAIAKIAGIKMCQAYRIQHKWDAISGMPTNLYGPYDNFHPENSHVLPALMRRFHEAKVNGAKEVVVWGTGSPLREFLHVDDLADAVVFMMEKYSGLEHLNVGSGKEVTIKELAELMKEVVGFEGDLVWDSTKPDGTPRKLMDSSKLASLGWTPKVSLKDGLADTYKWYLENVNL

SEQ ID NO: 1637 - protein, 328 aa, Arabidopsis thaliana
  misc_feature (22)..(253): Pfam Name: Epimerase Pfam Description: NAD dependent epimerase/dehydratase family
  misc_feature: Public GI ID no. 18394547
  misc_feature: Bit score of 894.2 for HMM based on sequences of Figure 9
  misc_feature: Functional Homolog Of SEQ ID NO. 1624
  misc_feature: in Figure 9
MADNTGSEMKSGSFMLEKSAKIFVAGHRGLVGSAIVRKLQDQGFTNLVLRTHSELDLTSQSDVESFFATEKPVYVILAAAKVGGIHANNTYPADFIGVNLQIQTNVIHSAYTHGVKKLLFLGSSCIYPKFAPQPIPESALLTGPLEPTNEWYAIAKIAGIKMCQAYRLQHQWDAISGMPTNLYGQNDNFHPENSHVLPALMRRFHEAKANNADEVVVWGSGSPLREFLHVDDLADACVFLMDQYSGFEHVNVGSGVEVTIKELAELVKEVVGFKGKLVWDTTKPDGTPRKLMDSSKLASLGWTPKISLKDGLSQTYEWYLENVVQKKQ

SEQ ID NO: 1638 - DNA, 1373 bp, Panicum virgatum
  misc_feature: Ceres Clone ID no. 2016499
  misc_feature: Encodes the peptide sequence at SEQ ID NO. 1639
aacctcaagttctgaacctgcacctgcagcagtgctcggtccggcggctccccatccgaccatctccggcagccgcgccccgcccgcccgtcccttcagcgacatgggcaccgccacggccgacgatccgcacccctccttcctcgccgacaaggacgccaaggtcttcgtcgccgggcaccggggcctcgtcgggtccgcggtcctgcgccgcctcctctcgctcggcttcacctccgtcgtcgtccggacccacgccgagctcgacctcacccgccaggccgacgtcgaggccttcttcgccgccgagcgcccgcgctacgtcgtcctcgccgccgccaaggtcggcggcatccacgccaactccaccttcccggccgacttcatcgccgccaacctccagatccagaccaacgtcgtcgacgccgcgctgcgctgcggctccgtccgcaagctcctcttcctgggctcctcctgcatctaccccaagttcgcgccgcagcccatcaccgagggcgcgctcctctccggcccgctcgagcccaccaacgagtggtacgccgtcgccaagatcgccggcatcaagatgtgccaggcataccgcatccagcacggcctcgacgccgtctccgccatgcccaccaacctctacggcccgcacgacaacttccacccggagaactcgcacgtcctgcccgcgctcatccgcaggttccacgaggccaaggcctgcgacgcccccgaggtcgtcgtctggggctcgggctcgccgctgcgggagttcctgcacgtcgatgacctcgccgacgcggtcatcttcttgatggaccagtactccgggctggagcacgtcaatgtggggagtggcagcgagatcaccatcaaggagctcgctgagttggtgaaggaggtggtggggttccaggggaagctggtgtgggactccagcaagccggacggcacacccaggaagctcatggatagctccaagatacaaggcatggggtggaagcccaagatcgccctcaaggagggcctcgtcgaaacctacaaatggtatgttgagaatgtcgtctccgacaagaagtagagccttgcttgccagtggtggtggtgtcttgctctccattgctactcttgcaagttggtgtcatgatttctagtgttcctatggttgttgattatcagatcatacgattctgttttactgtaacttaaacccacatagaagaggtttgttataatgttatgtgttggctgaataatccgtgggtcaaattagtatactgctaggatcataattgatcttgaacactttttgttgattagaaagtttaacgaccatctgtgaatgggagatgttcttggcctag

SEQ ID NO: 1639 - protein, 328 aa, Panicum virgatum
  misc_feature (21)..(253): Pfam Name: Epimerase Pfam Description: NAD dependent epimerase/dehydratase fam
  misc_feature: Ceres Clone ID no. 2016499
  misc_feature: Bit score of 885.2 for HMM based on sequences of Figure 9
  misc_feature: Functional Homolog Of SEQ ID NO. 1624
MGTATADDPHPSFLADKDAKVFVAGHRGLVGSAVLRRLLSLGFTSVVVRTHAELDLTRQADVEAFFAAERPRYVVLAAAKVGGIHANSTFPADFIAANLQIQTNVVDAALRCGSVRKLLFLGSSCIYPKFAPQPITEGALLSGPLEPTNEWYAVAKIAGIKMCQAYRIQHGLDAVSAMPTNLYGPHDNFHPENSHVLPALIRRFHEAKACDAPEVVVWGSGSPLREFLHVDDLADAVIFLMDQYSGLEHVNVGSGSEITIKELAELVKEVVGFQGKLVWDSSKPDGTPRKLMDSSKIQGMGWKPKIALKEGLVETYKWYVENVVSDKK

SEQ ID NO: 1640 - protein, 328 aa, Oryza sativa subsp. indica
  misc_feature (21)..(253): Pfam Name: Epimerase Pfam Description: NAD dependent epimerase/dehydratase fam
  misc_feature: Public GI ID no. 125556307
  misc_feature: Bit score of 878.7 for HMM based on sequences of Figure 9
  misc_feature: Functional Homolog Of SEQ ID NO. 1624
MGTVTTADPHASFLADKGGKVFVAGHRGLVGSAILRHLVSLGFTNVVVRTHAELDLTRQSDVEAFFAAELPRYVVLAAAKVGGIHANSTFPADFIVANLQIQTNVVDAALKCGSVRKLLFLGSSCIYPKFAPQPIPENSLLSGPLEPTNEWYAVAKIAGIKMCQAYRIQHGFDAISAMPTKLYGPQDNFHPENSHVLPALIRRFHEPKASNAAEVVVWGTGSPLREFLHVDDLADAVIFLMDHYSGLEHVNVGSGSEVTIKELAELVKEVVGFQGKLVWDSSKPDGTPRKLMDSSKIQEMGWKPKVPLKEGLVETYKWYVENVISAKK

SEQ ID NO: 1641 - DNA, 976 bp, Panicum virgatum
  misc_feature: Ceres Clone ID no. 1996507
  misc_feature: Encodes the peptide sequence at SEQ ID NO. 1642
aatccctccctctcaggtccggcgaatctcatccgaccatctccggtcgccgcacctgctccgggcgacatgggcaccgtcaccgccgcagatccgctcccctccttcctcgccgacaaggacgcgaaggtcttcgtcgccggccaccgcggcctcgtcggctccgcgatcctccgccgcctcctctccctcggcttcaccgacgtcgtcgtccgcaagcacgccgagctcgacctgacccgccaggccgacgtcgaggccttcttcgctgcggagcagccccgctacgtcgtcctcgccgccgccaaggtcggcggcatccacgccaactcaaccttccccgccgacttcatcgccgccaacctccagatccagaccaacgtcgtcgacgccgcgctcaggtgcggctccgtccggaagctcctcttcctcggctcgtcctgcatctaccccaagttcgcgccgcagcccatcccggaggatgccctgctctccggcccgctcgagcccaccaacgagtggtacgccgtcgccaagatcgctggcatcaagatgtgccaggcctaccgcatccagcacggcctcgacgccatctccgccatgccaaccaacctctacggcccgcaggacaacttccacccggagaactcacacgtcttgcccgccctcatacgccggttccacgaggccaaggcgtccaatgctcccgaggtcgtcgtatggggttccggatcgccgctgcgggagttcctccacgtcgatgacctcgccgacggcgttatcttcttgatggatcagtactccgggttggagcatgttaatggggggagtgggagtgaggtgaccatcaaagagctcgcggagctggtgaaggaggtggttggcttccaggggaagctggtgtgggactccagcaagccggacggcacacccaggaagctcagggatagctccaagatacatggaatggggtgga

SEQ ID NO: 1642 - protein, 302 aa, Panicum virgatum
  misc_feature (21)..(253): Pfam Name: Epimerase Pfam Description: NAD dependent epimerase/dehydratase family
  misc_feature: Ceres Clone ID no. 1996507
  misc_feature: Bit score of 769.0 for HMM based on sequences of Figure 9
  misc_feature: Functional Homolog Of SEQ ID NO. 1624
MGTVTAADPLPSFLADKDAKVFVAGHRGLVGSAILRRLLSLGFTDVVVRKHAELDLTRQADVEAFFAAEQPRYVVLAAAKVGGIHANSTFPADFIAANLQIQTNVVDAALRCGSVRKLLFLGSSCIYPKFAPQPIPEDALLSGPLEPTNEWYAVAKIAGIKMCQAYRIQHGLDAISAMPTNLYGPQDNFHPENSHVLPALIRRFHEAKASNAPEVVVWGSGSPLREFLHVDDLADGVIFLMDQYSGLEHVNGGSGSEVTIKELAELVKEVVGFQGKLVWDSSKPDGTPRKLRDSSKIHGMGW

SEQ ID NO: 1643 - DNA, 972 bp, Populus balsamifera subsp. trichocarpa
  misc_feature: Ceres Annot ID no. 1454854
  misc_feature: Encodes the peptide sequence at SEQ ID NO. 1644
atgggcgaccccacccatgactcctccgatttcctcaccgacaaatcggctaaaatctttgtggctggacaccgcggtctagtcggctcggcaatcgtccgtaaacttcaatcccttggcttcaccaatcttgtcctgcggtcccactccgagctcgatctcactcgccaatttgatgtggactccttctttgccgccgagaagccccgatttgttatcctagccgctgctaaagtcggcgggatccacgctaacaatacgtaccctgccgatttcattgctataaatctccagatccaaactaatgtgattgactcctcatttcgccacggagttaagaaatttttgtttttgggatcttcatgtatttacccaaagttagcaccgcagcccattcctgaaaatgcactgcttactgggcctttagagcctacgaatgagtggtacgcaattgcgaagatagctgggattaagatgtgccaggcttacaggattcagtatagctgggatgctatttctggaatgccgaccaacttatatggtcggaatgataattttcatccggagaattctcatgttttgccggcattgatgaggaggtttcacgaggcgaaggtgaataatgcgaaacaagtgctggtctggggaactgggagtccgttgagggagtttttgcatgttgatgatttggcggatgcggtggtgtttttgatggacaagtatagtgggttggagcatttaaatgtgggcagtgggaaggaggttactataaaggatttggcagagttggtgaaggaggttgtagggtttgaaggtgatcttgtttgggatacatcaaagccagatgggactccgaggaagttaatggataattctaagttgttggggttgggttggacaccgaagatttcacttaaggatgggcttgttgatacttataagtggtatgtggagaatgtggcggggcaatga

SEQ ID NO: 1644 - protein, 323 aa, Populus balsamifera subsp. trichocarpa
  misc_feature (19)..(250): Pfam Name: Epimerase Pfam Description: NAD dependent epimerase/dehydratase family
  misc_feature: Ceres Annot ID no. 1454854
  misc_feature: Bit score of 873.9 for HMM based on sequences of Figure 9
  misc_feature: Functional Homolog Of SEQ ID NO. 1624
MGDPTHDSSDFLTDKSAKIFVAGHRGLVGSAIVRKLQSLGFTNLVLRSHSELDLTRQFDVDSFFAAEKPRFVILAAAKVGGIHANNTYPADFIAINLQIQTNVIDSSFRHGVKKFLFLGSSCIYPKLAPQPIPENALLTGPLEPTNEWYAIAKIAGIKMCQAYRIQYSWDAISGMPTNLYGRNDNFHPENSHVLPALMRRFHEAKVNNAKQVLVWGTGSPLREFLHVDDLADAVVFLMDKYSGLEHLNVGSGKEVTIKDLAELVKEVVGFEGDLVWDTSKPDGTPRKLMDNSKLLGLGWTPKISLKDGLVDTYKWYVENVAGQ

SEQ ID NO: 1645 - DNA, 1342 bp, Zea mays
  misc_feature: Ceres Clone ID no. 1393254
  misc_feature: Encodes the peptide sequence at SEQ ID NO. 1646
aaaaaaagaagtggccgacaacgtttcagatcgccggcggagtctcagatcccccacgttaccatcctccgaagattgtaacttttctacaaatctacgcttttgtacgttgacttcgaaaaactggtggttataagtcaaaatctctctctctctatatctctcgtcttctttgcagaaaccttttattccgatccaataaaaactctacaatggcagacaccacaggatccggttcgtttatgtcggagaaatccgcaaagatcttcgtcgctggacacagaggacttgtcggatccgcaattgtccgaaaactccaagaatccggtttcaccaatctcctcctccgaacccactccgacctcgacctcactaaccaatccgacgtcgaatccttcttctccacagagaagcctgcttacgtcatcctcgccgcagccaaagtcggtggcatccacgccaacaacacctacccagccgacttcatcgccgtcaatctccaaatccaaaccaacgtgatccactccgcttacactaacggcgtcaagaaactcctcttcctcggctcctcttgcatctaccccaagttcgctcctcagcccatccccgaatcagctctcctcaccggcccactcgagcccactaacgagtggtacgccatcgccaagatcgcggggatcaagatgtgtcaagcgtacaggattcagcatcagtgggatgctatctccggcatgccgaccaacctttacggtccgaacgataatttccaccctgagaactctcatgtgctgcccgctctgatgaggaggtttcacgaagcgaaggccaatagtgctgaggaagttgtggtgtggggaagtgggagtccgttgagggagttcttgcacgtggatgatttggctgatgcttgtgtgttcttgatggagaggtacagtgggtttgagcatgtgaatgtggggagtggtgtggaagttacgatcaaggagttggctgagttggttaaggaggttgttgggtttgaagggaagcttgtttgggattgtactaagcctgacgggacgccgaggaagctgatggatagctcgaagctcgcgtctttgggttggacgccgaaggtttctattagagatggtttgcgccagacttatgattggtatttggagaatgttgtgcagaagcagcagtaaaaaaatgaaaaacctttcaggtgattgattgcgtttaatgttttatgattatgcgttttggctctatatctcttctatctaatgtaaacttttatattcatggatatcatatcatataccatgttgagattatcaataaaaatcgaataccttct

SEQ ID NO: 1646 - protein, 324 aa, Zea mays
  misc_feature (18)..(249): Pfam Name: Epimerase Pfam Description: NAD dependent epimerase/dehydratase family
  misc_feature: Ceres Clone ID no. 1393254
  misc_feature: Bit score of 868.8 for HMM based on sequences of Figure 9
  misc_feature: Functional Homolog Of SEQ ID NO. 1624
MADTTGSGSFMSEKSAKIFVAGHRGLVGSAIVRKLQESGFTNLLLRTHSDLDLTNQSDVESFFSTEKPAYVILAAAKVGGIHANNTYPADFIAVNLQIQTNVIHSAYTNGVKKLLFLGSSCIYPKFAPQPIPESALLTGPLEPTNEWYAIAKIAGIKMCQAYRIQHQWDAISGMPTNLYGPNDNFHPENSHVLPALMRRFHEAKANSAEEVVVWGSGSPLREFLHVDDLADACVFLMERYSGFEHVNVGSGVEVTIKELAELVKEVVGFEGKLVWDCTKPDGTPRKLMDSSKLASLGWTPKVSIRDGLRQTYDWYLENVVQKQQ

SEQ ID NO: 1647 - protein, 324 aa, Picea sitchensis
  misc_feature (21)..(252): Pfam Name: Epimerase Pfam Description: NAD dependent epimerase/dehydratase family
  misc_feature: Public GI ID no. 116788501
  misc_feature: Bit score of 823.2 for HMM based on sequences of Figure 9
  misc_feature: Functional Homolog Of SEQ ID NO. 1624
MGELGQEVCSESFLMDTRAKLFVAGHRGLVGSAIVRKLIESGFENLVLRTHQELDLTRQADVEKFFSDERPKYVIVTAAKVGGIHANNTYPADFIAINLQIQTNVIDASYRNGVKKLLFLGSSCIYPKFAPQPITEEALLTGPLEPTNEWYAIAKIAGIKMCQAYRLQYKWDAISGMPTNLYGPNDNFHPENSHVLPALIRRFHEAKVSGAKEVVVWGTGSPLREFLHVDDLADAVMFLMDKYSDLPHVNMGSGIEVTIKNLAELVKEVVGFEGELKWDPTKPDGTPRKLMDSSRLANMGWKPKISLRDGLIGTYKWYVENYLQ

SEQ ID NO: 1648 - protein, 323 aa, Arabidopsis thaliana
  misc_feature (19)..(250): Pfam Name: Epimerase Pfam Description: NAD dependent epimerase/dehydratase family
  misc_feature: Public GI ID no. 30698929
  misc_feature: Bit score of 834.7 for HMM based on sequences of Figure 9
  misc_feature: Functional Homolog Of SEQ ID NO. 1624
MAETIGSEVSSMSDKSAKIFVAGHRGLVGSAIVRKLQEQGFTNLVLKTHAELDLTRQADVESFFSQEKPVYVILAAAKVGGIHANNTYPADFIGVNLQIQTNVIHSAYEHGVKKLLFLGSSCIYPKFAPQPIPESALLTASLEPTNEWYAIAKIAGIKTCQAYRIQHGWDAISGMPTNLYGPNDNFHPENSHVLPALMRRFHEAKVNGAEEVVVWGTGSPLREFLHVDDLADACVFLLDRYSGLEHVNIGSGQEVTIRELAELVKEVVGFEGKLGWDCTKPDGTPRKLMDSSKLASLGWTPKVSLRDGLSQTYDWYLKNVCNR

SEQ ID NO: 1649 - protein, 312 aa, Arabidopsis thaliana
  misc_feature (8)..(239): Pfam Name: Epimerase Pfam Description: NAD dependent epimerase/dehydratase family
  misc_feature: Public GI ID no. 75098650
  misc_feature: Bit score of 818.9 for HMM based on sequences of Figure 9
  misc_feature: Functional Homolog Of SEQ ID NO. 1624
MSDKSAKIFVAGHRGLVGSAIVRKLQEQGFTNLVLKTHAELDLTRQADVESFFSQEKPVYVILAAAKVGGIHANNTYPADFIGVNLQIQTNVIHSAYEHGVKKLLFLGSSCIYPKFAPQPIPESALLTASLEPTNEWYAIAKIAGIKTCQAYRIQHGWDAISGMPTNLYGPNDNFHPENSHVLPALMRRFHEAKVNGAEEVVVWGTGSPLREFLHVDDLADACVFLLDRYSGLEHVNIGSGQEVTIRELAELVKEVVGFEGKLGWDCTKPDGTPRKLMDSSKLASLGWTPKVSLRDGLSQTYDWYLKNVCNR

SEQ ID NO: 1650 - protein, 312 aa, Physcomitrella patens subsp. patens
  misc_feature (9)..(240): Pfam Name: Epimerase Pfam Description: NAD dependent epimerase/dehydratase fam
  misc_feature: Public GI ID no. 168058075
  misc_feature: Bit score of 750.4 for HMM based on sequences of Figure 9
  misc_feature: Functional Homolog Of SEQ ID NO. 1624
MGVDKDAKIFVAGHRGLVGAAVVRALKKDGYNNLVMKTHKELDLTRQAAVEEFFDTEKPAYVILAAAKVGGIHANSTYPAEFIAVNLQIQTNVIDAAYKSGVKKLLFLGSSCIYPKFAQVPIVEESLLTGPLEATNEWYAVAKIAGIKMCQAYRLQYNFDAISGMPTNLYGPHDNFHPENSHVLPALIRRFHEAKVNGAKEVVVWGSGSPFREFLHVDDLAEATVFLLQNYSAHEHVNMGSGSEVSIKELAEMVKEVVGFQGQLTWDTSKPDGTPRKLIDSSKLANMGWQARIPLKEGLAETYKWYCENYNV

SEQ ID NO: 1651 - DNA, 1353 bp, Arabidopsis thaliana
  misc_feature: Ceres Clone ID no. 19576
  misc_feature: Encodes the peptide sequence at SEQ ID NO. 1652
gcggatattcagatctcctccacattacattctccgaggaatttaacctttacctacaaatctaagcttctgtcgttgacttcgaaaactgatatctataaggcaaaatccccattctcaatctctcatcgtcttgtagaactaattgactcaacaatggcggacaccacaggatccgagatgaaatcaggttcgtttatgttagagaaatccgccaaaatctttgttgctggccataggggattggttggatccgccatagtccgcaagctccaggatcagggtttcaccaatctcgtccttcgaacacattccgagcttgatctcactagccaatcagatgttgaatccttctttgctacagagaaaccagtttatgtcatcctcgctgcggctaaagtcggtggaattcatgccaacaacacatacccagctgatttcattggtgtcaatctccaaatccagaccaatgtgatccactctgcttataagcacggtgtgaagaaactcctcttccttggttcatcttgcatttaccccaaatttgctcctcagccgattcccgaatctgcgcttcttaccggtccgctcgaaccgacaaacgaatggtatgcgatcgccaagatcgcgggtattaagatgtgtcaagcttaccggcttcagcatcagtgggatgctatctccggtatgcccacgaatctgtatggtcagaatgataatttccacccggagaattcccatgtgctgcctgctctcatgaggaggtttcatgaagctaaagccaataatgctgacgaagttgtggtttggggaagtggaagcccgttgagggagtttttacatgtggatgatttggctgatgcttgtgttttcttgatggatcagtacagcggatttgagcatgtgaatgtaggaagtggtgttgaagtgacgatcaaagaattggctgagttggtgaaagaagttgttgggtttaaaggaaagcttgtttgggataccacaaaaccagacgggacaccaaggaaactgatggataactcgaagcttgcgtcttgggatggacaccgaagatttcgctaaaagatggcctctcccaaacttatgaatggtatttggaaaatgttgtgcagaagaagcagtaaaaaaaacaaggtccaaaactcaaagcaatattcattctctttacacgtgaatgtttatgcgtttgatttttggttctatacagatctctctatctcttttatgtaatttttgtattcatggatttcatacagttcaagttaagcaaacttactttgtaataaatgtaccattgttgttgagattatcaataatcgaatagctttcttctcc

SEQ ID NO: 1652 - protein, 307 aa, Arabidopsis thaliana
  misc_feature (22)..(253): Pfam Name: Epimerase Pfam Description: NAD dependent epimerase/dehydratase family
  misc_feature: Ceres Clone ID no. 19576
  misc_feature: Bit score of 779.6 for HMM based on sequences of Figure 9
  misc_feature: Functional Homolog Of SEQ ID NO. 1624
MADTTGSEMKSGSFMLEKSAKIFVAGHRGLVGSAIVRKLQDQGFTNLVLRTHSELDLTSQSDVESFFATEKPVYVILAAAKVGGIHANNTYPADFIGVNLQIQTNVIHSAYKHGVKKLLFLGSSCIYPKFAPQPIPESALLTGPLEPTNEWYAIAKIAGIKMCQAYRLQHQWDAISGMPTNLYGQNDNFHPENSHVLPALMRRFHEAKANNADEVVVWGSGSPLREFLHVDDLADACVFLMDQYSGFEHVNVGSGVEVTIKELAELVKEVVGFKGKLVWDTTKPDGTPRKLMDNSKLASWDGHRRFR

SEQ ID NO: 1653 - DNA, 1164 bp, Panicum virgatum
  misc_feature: Ceres Clone ID no. 1823703
  misc_feature: Encodes the peptide sequence at SEQ ID NO. 1654
atgtactcgagcgaagaatttagctacctccaagtaccacaataatgccttcccacggggctccacagcaggttgccaacgatggcacgtcgtcgttcctcgccgacaagtccgcgaaggtcttcctcgccggccacaaaggcatgctgggctccgccgtgcaccgccgcctggccgcgctgggcttcaccaacgtcgtcggccgcacccgcgcggagctggacctcacctgcgaggccgcggtgcgcaagttcttcgacgcggagcgaccccgctacgtgatcctcgccgcgggcaaggtgggcggcctgcacgccagctcggccgcgccggtcgacttcatgaccgagaacctccgcatcaccacgaacgtcctcgccgccgcccggctctgcggcaccgtgcgcaagctgctcttcctcgccacctccgccatctaccccgcggacgccccccagccgatcccggagtccgcgctcctcgccggccctccggcgccggggaacgagtggtatgccatccccaagatcgtgggcatcaagatgtgccaggcctaccgcgccgagctcggcatggacgccatcgtggcggcgcccaacaacctgtacggcccgcgcgagccgttcccgtcggagagctcccacgtcatcccggcgctcatccgccgcttccaccgcgccaaggccgccggcgcccccgaggtcgccgtctggggctccggcctccagctgcgcgagttcacgcacgccgacgacgccgcggacgccatcgtgctgctgatggacaggtactcgggcgccgagcacgtcaacgtcgggagcgggcgcgaggtgacggtgcgcgagctcgcggagatggtgagggaggtggtcgggtacgaggggcgggtcgtctgggacacgagccggccggacggcgtgatgaggcggctgctggatagctccaagatgagggagatggggtgggagcccaaggtcgagctgcgggatgggctcaagaagttgtacgagggatacctgggtagcagcgtcgtctccaactttgaaaccgtgaacagatgaactcaagcgcgtacatggactccgtgtatctgagagactgagactgtcaatctgctggtgcagcttggtctgtaataaactggtaaaaatattcggaaatatt

SEQ ID NO: 1654 - protein, 338 aa, Panicum virgatum
  misc_feature (26)..(258): Pfam Name: Epimerase Pfam Description: NAD dependent epimerase/dehydratase fam
  misc_feature: Ceres Clone ID no. 1823703
  misc_feature: Bit score of 573.9 for HMM based on sequences of Figure 9
  misc_feature: Functional Homolog Of SEQ ID NO. 1624
MPSHGAPQQVANDGTSSFLADKSAKVFLAGHKGMLGSAVHRRLAALGFTNVVGRTRAELDLTCEAAVRKFFDAERPRYVILAAGKVGGLHASSAAPVDFMTENLRITTNVLAAARLCGTVRKLLFLATSAIYPADAPQPIPESALLAGPPAPGNEWYAIPKIVGIKMCQAYRAELGMDAIVAAPNNLYGPREPFPSESSHVIPALIRRFHRAKAAGAPEVAVWGSGLQLREFTHADDAADAIVLLMDRYSGAEHVNVGSGREVTVRELAEMVREVVGYEGRVVWDTSRPDGVMRRLLDSSKMREMGWEPKVELRDGLKKLYEGYLGSSVVSNFETVNR

SEQ ID NO: 1655 - DNA, 1017 bp, Sorghum bicolor
  misc_feature: Ceres Annot ID no. 8743837
  misc_feature: Encodes the peptide sequence at SEQ ID NO. 1656
atgcctgcacacaatgctcggcaagtgccaaaggctgccaacaatggcacgccgtcattcctctccgacaagtcggcgaaagtcttcctcgccggccacaaaggtatgctgggcacggccatccaccgtcgcctggccgcgctgggcttcaccaacatcgtcggccgcacccgcgccgagctcgacctgacgtgcgagcccgccgtccacaagttcttcgacgcggagcagcctcgctacgtgatcctcgccgcgggcaaggtgggcggcctccacgccagctccgccgcgccggccgacttcatgaccgagaacctccgcatcaccgtgaacgtcctcaccgccgcacgccgctgcggcaccgtccgcaagctgctattcctcgccacctccgccgtctaccccgtcgacgccccccagccgataccggagtccgcgctcctcaccggcccaccggcgccgggaaacgagtggtatgccatccccaagatcgttggcatcaagatgtgccaggcgtaccgcgccgagctcgacgacggcatggacgccatcgtggcgacgcccaacaacctgtacggcccgcgcgacccgttcccgtcggagagctcccacgtcatcccggcgctgatccggcggttccacgacgccaaggccagcggcgcccccgaggtcgtcgtgtggggctccggccgccagctgcgggagttcacgcacgccgacgacgccgcggacgccgccgtgctgctgatggagaggtactccggggccgagcacgtcaacgtcgggagcgggcgcgaggtgacggtgcgcgagctcgcggagacggtgagggaggtggtcgggtacgaggggcgggtcgtctgggacacaagccggccggacagcgtgatgaggcggctgctggatagctctaagatggcggcgctggggtgggagcccaaggtcgagctgagggacgggctcaagaagctgtacgagtggtacctgagtggccgcgccgcaagcttccaaccatga

SEQ ID NO: 1656 - protein, 338 aa, Sorghum bicolor
  misc_feature (28)..(262): Pfam Name: Epimerase Pfam Description: NAD dependent epimerase/dehydratase fam
  misc_feature: Ceres Annot ID no. 8743837
  misc_feature: Bit score of 569.0 for HMM based on sequences of Figure 9
  misc_feature: Functional Homolog Of SEQ ID NO. 1624
MPAHNARQVPKAANNGTPSFLSDKSAKVFLAGHKGMLGTAIHRRLAALGFTNIVGRTRAELDLTCEPAVHKFFDAEQPRYVILAAGKVGGLHASSAAPADFMTENLRITVNVLTAARRCGTVRKLLFLATSAVYPVDAPQPIPESALLTGPPAPGNEWYAIPKIVGIKMCQAYRAELDDGMDAIVATPNNLYGPRDPFPSESSHVIPALIRRFHDAKASGAPEVVVWGSGRQLREFTHADDAADAAVLLMERYSGAEHVNVGSGREVTVRELAETVREVVGYEGRVVWDTSRPDSVMRRLLDSSKMAALGWEPKVELRDGLKKLYEWYLSGRAASFQP

SEQ ID NO: 1657 - protein, 347 aa, Oryza sativa subsp. japonica
  misc_feature (37)..(269): Pfam Name: Epimerase Pfam Description: NAD dependent epimerase/dehydratase fam
  misc_feature: Public GI ID no. 115469270
  misc_feature: Bit score of 561.6 for HMM based on sequences of Figure 9
  misc_feature: Functional Homolog Of SEQ ID NO. 1624
MPSQQRSSSGSTAKAGDADGDGDAAAVSFLGDKSAKVFIAGHRGMVGSAVHRKLDALGFTNVVVRTRAELDLACQAAVEAFFAAELPRYVILAAAKVGGVHASSAAPAEYLTENLRITVNVVDAARRCGSVRKLLVLASSTIYPADAPQPTPESALLTGPPAEGSEWYAIPKIAGIKMCQAVRAEYGLDAIAAAPNNLYGPRHPFPPEHSHVIPALIRRFHRAKLEGAGEVAVWGSGAAAREFTHVDDLAEAVVVLMERYSGEEHVNVGSGEEVTVRELAEAVRGVVGYEGVVAWDAARPEGVARRVVDSGRMRKLGWEPRVALRDGIQDLYRFYLRHECGGQAHHA

SEQ ID NO: 1658 - protein, 347 aa, Oryza sativa subsp. indica
  misc_feature (37)..(269): Pfam Name: Epimerase Pfam Description: NAD dependent epimerase/dehydratase fam
  misc_feature: Public GI ID no. 125556305
  misc_feature: Bit score of 558.4 for HMM based on sequences of Figure 9
  misc_feature: Functional Homolog Of SEQ ID NO. 1624
MPSQQRSSSGSTAKAGDADGDGDAAAVSFLGDKSAKVFIAGHRGMVGSAVHRKLDALGFTNVVVRTRAELDLACQAAVEAFFAAELPRYVILAAAKVGGVHASSAAPAEYLTENLRITVNVVDAARRCGSVRKLLVLASSTIYPADAPQPTPESALLTGPPAAGSEWYAIPKIAGIKMCQAVRAEYGLNAIAAAPNNLYGPRHPFPPEHSHVIPALIRRFHRAKLEGAGEVAVWGSGAAAREFTHVDDLAEAVVVLMERYSGEEHVNVGSGEEVTVRELAEAVRGVVGYEGVVAWDAARPEGVARRVVDSGRMRKLGWEPRVALRDGIQDLYRFYLRHECGGQAHHA

SEQ ID NO: 1659 - DNA, 1553 bp, Panicum virgatum
  misc_feature: Ceres Clone ID no. 1769660
  misc_feature: Encodes the peptide sequence at SEQ ID NO. 1660
acagatagtgcacccatttcctctgcacaaatgatcacccagatcaatggtgctgctgcagctgttgttgcagcatttctggtcttctccactcacctctacttcccaaccactgctcatctctactgcccagccactccattgccccaaggcctctctgatctcacagaaccttcctttccattctgcccgcttacaggcagttccgtctgtaacgatcatcagtatggctgtaagtacaacccgctatgcgacgacttcccaccggacttccctccacctgacacacccatggtgacggtattctgtgtcgaccccaatggctgctgcgacttcacaacagtgcaggccgcggtcaatgccgttccaaatcacagcaggaagaggaatgttgtttggatcaacaagggcatctactttgagaaggtgacggtcccagcatccaagcccaacatcacatttcaagggcaggggtttgacattacagcgattgcttggaacgacaccgccaaatcagcaaacggcacgttctatagtgcctcagtctccattttcgcatcaggattcattgcgaaaaacataagcttcattaatgtagcaccaatcccaaggcctggtgctgttgacgcacaggcagtggcaatccggattaatggtgaccaagcagcgttctggggctgtggcttcttcggagcacaagacacactctgtgatgatagaggccggcattacttcaaggaatgtttcatccagggctccattgacttcatctttggagatgctaggtcactctatgaaaattgcagattgatatccattgcagatccagtgccttcaggacaaagatcaattacaggttcagtcactgcacatggtcgggtatcagaagatgataacactggctactcatttgtcaaatgtagcataggtggcacaggttggatatggcttggccgagcatggagaccatattctcgggtcgtctttgcctacacatcaatgtcagacatcatagcctctgaaggatggaatgactggaatgatccctcaagagatcagactgtattttatggagagtacaagtgtacaggtgatggtgcaaacctggcagatagagtgccatatgctcagaagcttagtgatgtgcaagttttaccttacttgagcacatctttcatcgatggagatcaatggctgaaaccataccgtgactcactaatatctgcttgaagcaattctaggtagaggacaacagtgtcacagacttgcaacagggaaaaatattacatgaaagcatctcataatcaacatttgagcagcacatgagaatgcaacacacattaatgccaggggagaaaggaggcaacttcaagtgctgcattacaataatcggtgcttgcataacatacaatagtcaagagttgactaatataaacatcctatttgcaatatagttgtcatgttgaaataaaaattgggcagatctcatcttcctgtattctgattgttgcttccaacaactactatgcctagaatgaaatctcacttggtgc

SEQ ID NO: 1660 - protein, 399 aa, Panicum virgatum
  misc_feature (94)..(386): Pfam Name: Pectinesterase Pfam Description: Pectinesterase
  misc_feature: Ceres Clone ID no. 1769660
  misc_feature: Bit score of 1055.8 for HMM based on sequences of Figure 20
  misc_feature: Functional Homolog Of SEQ ID NO. 1660
  misc_feature: in Figure 20
MITQINGAAAAVVAAFLVFSTHLYFPTTAHLYCPATPLPQGLSDLTEPSFPFCPLTGSSVCNDHQYGCKYNPLCDDFPPDFPPPDTPMVTVFCVDPNGCCDFTTVQAAVNAVPNHSRKRNVVWINKGIYFEKVTVPASKPNITFQGQGFDITAIAWNDTAKSANGTFYSASVSIFASGFIAKNISFINVAPIPRPGAVDAQAVAIRINGDQAAFWGCGFFGAQDTLCDDRGRHYFKECFIQGSIDFIFGDARSLYENCRLISIADPVPSGQRSITGSVTAHGRVSEDDNTGYSFVKCSIGGTGWIWLGRAWRPYSRVVFAYTSMSDIIASEGWNDWNDPSRDQTVFYGEYKCTGDGANLADRVPYAQKLSDVQVLPYLSTSFIDGDQWLKPYRDSLISA

SEQ ID NO: 1661 - protein, 397 aa, Vitis vinifera
  misc_feature (98)..(390): Pfam Name: Pectinesterase Pfam Description: Pectinesterase
  misc_feature: Public GI ID no. 157355547
  misc_feature: Bit score of 1061.6 for HMM based on sequences of Figure 20
  misc_feature: Functional Homolog Of SEQ ID NO. 1660
  misc_feature: in Figure 20
MSLKAISLPLLFAIFASLAMYTHLSLPNNPKFVKHLIDLSLKTFSSSPFVSTPMVYSALDCGLHRHKHHQDSTTGSLCDDFPPDFPPPDTNTTSILCVDRNGCCNFTMVQSAVDAVSVLSQKRTIIWINSGVYYEKVIIPKNKPNITFQGQGFASTAIVWNDTANSSHGTFYSGSVQVFAANFIAKNISFMNVAPIPKPGDVGAQAVAIRVAGDQAAFWGCGFFGSQDTLHDDRGRHYFRDCYIQGSIDFIFGDARSFYENCQLISMANPVPVGSKVINGAITAHGRTSMDENTGYAFVACTVGGTGRVWLGRAWRPFSRVVFAYTSLSDIIASEGWNDFNDPTRDQSIFYGEYMCKGPGANTSTRVPYAQKLNDTQASIFLNVSFIDADQWLQPYA

SEQ ID NO: 1662 - protein, 389 aa, Medicago truncatula
  misc_feature (92)..(384): Pfam Name: Pectinesterase Pfam Description: Pectinesterase
  misc_feature: Public GI ID no. 124360659
  misc_feature: Bit score of 1047.5 for HMM based on sequences of Figure 20
  misc_feature: Functional Homolog Of SEQ ID NO. 1660
  misc_feature: in Figure 20
MNLKSNNFLSLLVPIAAIFASLHLINPNPQFLTNFNYLNFTTLSPSSLYLGRDHHHRPHKKHPDSGSDGSICDDFPPGIPPPNTNTTSYLCVDRKGCCNFTTVQQAVNAVPDFSLKRNIIWINSGFYYEKVTVPKTKPNITFQGQSYTSTAIAWNDTAKSANGTFYSGSVQVFASNFIAKNISFMNLAPIPTPGAEGAQAVAMRISGDQAEFRGCGFFGAQDTLHDDKGRHYFKDCYIQGSIDFIFGNARSLYENCQLVSIANPVPPGQKNINGAVTAHGRVSMDENTGYVFLNSTIGGNGRIWLGRAWRPYSRVIFAFSIMSDIIAPEGWNDFNDPTRDQTIFYGEYNCSGPGANVNMRVPYVQRLNDTQAFPFLNTSFIDGDQWLET

SEQ ID NO: 1663 - DNA, 1143 bp, Populus balsamifera subsp. trichocarpa
  misc_feature: Ceres Annot ID no. 1527994
  misc_feature: Encodes the peptide sequence at SEQ ID NO. 1664
atggcatcagctgtttttatcagtccaaacctttctcttttgcaccatctcattgaacttggtttggccactttttcatcgccttttattgcaactttcattccatatagcattggaggtcgccgtcatcaccaccaccataataaacaccctagtgatggaaaaatagtcaacatttgtgaagatttccctcctgacttcccccctccagacaccaacacaacctcaaccatttgtgtcgatcgaaacggatgctgtaatttcacaacagttcaatcagctgttgattcggtcatgaattttagtcagaaaagaaccataatttggatcaattctggcatttactatgagaaagtcaccgttctaaagtacaaacagaacattacatttcaaggacaaggctatacatcaactgcaattgtatggaatgacactgcaaaatcttctaatgggacattttatagcggttctgttcaagttttctcgaacaacttcattgctaagaacataagtttcatgaatgtggctccaattccaagccccggtgatattggagcccaagcagtggcgattagaatctctggagaccaagctttctttctgggctgtggattctttggagcacaagacacccttcatgatgatagaggtcgccattactttaaggattgttatatccaaggctctattgatttcatctttggcaatgcaaggtcactctatgagaattgccagttgatttctatggctaacccagtagctccaggagcaaaaggcataaatggagcagtaacagcacacggtagaatttccaaggatgaaaacacaggttttgcctttgtaaattgcagcttaggaggtacaggaagaatatggctaggtagagcttggaggccatattcctcagtcattttttcatacactagcatgactgatatcgttgtgcctgagggctggaatgacttcaatgatcccaccagagaccagactattttctatggagaatacaattgtttaggtgctggagccaatatgactatgagggcgccttatgttcaaaaacttaatgatacacaagcttctcctttcctcaacgtgtcatttattgatggagatcaatggttacaatcatttattaattaa

SEQ ID NO: 1664 - protein, 380 aa, Populus balsamifera subsp. trichocarpa
  misc_feature (77)..(372): Pfam Name: Pectinesterase Pfam Description: Pectinesterase
  misc_feature: Ceres Annot ID no. 1527994
  misc_feature: Bit score of 1037.6 for HMM based on sequences of Figure 20
  misc_feature: Functional Homolog Of SEQ ID NO. 1660
  misc_feature: in Figure 20
MASAVFISPNLSLLHHLIELGLATFSSPFIATFIPYSIGGRRHHHHHNKHPSDGKIVNICEDFPPDFPPPDTNTTSTICVDRNGCCNFTTVQSAVDSVMNFSQKRTIIWINSGIYYEKVTVLKYKQNITFQGQGYTSTAIVWNDTAKSSNGTFYSGSVQVFSNNFIAKNISFMNVAPIPSPGDIGAQAVAIRISGDQAFFLGCGFFGAQDTLHDDRGRHYFKDCYIQGSIDFIFGNARSLYENCQLISMANPVAPGAKGINGAVTAHGRISKDENTGFAFVNCSLGGTGRIWLGRAWRPYSSVIFSYTSMTDIVVPEGWNDFNDPTRDQTIFYGEYNCLGAGANMTMRAPYVQKLNDTQASPFLNVSFIDGDQWLQSFIN

SEQ ID NO: 1665 - DNA, 1336 bp, Arabidopsis thaliana
  misc_feature: Ceres Clone ID no. 1150649
  misc_feature: Encodes the peptide sequence at SEQ ID NO. 1666
attaagttccttttatcctttccctctcaaacccctaaatcaaccaatcaaagtttcacagaattatcttctattattcaggtatgaaaataatctcattatccatatccataggtatcgcaataattgccgttctggcatctaaaactctctttaaaacacatcctgaagcttttggtatcaaagcaatatcatattcattcaagaaatccttatgtgatcaccatcaccatcatcatcatcatcatcatcaccaccaccggcataaaccttcggataccaaaagaaaggtatcaatatgcgacgatttccctaaaaatatacctccattggacaccgacacaacatcctatctctgcgtggataagaacggttgctgcaatttcacgacggtgcaatcggccgtggacgcagtggggaatttcagtcaaagaaggaacgtgatttggataaactccggcatgtactatgaaaaagtggtgattccgaagactaaaccaaacataacgttgcaaggacaaggcttcgacattacagccattgcgtggaacgacactgcctactcagctaatggcacattttattgtgccacggtccaagtctttggttctcagttcgtcgctaagaacatcagtttcatgaacgtggcaccgataccaaagccaggagacgtaggagctcaggcggtggcaataagaatcgccggagatgaatcagcgtttgtgggatgcggtttcttcggagcacaagacactcttcatgacgatagaggtcgtcattacttcaaggattgttacattcaaggatccattgatttcatcttcggcaacgctaagtctctctatcaggactgtcgaataatatcaatggctaatcaattgagcccaggttcaaaagcagttaacggagccgtgactgcaaatgggcgtagctccaaggacgagaacagtggcttctccttcgtcaactgcacaatcggtggaactggtcacgtgtggctaggtcgtgcatggcggccttactcacgtgtggttttcgtttccactaccatgaccgatgttatcgcacccgaaggctggaacaacttcaacgatccctctagggacgcgactatattttatggagagtataattgttcgggtccaggagcagatatgtcaaagagaacaccatatgttcaaaaacttaatgagactcaagttgctctattaattaacacgtcttttattgatggagatcaatggttacagttttctgacctttaaaggaaatatatcaaccaaaactcgttggaatatactctttttatatatcttgatcggaacattatgattgg

SEQ ID NO: 1666 - protein, 393 aa, Arabidopsis thaliana
  misc_feature (93)..(385): Pfam Name: Pectinesterase Pfam Description: Pectinesterase
  misc_feature: Ceres Clone ID no. 1150649
  misc_feature: Bit score of 1043.1 for HMM based on sequences of Figure 20
  misc_feature: Functional Homolog Of SEQ ID NO. 1660
  misc_feature: in Figure 20
MKIISLSISIGIAIIAVLASKTLFKTHPEAFGIKAISYSFKKSLCDHHHHHHHHHHHHHRHKPSDTKRKVSICDDFPKNIPPLDTDTTSYLCVDKNGCCNFTTVQSAVDAVGNFSQRRNVIWINSGMYYEKVVIPKTKPNITLQGQGFDITAIAWNDTAYSANGTFYCATVQVFGSQFVAKNISFMNVAPIPKPGDVGAQAVAIRIAGDESAFVGCGFFGAQDTLHDDRGRHYFKDCYIQGSIDFIFGNAKSLYQDCRIISMANQLSPGSKAVNGAVTANGRSSKDENSGFSFVNCTIGGTGHVWLGRAWRPYSRVVFVSTTMTDVIAPEGWNNFNDPSRDATIFYGEYNCSGPGADMSKRTPYVQKLNETQVALLINTSFIDGDQWLQFSDL

SEQ ID NO: 1667 - DNA, 1050 bp, Sorghum bicolor
  misc_feature: Ceres Annot ID no. 8681260
  misc_feature: Encodes the peptide sequence at SEQ ID NO. 1668
atgatcgtgagcgtagctggtgctcttgttcttactagcctcctgctgtcatcggccatcggccggccctctcacctcctgtccaatgtcagtcgtgtcgatgacagcaccgactgtcagcatctcccactgagcttctcgccgtccgagacagcttccacggtgatcttctgcgtcgacaagaatggctgctgcaacttcaccacagtgcaggcagctgtggatgctgttcccgacaacggccagaagaggagcatcgtgtggatcatcggcatcttcgttgagaaggtcgtcgtcaggaaacccaacatcacgtttcaaggccaaggcctgaaggtgagcatgatcgtgtggaacgacactgctacgactgcaggcaacacgcccaacagcgcatctgtccacatcgatgcacctggcttcgtggcgaaaaacatgagcttcatgaattcagcacctgctccaaaacctggagctgaaggtgcacaggctgttgcaatgcgggtgagcggtgaccgagccgctttctggggctgcggcttctttggagcccaggacacactgcacgatgatcagaacaggcactatttcaaagagtgtcttatccaaggaagcatcgatttcatctttggtgatgcaaggtccctgcacgagaactgcacacttcacagcgtggcgcaagaattgccccaagggcagcgctccatcaacggcgcgatcactgcacaaggccggcgtttcgccgacaacaacaccggcttctccttcgttgggtgcacgatcggaggaagcggctggatcctactcggcagggcatggcaggcgtattcgcgtgtcatcttcgcgtacacctacatgccggcggccatcgtagccacagcaggcacggtgttttacggtgagttcgactgcaccggagatggagccaacatggccggcagggtctcttacgcccggaagttgaacaagatgcaagctcagccatttctgacgacggcgttcatcgatggtcctgaatggcttaagccattcaatgacagcctaatgtga

SEQ ID NO: 1668 - protein, 349 aa, Sorghum bicolor
  misc_feature (59)..(339): Pfam Name: Pectinesterase Pfam Description: Pectinesterase
  misc_feature: Ceres Annot ID no. 8681260
  misc_feature: Bit score of 843.5 for HMM based on sequences of Figure 20
  misc_feature: Functional Homolog Of SEQ ID NO. 1660
  misc_feature: in Figure 20
MIVSVAGALVLTSLLLSSAIGRPSHLLSNVSRVDDSTDCQHLPLSFSPSETASTVIFCVDKNGCCNFTTVQAAVDAVPDNGQKRSIVWIIGIFVEKVVVRKPNITFQGQGLKVSMIVWNDTATTAGNTPNSASVHIDAPGFVAKNMSFMNSAPAPKPGAEGAQAVAMRVSGDRAAFWGCGFFGAQDTLHDDQNRHYFKECLIQGSIDFIFGDARSLHENCTLHSVAQELPQGQRSINGAITAQGRRFADNNTGFSFVGCTIGGSGWILLGRAWQAYSRVIFAYTYMPAAIVATAGTVFYGEFDCTGDGANMAGRVSYARKLNKMQAQPFLTTAFIDGPEWLKPFNDSLM

SEQ ID NO: 1669 - protein, 393 aa, Arabidopsis thaliana
  misc_feature (93)..(385): Pfam Name: Pectinesterase Pfam Description: Pectinesterase
  misc_feature: Public GI ID no. 15220471
  misc_feature: Bit score of 1042.7 for HMM based on sequences of Figure 20
  misc_feature: Functional Homolog Of SEQ ID NO. 1660
MKIISLSISIGIAIIAVLASKTLFKTHPEAFGIKAISYSFKKSLCDHHHHHHHHHHHHHRHKPSDTKRKVSICDDFPKNIPPLDTDTTSYLCVDKNGCCNFTTVQSAVDAVGNFSQRRNVIWINSGMYYEKVVIPKTKPNITLQGQGFDITAIAWNDTAYSANGTFYCATVQVFGSQFVAKNISFMNVAPIPKPGDVGAQAVAIRIAGDESAFVGCGFFGAQDTLHDDRGRHYFKDCYIQGSIDFIFGNAKSLYQDCRIISMANQLSPGSKAVNGAVTANGRSSKDENSGFSFVNCTIGGTGHVWLGRAWRPYSRVVFVSTTMTDVIAPEGWNNFNDPSRDATIFYGEYNCSGPGADMSKRAPYVQKLNETQVALLINTSFIDGDQWLQFSDL

SEQ ID NO: 1670 - protein, 391 aa, Arabidopsis thaliana
  misc_feature (93)..(383): Pfam Name: Pectinesterase Pfam Description: Pectinesterase
  misc_feature: Public GI ID no. 2388565
  misc_feature: Bit score of 1025.1 for HMM based on sequences of Figure 20
  misc_feature: Functional Homolog Of SEQ ID NO. 1660
MKIISLSISIGIAIIAVLASKTLFKTHPEAFGIKAISYSFKKSLCDHHHHHHHHHHHHHRHKPSDTKRKVSICDDFPKNIPPLDTDTTSYLCVDKNGCCNFTTVQSAVDAVGNFSQRRNVIWINSGIEKVVIPKTKPNITLQGQGFDITAIAWNDTAYSANGTFYCATVQVFGSQFVAKNISFMNVAPIPKPGDVGAQAVAIRIAGDESAFVGCGFFGAQDTLHDDRGRHYFKDCYIQGSIDFIFGNAKSLYQDCRIISMANQLSPGSKAVNGAVTANGRSSKDENSGFSFVNCTIGGTGHVWLGRAWRPYSRVVFVSTTMTDVIAPEGWNNFNDPSRDATIFYGEYNCSGPGADMSKRAPYVQKLNETQVALLINTSFIDGDQWLQFSDL

SEQ ID NO: 1671 - protein, 397 aa, Vitis vinifera
  misc_feature (98)..(383): Pfam Name: Pectinesterase Pfam Description: Pectinesterase
  misc_feature: Public GI ID no. 147825336
  misc_feature: Bit score of 894.4 for HMM based on sequences of Figure 20
  misc_feature: Functional Homolog Of SEQ ID NO. 1660
MSLKAISLPLLFAIFASLAMYTHLSLPNNPKFVKHLIDLSLKTFSSSPFVSTPMVYSALDCGLHRHKHHQDSTTGSLCDDFPPDFPPPDTNTTSILCVDRNGCCNFTMVQSAVDAVSVLSQKRTIIWINSGVYYEKVIIPKNKPNITFQGQGFASTAIVWNDTANSSHGTFYSGSVQVFAANFIAKNISFMNVAPIPKPGDVGAQAVAIRVAGDQAAFWGCGFFGSQDTLHDDRGRHYFRDCYIQGSIDFIFGDARSFYENCQLISMANPVPVGSKVINGAITAHGRTSMDENTGYAFVACTVGGTGRVWLGRAWRPFSRVVFAYTSLSDIIASEGWNDFNDPTRDQVFFMGSTCAEVQEPIQVRGCLMLRNSMTHKLLSFLMCLSLMQTNGYNLMH

SEQ ID NO: 1672 - protein, 427 aa, Vitis vinifera
  misc_feature (105)..(396): Pfam Name: Pectinesterase Pfam Description: Pectinesterase
  misc_feature: Public GI ID no. 157356769
  misc_feature: Bit score of 625.8 for HMM based on sequences of Figure 20
  misc_feature: Functional Homolog Of SEQ ID NO. 1660
MRIKTTLFFWSSAFLIALLSITVALFTISSSTATITQGDLELAFLRRIVKQSGVEDFLSLLNQATDRASQRHHHHHHHHRKPEVICDDAKWKSKIISSYNVSLILTVDLKGCANFSSVQKAVDAVPDSSLSRTLIIMDSGIYREKVVVGASKTNLIFQGQGYLNTAIAWNDTANSTGGTSYSYSVAIFAPNFTAYNISFQNTAPPASPGDVGGQAVALRVANDQAAFYGCGFYGAQDTLHDDRGRHYFRECFIQGSIDFIFGNARSLYEECTINSTAKEVSSGISGAITAQGRQSVDEKTGFSFVKCVIGGTGRVWLGRAWGAYATVVFSNTYMADLVASDGWNDWRDPSRDQTVFFGEYDCKGPGSNNTYRVSYAKQLMQSEAAPYLDVSYIDGNEWLLPLPKDPTNERHRKICHACRVLCPENHS

SEQ ID NO: 1673 - DNA, 1227 bp, Populus balsamifera subsp. trichocarpa
  misc_feature: Ceres Annot ID no. 1485042
  misc_feature: Encodes the peptide sequence at SEQ ID NO. 1674
atgagaatcaaagcgatctccttttggctcttggcctttgctattgctctagtttctattgtcattgccctctatgaaatttctccgtccccttctactggtactccgataagtaatctgcatagctcatctcttactactcttaaaagggttatcaagaaaagcggattagaggtttttcattctctcgtagcaagttccttttcaagacaccatcaccggagaaagcacaaaatcaaatgtgacatgaataaatggatcagctctaggctaatataccgttataaagtttctcttgtattgacagtagacttgaaaggttgtgggaattttagcagcattcaggaggctgttgatgttgttccagagctcagctcctctaccactctcatcatcatggattctggtacttacagggagaaggtgacagtgcatgctaaaaaaacaaacctgatacttctaggccagggttatctcaacactgccatagcatggaacgatactgcaaattctactggtgggactgtttatagtgcttcagttgccatttttgcttctaacttcatagcctataatattagctttaagaacacagctccctggccatctcctggagaagtcggaggacaggcagtggcacttagaatagcaggtgacaaagcggcattttatggatgtggattttatggagctcaagacacgctccatgatgatagtgggaggcattattttagaggatgcttcatccaaggatccattgatttcattttcggaaacgctagatccctttaccagtcctgcaccatcagttccattgcagaacaacccaaagctggagtaagtggatctattacagcacaagcaaggcaatcggtgagcgagcaaactgggttttccttcgtgaattgcaccgttattggaagtgggaaagtatggcttggtcgagcttggggagcttatgctacagtagtcttctctaaaacatacatgtctcatgctgtatcttcagatggatggaacgattggagagacccttctagagaccagacagcattctttggagagtacgagtgttttggacctggagcaaacttcacattcagagcctcgtatggaaagcagctgactcaatacgaggcagctccctacatggatatttcatacattgatggatatattattggattgccctacgacgttctcatatttggaaaagaaatcacataa

SEQ ID NO: 1674 - protein, 408 aa, Populus balsamifera subsp. trichocarpa
  misc_feature (100)..(392): Pfam Name: Pectinesterase Pfam Description: Pectinesterase
  misc_feature: Ceres Annot ID no. 1485042
  misc_feature: Bit score of 546.5 for HMM based on sequences of Figure 20
  misc_feature: Functional Homolog Of SEQ ID NO. 1660
MRIKAISFWLLAFAIALVSIVIALYEISPSPSTGTPISNLHSSSLTTLKRVIKKSGLEVFHSLVASSFSRHHHRRKHKIKCDMNKWISSRLIYRYKVSLVLTVDLKGCGNFSSIQEAVDVVPELSSSTTLIIMDSGTYREKVTVHAKKTNLILLGQGYLNTAIAWNDTANSTGGTVYSASVAIFASNFIAYNISFKNTAPWPSPGEVGGQAVALRIAGDKAAFYGCGFYGAQDTLHDDSGRHYFRGCFIQGSIDFIFGNARSLYQSCTISSIAEQPKAGVSGSITAQARQSVSEQTGFSFVNCTVIGSGKVWLGRAWGAYATVVFSKTYMSHAVSSDGWNDWRDPSRDQTAFFGEYECFGPGANFTFRASYGKQLTQYEAAPYMDISYIDGYIIGLPYDVLIFGKEIT

SEQ ID NO: 1675 - DNA, 1417 bp, Arabidopsis thaliana
  misc_feature: Ceres Annot ID no. 861154
  misc_feature: Encodes the peptide sequence at SEQ ID NO. 1676
acttttaactagttgagacacactaaacccatctactattatcttaaacatgcccatcaaaccggttttaaccaccctaatagctcttttatccatcattcttgctctctacacgatccaattgccatcctctagatctctctcttctatagctacaactatcggagcattagcaaaatattcaacattttttggacacaaacaccaccatcatcaccatcaccaccatcaccatcatcattatcaccaccatgaaccaataaaatgttgtgagaaatggacgtcaaggcttagacaccaatacaagacttctcttgtgttgactgttgatttgcatggttgtggtaacttcagcaatgttcaaagcgccattgatgttgtccctgatttaagctcttccaagactctcatcatcgttaattcgggttcttatagggaaaaggttacggttaatgaaaacaagacaaaccttgttattcaaggaagaggatatcaaaacacatccatcgaatggaacgacacagcaaaatccgccggaaacactgctgatagcttctcctttgtagtgtttgcagctaacttcacagcttacaacattagtttcaagaacaatgcaccagaaccagatcctggtgaagctgatgcacaagcagtagctctaaggattgaaggagaccaagctgccttttatggttgtggattctatggggctcaagatacacttctagatgataaaggaagacatttcttcaaagagtgcttcattcaagggtccatagattttatatttggcaatggaagatcactctaccaggattgtactatcaattcaatagcaaaggggaatacatccggagttaccggatctatcacagctcaaggaagacaatcagaagatgaacagtcaggattctcttttgtgaattgtaagatcgatggcagtggggaaatattgcttggaagagcttggggagcctatgctacagtcgtgttctcaaatacttacatgtctggaatcattactccagaaggatggaataactggggagactcgaccaaagaaaagacggtgacttttggagagcataaatgctatggaccgggagcagattacaaagagagggttttgtttgggaaacaactcacagattcagaagcatcttctttcatagatgtatcttttatagatggtgatgaatggctccgtcacactaacatagtctctgagcatacatctaaagacattggagatgatcttataggattttactaacatatataaggatacacatgaataaaaaacatttagatgtagatacatacatattataagtatatgtagtcacattgagatctgatttgcgatgaagatgaaactcatgtactgtatatcttaatatgagatttcggtatgttt

SEQ ID NO: 1676 - protein, 407 aa, Arabidopsis thaliana
  misc_feature (90)..(382): Pfam Name: Pectinesterase Pfam Description: Pectinesterase
  misc_feature: Ceres Annot ID no. 861154
  misc_feature: Bit score of 558.6 for HMM based on sequences of Figure 20
  misc_feature: Functional Homolog Of SEQ ID NO. 1660
MPIKPVLTTLIALLSIILALYTIQLPSSRSLSSIATTIGALAKYSTFFGHKHHHHHHHHHHHHHYHHHEPIKCCEKWTSRLRHQYKTSLVLTVDLHGCGNFSNVQSAIDVVPDLSSSKTLIIVNSGSYREKVTVNENKTNLVIQGRGYQNTSIEWNDTAKSAGNTADSFSFVVFAANFTAYNISFKNNAPEPDPGEADAQAVALRIEGDQAAFYGCGFYGAQDTLLDDKGRHFFKECFIQGSIDFIFGNGRSLYQDCTINSIAKGNTSGVTGSITAQGRQSEDEQSGFSFVNCKIDGSGEILLGRAWGAYATVVFSNTYMSGIITPEGWNNWGDSTKEKTVTFGEHKCYGPGADYKERVLFGKQLTDSEASSFIDVSFIDGDEWLRHTNIVSEHTSKDIGDDLIGFY

SEQ ID NO: 1677 - protein, 407 aa, Arabidopsis thaliana
  misc_feature (90)..(382): Pfam Name: Pectinesterase Pfam Description: Pectinesterase
  misc_feature: Public GI ID no. 27754550
  misc_feature: Bit score of 552.8 for HMM based on sequences of Figure 20
  misc_feature: Functional Homolog Of SEQ ID NO. 1660
MPIKPVLTTLIALLSIILALYTIQLPSSRSLSSIATTIGALAKYSTFFGHKHHHHHHHHHHHHHYHHHEPIKCCEKWTSRLRHQYKTSLVLTVDLHGCGNFSNVQSAIDVVPDLSSSKTLIIVNSGSYREKVTVNENKTNLVIQGRGYQNTSIEWNDTAKSAGNTADSFSFVVFAANFTAYNISFKNNAPEPDPGEADAQAVALRIEGDQAAFYGCGFYGAQDTLLDDKGRHFFKECFIQGSIGFIFGNGRSLYQDCTINSIAKGNTSGVTGSITAQGRQSEDEQSGFSFVNCKIDGSGEILLGRAWGAYATVVFSNTYMSGIITPEGWNNWGDSTKEKTVTFGEHKCYGPGADYKERVLFGKQLTDSEASSFIDVSFIDGDEWLRHTNIVSEHTSKDIGDDLIGFY

SEQ ID NO: 1678 - DNA, 1287 bp, Sorghum bicolor
  misc_feature: Ceres Annot ID no. 8647624
  misc_feature: Encodes the peptide sequence at SEQ ID NO. 1679
atgaggaggcttttacgtcgtacaacaagaagcacaggcagagctggtgctaaggcgccgttgatgttatggtgggcagcaccggccatctgctctgcgcttctcgccgtcctgctcgcctccagatcatcgttctacctccggcagcctgcttctcctccctacacctcccccggggcggaagcggaagcagaagcggaagcggaagagggccggcaccaccaccaccggcgccgggcgtgcgacgaccaggccaggtgggtggccaagatggcgtccctgcacaacgccaccctggtcctcaccgtcgaccacaagggctgcggcaactacaccagactgcagaaggccgtggacgccgtgcccgactacgccgcggcgcgcacgctgatcgccgtcgacgcgggggtgtacgcggagaaggtggtggtgtggagcaacaagacgggcgtcacgctgcagggccgcggcaacctcaacaccaccatcgtctggaacgacaccgccaactccagcggcggcaccttctacagcgccaccgtcgccgtcctcgccgccaacttcgtggcctacaacgtcagcgtccagaacacggctgcccccgcggacccggggggctcgggcggccaggcggtggcgctgcgcgtcgccggcgaccaggccgccttctactggtgcggcttctacagctcgcaggacacactgctggacgagcagggccgccacttgttccgcggctgctacgtcgagggctccatcgacttcatcttcggcaacgcgcgctccctctacctcggctgcaccatcagctccgtcgccaacgccgccgcgggcggcaccgtcacggggagcgtcacggcgcacggccgcgcgtcgccggccgagaagacgggcttcgcgttcgtgggctgcaccgtcgtgggcacggggcaggtgtggctgggcagggcgtggggcccctacgccaccgtcgtcttcgccaggacgtacctctccgctgtcgtcgcgcccggggcatggaacgactggaacgaccccgccaggcagcagtcggtgttcttcggggagtacgactgcacgggccccggcgccagcggtggcaccgtgcagagggtggcctacgcgaggcagctggaccagcgccaggccgcgccattcatggacgtctcctacatcgacggcaaccagtgggcggtgccccctctgcttccgcccatgcagggcgccgccggcgaggacatcatcgtatctgctgaattcagtcatggccaggccggcatcatgtaa

SEQ ID NO: 1679 - protein, 428 aa, Sorghum bicolor
  misc_feature (100)..(395): Pfam Name: Pectinesterase Pfam Description: Pectinesterase
  misc_feature: Ceres Annot ID no. 8647624
  misc_feature: Bit score of 498.8 for HMM based on sequences of Figure 20
  misc_feature: Functional Homolog Of SEQ ID NO. 1660
MRRLLRRTTRSTGRAGAKAPLMLWWAAPAICSALLAVLLASRSSFYLRQPASPPYTSPGAEAEAEAEAEEGRHHHHRRRACDDQARWVAKMASLHNATLVLTVDHKGCGNYTRLQKAVDAVPDYAAARTLIAVDAGVYAEKVVVWSNKTGVTLQGRGNLNTTIVWNDTANSSGGTFYSATVAVLAANFVAYNVSVQNTAAPADPGGSGGQAVALRVAGDQAAFYWCGFYSSQDTLLDEQGRHLFRGCYVEGSIDFIFGNARSLYLGCTISSVANAAAGGTVTGSVTAHGRASPAEKTGFAFVGCTVVGTGQVWLGRAWGPYATVVFARTYLSAVVAPGAWNDWNDPARQQSVFFGEYDCTGPGASGGTVQRVAYARQLDQRQAAPFMDVSYIDGNQWAVPPLLPPMQGAAGEDIIVSAEFSHGQAGIM

SEQ ID NO: 1680 - protein, 408 aa, Oryza sativa subsp. japonica
  misc_feature (98)..(389): Pfam Name: Pectinesterase Pfam Description: Pectinesterase
  misc_feature: Public GI ID no. 115480795
  misc_feature: Bit score of 464.4 for HMM based on sequences of Figure 20
  misc_feature: Functional Homolog Of SEQ ID NO. 1660
MNKCRSSSSSSNSRALYALLLTSLILTVIILYLPPPPDPLSQSQFEFDQLKLDDHPPPPQLHRRRTKRCAEHLRWAASLASQHNATLLLTVDRNQAAGCANFTTIQKAVDAVPDYAATRTLIAVDAGIYREKVVVWSNKTALTLHGRGNLNTTVAWNATSNSTGGSTVYSATFTVLAPAFVAYNITFQNTSPPPEPGDAGGQAVALRVAGDEAAFHWCGVYSAQDTLLDESGRHLFRGCYIEGSIDFIFGNARSLYVGCTISSVAMASATGNKEVTGSVTAQGRASAAERTGFAFVRCSVVGTGQVWLGRAWGPYATVVFAETYLGDVVAAEGWNDWGDPGRRQQVWFAEYACWGPGSATAATGRVSYARQLDQRQAAPFMDVSYIDANQWALPPSTPELYGSRYTPS

SEQ ID NO: 1681 - protein, 383 aa, Arabidopsis thaliana
  misc_feature (93)..(378): Pfam Name: Pectinesterase Pfam Description: Pectinesterase
  misc_feature: Public GI ID no. 15241163
  misc_feature: Bit score of 405.8 for HMM based on sequences of Figure 20
  misc_feature: Functional Homolog Of SEQ ID NO. 1660
MPKLNSTQAPNLFLLLLVILLCSTQTQCHTKGLRLRPRNQKNMNTTSDRTQNPEDEFMKWVRFVGSLKHSVFKAAKNKLFPSYTLTVHKKSNKGDFTKIQDAIDSLPLINFVRVVIKVHAGVYKEKVSIPPLKAFITIEGEGAEKTTVEWGDTAQTPDSKGNPMGTYNSASFAVNSPFFVAKNITFRNTTPVPLPGAVGKQAVALRVSADNAAFFGCRMLGAQDTLYDHLGRHYYKDCYIEGSVDFIFGNALSLYEGCHVHAIADKLGAVTAQGRSSVLEDTGFSFVKCKVTGTGVLYLGRAWGPFSRVVFAYTYMDNIILPRGWYNWGDPSREMTVFYGQYKCTGAGANYGGRVAWARELTDEEAKPFLSLTFIDGSEWIKL

SEQ ID NO: 1682 - protein, 379 aa, Vitis vinifera
  misc_feature (80)..(374): Pfam Name: Pectinesterase Pfam Description: Pectinesterase
  misc_feature: Public GI ID no. 157342726
  misc_feature: Bit score of 404.6 for HMM based on sequences of Figure 20
  misc_feature: Functional Homolog Of SEQ ID NO. 1660
MSKFQCVSCVAILLFLLNSTPTHCHTKGIRPKNSAGKRLSTNMTQTQFAEQQFMKWVRFVGSLRHSMFKAAKNKLFPSYAITVNKNSAAGDFRSIQDAIDSLPSINLVRVVIKVHAGVYTEKVNIPAFKSFITIEGAGADKTVVQWGDTARTIGEKGQPIGTFNSATFAVNSLYFIAKNITFKNTTPVPAPGAVGKQAVAFRISGDTAAFLGCKFLGAQDTLYDHLGRHYYKDCYIEGSVDFIFGNALSLFEGCHVHAIAQNTGALTAQGRSSLLEDTGFSFVNCKVTGSGALFLGRAWGPFSRVVFAYTYMDDIIIPKGWYNWGDPSREMTVFYGQYKCTGPGAAFAGRVSWSRELTDQEAKPFISLSYIDGSEWIKM

SEQ ID NO: 1683 - protein, 379 aa, Vitis vinifera
  misc_feature (80)..(374): Pfam Name: Pectinesterase Pfam Description: Pectinesterase
  misc_feature: Public GI ID no. 147776052
  misc_feature: Bit score of 403.3 for HMM based on sequences of Figure 20
  misc_feature: Functional Homolog Of SEQ ID NO. 1660
  misc_feature (127)..(127): Xaa is any aa, unknown, or other
MSKFQCVSCVAILLFLLNSTPTHCHTKGIRPKNSAGKRLSTNMTQTQFAEQQFMKWVRFVGSLRHSMFKAAKNKLFPSYAITVNKNSAAGDFRSIQDAIDSLPSINLVRVVIKVHAGVYTEKVNIPXFKSFITIEGAGADKTVVQWGDTARTIGEKGQPIGTFNSATFAVNSLYFIAKNITFKNTTPVPAPGAVGKQAVAFRISGDTAAFLGCKFLGAQDTLYDHLGRHYYKDCYIEGSVDFIFGNALSLFEGCHVHAIAQNTGALTAQGRSSLLEDTGFSFVNCKVTGSGALFLGRAWGPFSRVVFAYTYMDDIIIPKGWYNWGDPSREMTVFYGQYKCTGPGAAFAGRVSWSRELTDQEAKPFISLSYIDGSEWIKM

SEQ ID NO: 1684 - protein, 352 aa, Physcomitrella patens subsp. patens
  misc_feature (58)..(347): Pfam Name: Pectinesterase Pfam Description: Pectinesterase
  misc_feature: Public GI ID no. 168034634
  misc_feature: Bit score of 358.8 for HMM based on sequences of Figure 20
  misc_feature: Functional Homolog Of SEQ ID NO. 1660
MVTPGSTVSGSEQVSDFSVAPDEELVQLVQRMGTVDHSVFEIAENRITPLAVIYVNRKRGVGHFTTVQAAIDHVPVNNDRRVHIIVAPGVYKEKIVVPSSKPYVTILGGGWNNTILQWNDTADCADKEGAKLGTYWSASLAVEAQYFIARNITIKNTASMPAAGAAGKQAVALRVTGDTAAFYGCRFMSTQDTLYDHVGRHYFKDCYIEGSIDFVFGNGRSLYESCHLHALPRTTFGSVAAQKRGNVSEQTGFSFLNCKITGSGLLYLGRAWGSYARVVYSYTYMDNIIVPAGWSNWNDPRRNKTVIFGQYKCFGPGAKQTGRVPWSHELTDTEARPFLSLSFVDGDEWVQP

SEQ ID NO: 1685 - DNA, 1104 bp, Populus balsamifera subsp. trichocarpa
  misc_feature: Ceres Annot ID no. 1446775
  misc_feature: Encodes the peptide sequence at SEQ ID NO. 1686
atggcttctcttggttatagtttcctgttcttctattcttacttcattcttactttgtttttattgcatgcaccattgttagttacaagctctacttacaggtacaaggtcgagtcatcttcaatcaatcggactgcccctaccaactctaccaagcaccatcacaagtgggttggaccagtgggttaccgagtgatcaccgtggatgttaacggggccggcgagttcttatcggtccaagctgctgttgatgctgtcccggagaacaatggggagaatgtgatgatactaattagcgccggatattacattgaaaaggtaacagtgccagcgagcaaaccgtacataacgtttcaaggagaaggaagagacgtgacaatcatcgaatggcatgatagagcaagcgatcgtggtgccaatggccagcagctgcgtacatacaggactgcttctgtttctgtttttgctaattatttctcagctagaaacataagcttcaagaacacagcaccagcaccaatgccaggaatgaagggatggcaagctgcggcatttcgcatatctggagataaggcttacttcgcaggctgtggattctacggtgcccaagatactctatgcgacgatgcagggaggcattacttcaaggagtgctacattgagggctctatagattttatttttgggaatggccgctccatgtacaaagactgtgagctacactcaatagccaccagatttggatcgattgcagcccaagatagaaactctcccgacgagaaaacaggctttgctttccttaactgcagggtaacaggcaccggaccactgtatgtgggtcgagccatgggccagtactcaaggatagtctattcctacacatattttgacaacgttgtggctcacggtggctgggatgattgggaccatgccagcaacaagaataagacagtgttcttcggagtgtataaatgctgggggccaggagctgcagcagtacagggtgtttcatgggcaagagagctagactatgaatccgcccacaagttccttgctaagagttttgtcaacggaaggcattggatagccccttctgatgcttag

SEQ ID NO: 1686 - protein, 367 aa, Populus balsamifera subsp. trichocarpa
  misc_feature (65)..(359): Pfam Name: Pectinesterase Pfam Description: Pectinesterase
  misc_feature: Ceres Annot ID no. 1446775
  misc_feature: Bit score of 377.3 for HMM based on sequences of Figure 20
  misc_feature: Functional Homolog Of SEQ ID NO. 1660
MASLGYSFLFFYSYFILTLFLLHAPLLVTSSTYRYKVESSSINRTAPTNSTKHHHKWVGPVGYRVITVDVNGAGEFLSVQAAVDAVPENNGENVMILISAGYYIEKVTVPASKPYITFQGEGRDVTIIEWHDRASDRGANGQQLRTYRTASVSVFANYFSARNISFKNTAPAPMPGMKGWQAAAFRISGDKAYFAGCGFYGAQDTLCDDAGRHYFKECYIEGSIDFIFGNGRSMYKDCELHSIATRFGSIAAQDRNSPDEKTGFAFLNCRVTGTGPLYVGRAMGQYSRIVYSYTYFDNVVAHGGWDDWDHASNKNKTVFFGVYKCWGPGAAAVQGVSWARELDYESAHKFLAKSFVNGRHWIAPSDA

SEQ ID NO: 1687 - DNA, 1671 bp, Gossypium hirsutum
  misc_feature: Ceres Clone ID no. 1926613
  misc_feature: Encodes the peptide sequence at SEQ ID NO. 1688
attccaaaaccccattatctctcttacagaatatattcacctcttaatacagaaacaggtaggagagaccactcacgggcattacaaaacaaacaacatttaacatgaagcaagaacttttgtttttttttaattccagaaagtgcaacctgtctgtgtttgtggcctagattgttttgttttgcctttttctctctctcattctctcatctttgaaagtctttgttttgtcatctaaaccacccgtgaactctccctttctgtcatttgattctctatttcaacaataaaacatcacttttttttgctggctagtagctacctttgtgtatatatataaaccataatttcgacctgatcagttgctagttgccacaaacacacctgtataatgtctaagtttcaatgttttctttacattgtcatccttgttcttctcttgaattcagctcagacattgtgccataccaaaggtatcaaacttaaaaggaagcaccatcacaagcaatcaaatgtgacaggaacccatgtttcagaacaaccattcatgcaatgggttaaatttgttggtagccttaatcactcagttttcaggacagcaaaaaacaagcttttcccttctcgtaccattaccgtcgacaagaatcccaaatacggtgacttcaccaaaattcaagatgccattgattctcttcctttcattaaccttgtgagagttgtaatcaaggtccatgctggggtctacacggaaaaggttaacattccaccattgaaggccttcataacaattgaaggagcaggggcagataaaacaattgttcaatggggagacacagctcaaacacctggagctagaggacaaccgttaggaacctatggttctgcaacttttgctgtgaattcaccttattttattgccaaacacattacattcaagaacactgcaccaattccagcaccaggagcaatcggaaaacaagctgtagcgtttagaatatcggcggatacggctactttcgtcggttgtcgattccttggagctcaagatacactttatgatcactttggccgacattattataaagattgttacattgaaggctcagtagatttcatctttggcaatgctctctccctctttgagggatgtcatgtgcatgcaatagcaaggttaacaggggcagtaacagcacaaaacagagggagtatcctagatgacacagggttctcttttgtgaagtgtaaggtgacagggtcaggggctttatatttagggagggcatggggtcctttctcgagggtggtctttgcttacacttacatggacaacatcatactgcctaagggctggtataattggggtgaccctaaccgtgagatgacggtgttctatggacagtacaaatgcacggggccaggagcaagctttgcaggcagggtttcatggtcaagggaacttacagatgaggaagctaaaccttttatttctcttagtttcattgatggctctgaatggatcaaattataattatacaatgatccatcaatttttatttttttaatgtatatcaacaaaacgagaaagtagtatttgtaaaagatgatagctaggtttttctgaagacgatgatgataatcatgataaatttgattataagcaattcactttcc

SEQ ID NO: 1688 - protein, 378 aa, Gossypium hirsutum
  misc_feature (79)..(373): Pfam Name: Pectinesterase Pfam Description: Pectinesterase
  misc_feature: Ceres Clone ID no. 1926613
  misc_feature: Bit score of 393.4 for HMM based on sequences of Figure 20
  misc_feature: Functional Homolog Of SEQ ID NO. 1660
MSKFQCFLYIVILVLLLNSAQTLCHTKGIKLKRKHHHKQSNVTGTHVSEQPFMQWVKFVGSLNHSVFRTAKNKLFPSRTITVDKNPKYGDFTKIQDAIDSLPFINLVRVVIKVHAGVYTEKVNIPPLKAFITIEGAGADKTIVQWGDTAQTPGARGQPLGTYGSATFAVNSPYFIAKHITFKNTAPIPAPGAIGKQAVAFRISADTATFVGCRFLGAQDTLYDHFGRHYYKDCYIEGSVDFIFGNALSLFEGCHVHAIARLTGAVTAQNRGSILDDTGFSFVKCKVTGSGALYLGRAWGPFSRVVFAYTYMDNIILPKGWYNWGDPNREMTVFYGQYKCTGPGASFAGRVSWSRELTDEEAKPFISLSFIDGSEWIKL

SEQ ID NO: 1689 - protein, 398 aa, Oryza sativa subsp. japonica
  misc_feature (99)..(393): Pfam Name: Pectinesterase Pfam Description: Pectinesterase
  misc_feature: Public GI ID no. 115464955
  misc_feature: Bit score of 402.8 for HMM based on sequences of Figure 20
  misc_feature: Functional Homolog Of SEQ ID NO. 1660
MAVSVSWSWAPRFLACVAVAVLLVTSGLGGAAAGGGGRRHGHTKGLRPGKAAAKPYYPVNATAVEAIERQFTRWVRSMVGRRHSTFQRALYRGLLPTRTLVVDKNPAAGNFTSIQAAVDSIPLINLARVVIKVNAGTYTEKVTISPLRAFVTIEGAGADKTVVQWGDTADTVGPLGRPFGTFASATFAVNAQFFVAKNITFKNTAPVPRPGALGKQGVALRISADNAAFLGCNFLGAQDTLYDHLGRHYYRDCYIEGSVDFIFGNALSLYEGCHVHAIARNYGALTAQNRMSILEDTGFSFVNCRVTGSGALYLGRAWGTFSRVVFAYTYMDNIIIPRGWYNWGDPTREMTVFYGQYKCTGPGSNYAGRVAWSRELTDQEAKPFISLSFIDGLEWVKL

SEQ ID NO: 1690 - DNA, 1388 bp, Glycine max
  misc_feature: Ceres Clone ID no. 1640838
  misc_feature: Encodes the peptide sequence at SEQ ID NO. 1691
ttttaatttgtacttccacttccacattgcatctggtgtgttttttcttctactatagctatctttcattctctctctagctacacacaacctctgtatattctccgcgcgcgctttcgatcgatgctattatagtgttccctacctaccttatggctcctctcttcatctcaatgcaaatgcttcttctggttttcacttgcatattattgcatgtcacatgcacaacttaccacgacagcacccccaaaacagtgccttctacaaactcctctaagtgggtggggcccatcggacaccgagtaatcaccgttgacgttaacggcggagcccatttccgctcagtcaaagccgccgtcaatgctgtcccggagaacaacagaatgaacgtccttattcaaataagcgccggatattacatagagaaggtggtagtgcccgtgacgaagccgtacattacgtttcaaggtgcgggaagggatgtgacggtgatagaatggcatgatagggctagtgaccctggtcccaacggccaacaactgcgtacttacagaactgcttctgttactgtttttgccaattatttctctgccaggaatatcagcttcaagaacacagcaccggcacccatgccgggaatggaggggtggcaagcggcggcgtttcgcatatccggagacaaagcctatttctccggctgtggattctacggtgcacaagacactctttgcgacgacgctggccgccattatttcaaagaatgttacatcgagggctccatagatttcatctttggcaatggcaggtccatgtacaaggattgcaggctacactcaattgcgacgaggtttgggtcaatagcagcccaagacaggcaattcccatacgagaagacgggcttctcattcgtacggtgcaaggtgacaggaacaggcccaatttacgtgggccgtgcaatgggccagtactccaggattgtctatgcctacacttactttgacggcatagttgcacatggtggttgggatgatattgattggaacacttccaacaataacaagactgtgttctttggagtgtacaaatgctggggaccaggagcagcggctatacgtggagtcccattggcccaagagctagatttcgaatctgcacatccattccttgtcaagagttttgtcaatggaagacactggattgcaccctctgatgcttagttaactgataatattccaatcaaccaaagaaaaaaaaaaaaactccataggaaattgcacagttacagtctatccaatactattgatgtcattatctcctttttttctgggtttaaccataggaaattcattcattcaatatttaataagagatatttcttcttgttaggt

SEQ ID NO: 1691 - protein, 354 aa, Glycine max
  misc_feature (51)..(346): Pfam Name: Pectinesterase Pfam Description: Pectinesterase
  misc_feature: Ceres Clone ID no. 1640838
  misc_feature: Bit score of 347.4 for HMM based on sequences of Figure 20
  misc_feature: Functional Homolog Of SEQ ID NO. 1660
MAPLFISMQMLLLVFTCILLHVTCTTYHDSTPKTVPSTNSSKWVGPIGHRVITVDVNGGAHFRSVKAAVNAVPENNRMNVLIQISAGYYIEKVVVPVTKPYITFQGAGRDVTVIEWHDRASDPGPNGQQLRTYRTASVTVFANYFSARNISFKNTAPAPMPGMEGWQAAAFRISGDKAYFSGCGFYGAQDTLCDDAGRHYFKECYIEGSIDFIFGNGRSMYKDCRLHSIATRFGSIAAQDRQFPYEKTGFSFVRCKVTGTGPIYVGRAMGQYSRIVYAYTYFDGIVAHGGWDDIDWNTSNNNKTVFFGVYKCWGPGAAAIRGVPLAQELDFESAHPFLVKSFVNGRHWIAPSDA

SEQ ID NO: 1692 - DNA, 1339 bp, Panicum virgatum
  misc_feature: Ceres Clone ID no. 1829495
  misc_feature: Encodes the peptide sequence at SEQ ID NO. 1693
acctcagacctcacaccgaacctgtcacgccgcccctccagcttcccccgctcgccgcgaagcccggggccggccgtggcaacggcggcggcaccgcaatggccacgccgcgcgcacgattcttggcctgcattgccgtggcgctcctcgcgccgccgtgcggggtggcggggcactcgcgcgggctgcggccggggcgcggcggcgcggcggcgccgttcccggtgaacgcgacgcgggcggagatgatcgagcggcagttcgtggagtgggtgcggtacatgggcggcctccggcacagcacgttccagcacgcgctcgcccgcgccttcccgtcctactcgctcgtcgtcgacaagaacccggcgttcggcgacttcacgaccatccaggccgccatcgactcgctcccggccatcaacctcgtccgcgtcgtcatcagggtcaaccccggcacctacacggagaaggtgaccgtctcgccgatgcgcgcgttcatcaccctggagggcgccggcgcggaaagcacgatcgtgcagtggggcgacaccgcggactcgccgacagggcccaaggggcggcccctcggcacgttcaactcggcgacgttcgccgtgaacgcgcagtacttcctcgccaggaacatcactttcaagaacacggcgccggtgccccaacctggcgcgacggggaagcaggcggtggcgctgcgggtgtcggcggacaacgcggcgttcgtggggtgcaagttcctgggcgcgcaggacacgctctacgaccactcgggccggcactactacaaggagtgctacatcgaaggctccgtcgacttcatcttcggcaacgcactctcgctgtacgaggactgccacgtgcacgcgatcgcgcgggactacggggcgctgacggcgcagaaccggcagagcacgctggaggacacggggttctcgttcgtcaactgccgggtgacgggctccggcgcgctctacctcggccgcgcctggggcagcttctcccgcgtcgtcttcgcctacacctacatggacaacatcatcatcccgcgcggctggtacaactggggcgaccccaaccgcgagatgacggtgttctacgggcagtacaagtgcacgggcccgggcgcgagctacgccggccgggtggcgtggtcgcacgagctcactgacgacgaggccaagccgttcatctcgctcagcttcatcgacggcaccgagtgggtcaggctgtaatcctagcttcgctgtagctcacggcacgcgacacccatgtaaaaaaaacagagggaggaagtatacaaatttagttgccattcgtcaactcc

SEQ ID NO: 1693 - protein, 382 aa, Panicum virgatum
  misc_feature (82)..(377): Pfam Name: Pectinesterase Pfam Description: Pectinesterase
  misc_feature: Ceres Clone ID no. 1829495
  misc_feature: Bit score of 396.2 for HMM based on sequences of Figure 20
  misc_feature: Functional Homolog Of SEQ ID NO. 1660
MATPRARFLACIAVALLAPPCGVAGHSRGLRPGRGGAAAPFPVNATRAEMIERQFVEWVRYMGGLRHSTFQHALARAFPSYSLVVDKNPAFGDFTTIQAAIDSLPAINLVRVVIRVNPGTYTEKVTVSPMRAFITLEGAGAESTIVQWGDTADSPTGPKGRPLGTFNSATFAVNAQYFLARNITFKNTAPVPQPGATGKQAVALRVSADNAAFVGCKFLGAQDTLYDHSGRHYYKECYIEGSVDFIFGNALSLYEDCHVHAIARDYGALTAQNRQSTLEDTGFSFVNCRVTGSGALYLGRAWGSFSRVVFAYTYMDNIIIPRGWYNWGDPNREMTVFYGQYKCTGPGASYAGRVAWSHELTDDEAKPFISLSFIDGTEWVRL

SEQ ID NO: 1694 - DNA, 1185 bp, Sorghum bicolor
  misc_feature: Ceres Annot ID no. 8668633
  misc_feature: Encodes the peptide sequence at SEQ ID NO. 1695
atgggcatgcgacgagcacgattcttggcctgcattgccatggcggccatcgtgctcctcgcgccgccgtcgacgtgcggagtggcggggcactcgcgggggctgcggcctgggcgcagcgccggcgccggtggcgcgggggatccgccgccgctgttcccggtgaacgcgacgcgcgcggagatgatcgagcggcagttcatggagtgggtgcggtacatgggcggcctccggcacagcacgttccagcacgcgctggcccgcgcgttcccctcctactcgctcgtcgtcgacaagaacccggcgttcggcgacttcacgaccatccaggccgccatcgactcgctcccggtcatcaacctcgtccgcgtcgtcatcagggtcaacgccggcacctacacggagaaggtgagcatctcggcgatgcgcgcgttcatcaccctggagggcgccggcgcggacagcacgatcgtgcagtggggcgacaccgcggactcgccgacggggcccaagggacggcccctcggcacgttcaactccgcgaccttcgccgtgaacgcgcagtacttcctcgcaaggaacatcacgttcaagaacacgtcgccggtgccgaagccgggggcgacggggaagcaggcggtggcgctgcgggtgtcggcggacaacgcggcgttcgtggggtgcaagttcctgggcgcgcaggacacgctgtatgaccactcgggtcgccactactacaaggagtgctacatcgaagggtccgtggacttcatcttcggcaacgcgctgtcgctgtacgaggactgccacgtgcacgcgatcgcgcgggactacggggcgctgacggcgcagaaccggcagagcatgctggaggacacggggttctccttcgtcaactgccgggtgacggggtccggcgcgctctacctgggccgcgcctggggcaccttctcccgcgtcgtcttcgcctacacctacatggacaacatcatcatccccaacgggtggtacaactggggcgaccccaaccgcgagctgacggtgttctacgggcagtacaagtgcacgggccccggcgcgagctacgccggccgggtggcgtggtcgcacgagctcactgacgacgaggccaagcccttcatctcgctgagcttcatcgacggcaccgagtggatcaggctgtaa

SEQ ID NO: 1695 - protein, 394 aa, Sorghum bicolor
  misc_feature (94)..(389): Pfam Name: Pectinesterase Pfam Description: Pectinesterase
  misc_feature: Ceres Annot ID no. 8668633
  misc_feature: Bit score of 402.2 for HMM based on sequences of Figure 20
  misc_feature: Functional Homolog Of SEQ ID NO. 1660
MGMRRARFLACIAMAAIVLLAPPSTCGVAGHSRGLRPGRSAGAGGAGDPPPLFPVNATRAEMIERQFMEWVRYMGGLRHSTFQHALARAFPSYSLVVDKNPAFGDFTTIQAAIDSLPVINLVRVVIRVNAGTYTEKVSISAMRAFITLEGAGADSTIVQWGDTADSPTGPKGRPLGTFNSATFAVNAQYFLARNITFKNTSPVPKPGATGKQAVALRVSADNAAFVGCKFLGAQDTLYDHSGRHYYKECYIEGSVDFIFGNALSLYEDCHVHAIARDYGALTAQNRQSMLEDTGFSFVNCRVTGSGALYLGRAWGTFSRVVFAYTYMDNIIIPNGWYNWGDPNRELTVFYGQYKCTGPGASYAGRVAWSHELTDDEAKPFISLSFIDGTEWIRL

SEQ ID NO: 1696 - DNA, 1521 bp, Triticum aestivum
  misc_feature: Ceres Clone ID no. 797976
  misc_feature: Encodes the peptide sequence at SEQ ID NO. 1697
gacacacccccttgtagctttgtacctagctagctgccggtgagtgaccaccgcagcagcacccgtcggctgttgccactggcgtgcgcgcagcgcattgtcgcggcaatggcagcgtcgtcgtcctcatcctcttcgtcgcgggcgaggttgctggcgtgcgtggccgtggcggcgctgctgctgctcgcgccgcgcgacgtggacgccggccggcacgggcacgggcgcgggagcgcggcgcacaggcacaccaagggcctgcggccggggaaggctgcgggtgcggcggcgaggccgtacccggcgaacgcgaccgcggcggaggcgatcgagcggcggttcacgcggtgggtgcggttcatgggcgggctggaccacagcgtgttccagcgcgcgctcaaccgcgcgctgctgccgtcgacgcgcacgatcgtcgtggacaggacgcccggggcgggagacttcaccaccatccagggcgccgtcgactcgctcccgctcatcaacctcgcgcgcgtcgtcatcaaggtcaatgccggcacttacacggagaaggtgagcatctcgccgttgcgcgcgttcgtgacggtggagggcgcgggggccgaccggacggtggtgcagtggggcgacacggcggacacggccgggccctggggccgccccttcggcaccttcgcctccgccaccttcgccgtcaactcgcagttcttcgtcgccaagaacatcaccttcaagaacaccgcgccggtgcctcggcctggcgcgctggggaagcagggggtggcgctgcggatatcggcggacaacgcggcgttcgtggggtgcaacttcctgggcgcgcaggacacgctgtatgaccacctgggccgccactactacaaggactgctacatcgagggctccgtcgacttcatcttcggcaacgccctctccctctacgagggttgccacgtgcacgcgatctcgccgcactacggcgcgctgacggcgcagaaccggcggagcatgctggacgacacggggttctccttcctcaactgccgggtgacggggtcgggggcgctctacctgggccgcgcatggggcaccttctcccgcgtcgtcttcgcctacacctacatggacaacatcatcatcccccgcggctggtacaactggggcgacccaacgcgagagatgacggtgttttacgggcagtacaagtgctctgggccgggggccaaccacgccggccgggtggactggtcccgggagctcaccgacgaggaggccaagccattcatctccctcagcttcatcgacggcctcgagtggctcaggttgtagcagcggatccacacgttaatgactagcagcagagtaacttgatttggctgcagcatttgcagctgaatccatgacgagcacgtacgcctgtctccggcctccggctcctttttttttttgctttgctttttagaagtgggatgtgaatcaaaccacatcggctcgttttaacagttgttgtgagctctg

SEQ ID NO: 1697 - protein, 407 aa, Triticum aestivum
  misc_feature (108)..(402): Pfam Name: Pectinesterase Pfam Description: Pectinesterase
  misc_feature: Ceres Clone ID no. 797976
  misc_feature: Bit score of 396.2 for HMM based on sequences of Figure 20
  misc_feature: Functional Homolog Of SEQ ID NO. 1660
MAASSSSSSSSRARLLACVAVAALLLLAPRDVDAGRHGHGRGSAAHRHTKGLRPGKAAGAAARPYPANATAAEAIERRFTRWVRFMGGLDHSVFQRALNRALLPSTRTIVVDRTPGAGDFTTIQGAVDSLPLINLARVVIKVNAGTYTEKVSISPLRAFVTVEGAGADRTVVQWGDTADTAGPWGRPFGTFASATFAVNSQFFVAKNITFKNTAPVPRPGALGKQGVALRISADNAAFVGCNFLGAQDTLYDHLGRHYYKDCYIEGSVDFIFGNALSLYEGCHVHAISPHYGALTAQNRRSMLDDTGFSFLNCRVTGSGALYLGRAWGTFSRVVFAYTYMDNIIIPRGWYNWGDPTREMTVFYGQYKCSGPGANHAGRVDWSRELTDEEAKPFISLSFIDGLEWLRL

SEQ ID NO: 1698 - DNA, 1308 bp, Glycine max
  misc_feature: Ceres Clone ID no. 853161
  misc_feature: Encodes the peptide sequence at SEQ ID NO. 1699
aacatttgttctctccgcgttcgatgctatctaatggcttcttcttcactcttggtgtcactgcaagtagcgcttgtggttttcacttgcatattccatgcagcaacagtgacatgtgaccgtagcttcaaaatattctcttctatgaataactcctccaagagtagccaccattggattggacccatcggccaccgcaaaatcaccgttgatgttaacggtggcgggcactaccggtccgtccaagacgccgtcaatgccgtccccgacaacaacagaaagaatgtccttgttcaaatcaacgccgggtgctacaaagaaaaggtagtggtgcccgtgacgaagccgtacataacatttcagggcgcgggtaaggaagtgacggtgatagaatggcatgatcgagccagtgaccccggtcccagcggacagcaattgcgtacttacagaaccgcttctgttacagtttttgccacctatttttctgccagaaacatcagcttcaagaacacagcacctgcaccaatgccggggatgcagggaaggcaagcggtggcgtttcgaatatccggcgacaaagcatacttctccggctgcggtttctacggtgcacaagacaccctgtgcgacgatgcaggcagacattacttcaaggaatgctacattgagggatcaatcgactttatttttgggaatggcaggtcaatgtacaaggattgcgagctgcactcaatagcgacgaggtttggttccatagcggcccacgataggaaggaggcagaggagaagacagggttcgcattcgtaggatgcaaggtgacaggaacgggtccgttatatgtggggcgagcaatgggacagtattccagaattgtttactcttacacatatttcgatgatatcgttgcacatggcggttgggatgattgggaccatgcagacaataagaacaagactgtgttcttcggagtgtacaagtgctggggaccaggagcagaggctgtacgtggagtctcatgggcccgagacttaaatttcgaatctgctcatccatttatcaggaagagtttcgtcaatgggagacactggatcgcgccatctgatgcttaattagtcataacgtttttgttaactcactcaccctttatacaagtggacaaaacaatttacattcaaattccataaccattgttgcatccttcattcatttgattttgtcaatataggaattcatttttccctctttgtaaaatggccgaaacaccttctttccatgatttttttgttgaatattcatttatcacctac

SEQ ID NO: 1699 - protein, 358 aa, Glycine max
  misc_feature (56)..(350): Pfam Name: Pectinesterase Pfam Description: Pectinesterase
  misc_feature: Ceres Clone ID no. 853161
  misc_feature: Bit score of 375.0 for HMM based on sequences of Figure 20
  misc_feature: Functional Homolog Of SEQ ID NO. 1660
MASSSLLVSLQVALVVFTCIFHAATVTCDRSFKIFSSMNNSSKSSHHWIGPIGHRKITVDVNGGGHYRSVQDAVNAVPDNNRKNVLVQINAGCYKEKVVVPVTKPYITFQGAGKEVTVIEWHDRASDPGPSGQQLRTYRTASVTVFATYFSARNISFKNTAPAPMPGMQGRQAVAFRISGDKAYFSGCGFYGAQDTLCDDAGRHYFKECYIEGSIDFIFGNGRSMYKDCELHSIATRFGSIAAHDRKEAEEKTGFAFVGCKVTGTGPLYVGRAMGQYSRIVYSYTYFDDIVAHGGWDDWDHADNKNKTVFFGVYKCWGPGAEAVRGVSWARDLNFESAHPFIRKSFVNGRHWIAPSDA

SEQ ID NO: 1700 - protein, 382 aa, Physcomitrella patens subsp. patens
  misc_feature (84)..(368): Pfam Name: Pectinesterase Pfam Description: Pectinesterase
  misc_feature: Public GI ID no. 168033534
  misc_feature: Bit score of 393.4 for HMM based on sequences of Figure 20
  misc_feature: Functional Homolog Of SEQ ID NO. 1660
MGPLRLICLWVVLLFATVILLVVISHSPSGALPRIPRSVRSDLKKLASKTIPNNIPQIFSNETYSRPCQGSPTSSKNTSYFFRVDQSGRGDFVSVQAAVNAVPENSEQRTIIEIKAGVYEERVVIPSNKPHITMQGEGMNVTIITGNDNAAKRGNEGSVTVAIYADHFTAVDMGFKNLAPMPEPGELGKQAVALVICGDKAAFYDCGFYGAQDTLFDYAGRHYFKNCFIEGSIDFIFGDGRSLYEGCEIHVIAETTGSITAQARSKPEDRSGFVFMDCTIMGHGLVWLGRAWGTSSRVVFVRSYMDDIIIPAGWTDFGDSTVHNTSFYAQYKCSGPGAESAVRVPWSYELNDDDAKQFLDLDFIDGASWIHATRKFVDNLPS

SEQ ID NO: 1701 - protein, 384 aa, Oryza sativa subsp. japonica
  misc_feature (84)..(379): Pfam Name: Pectinesterase Pfam Description: Pectinesterase
  misc_feature: Public GI ID no. 115439873
  misc_feature: Bit score of 391.9 for HMM based on sequences of Figure 20
  misc_feature: Functional Homolog Of SEQ ID NO. 1660
MAVAPVRLVACIVALAAVAPGGVAGHTRGVRPGRAAGKQQPSFPENATRVEAIERQFMEWVRYMGGLEHSTVHHALARAFPSYSLVVDKNPAFGDFTTIQAAVDSLPIINLVRVVIKVNAGTYTEKVNISPMRAFITLEGAGADKTIVQWGDTADSPSGRAGRPLGTYSSASFAVNAQYFLARNITFKNTSPVPKPGASGKQAVALRVSADNAAFVGCRFLGAQDTLYDHSGRHYYKECYIEGSVDFIFGNALSLFEDCHVHAIARDYGALTAQNRQSMLEDTGFSFVNCRVTGSGALYLGRAWGTFSRVVFAYTYMDDIIIPRGWYNWGDPNRELTVFYGQYKCTGPGASFSGRVSWSRELTDEEAKPFISLTFIDGTEWVRL

SEQ ID NO: 1702 - protein, 357 aa, Picea sitchensis
  misc_feature (55)..(349): Pfam Name: Pectinesterase Pfam Description: Pectinesterase
  misc_feature: Public GI ID no. 116794391
  misc_feature: Bit score of 370.1 for HMM based on sequences of Figure 20
  misc_feature: Functional Homolog Of SEQ ID NO. 1660
MDLILVQHWCSSCRIWLLVMVSLLLGGFAQGGIQGNYSTSRAWPHPWQGPIGTRQVVVDQSGHGDFLTVQAAVDSVIEGNREIVIINIHAGYYLEKVLVPATKPYITFQGAGKEFTVIEWHNRASDLDPTGQQLRTYHSASVTVLANYFSAKNISFKNTAPAPMPGMEGWQAVAFRISGDKAYFLGCGFYGAQDTLCDDEGRHYFKECYIEGSIDFIFGNGRSMYKHCELHSIAKEFGSIAAQGREKPYEKTGFAFVHCTVTGTGPLYIGRAMGQYSRIVYAYTYFDDIVAREGWDDWGHQTTKDRTAFFGVYKCYGPGAAAAGGVSWVHELTPEEARPFLVKSYVNGKHWIQESDA

SEQ ID NO: 1703 - DNA, 1298 bp, Arabidopsis thaliana
  misc_feature: Ceres Clone ID no. 39717
  misc_feature: Encodes the peptide sequence at SEQ ID NO. 1704
aagccaatggcgcaatttactaattccatcaattatctcttttctgtttctctcttattatttgtatcgttccactgcttatgttttcgtttttcattggttgcagcttgttcaaactccaccgacgaccaacagattcaacaccatcaccaccggaaatgggttggtccctcaggccacaaagtcatcaccgtctcacttaacggccacgctcagtttcgctccgtccaagacgctgtggattccataccaaagaacaataacaagagcatcacaatcaagattgctcccggattttacagagagaaagtggtggttccagctacaaaaccgtacataacgttcaaaggagctggtagggatgtgaccgctatagagtggcacgaccgtgcgtccgaccttggcgctaacggtcaacagttacgtacctatcaaaccgcttccgtcaccgtctacgctaattatttcaccgctagaaacattagcttcacgaatactgcgccggctccattgccggggatgcaagggtggcaagcggtggcgtttaggatctccggcgacaaagctttcttttccggctgcgggttttacggtgcacaagacactttatgcgacgatgctggccgtcattacttcaaggagtgttacattgaaggctctatcgactttatctttggtaatggccgctccatgtataaagattgtgagttgcattcgatagcgtcaagattcgggtcgatagcggcgcatggtaggacatgcccggaagagaaaacgggtttcgcgttcgtgggttgtcgggtaacaggtacgggtccattgtacgtgggccgggccatgggacaatactcacgtatcgtttacgcctacacttactttgatgctctcgtcgctcacggtggttgggacgattgggaccacaaatccaacaaaagcaagacggcatttttcggagtgtacaattgctatgggccaggagcagcagcgacgagaggcgtgtcttgggctagagctttggactatgaatcggcccatccatttatcgctaagagcttcgttaatgggagacattggatcgctcctcgagatgcttaaccaacttcaaaccttggcggggtttcttttcctaattcctcggttcctcccagtcccaagtcctaaaagcttactatatttttatcattcgtttatttcttttattgtttattttttccaatttatttatacattgtgtgatagtacaacaaagtattgcttcttcttcatctgtatccatttcagttaaatgttttgagctc

SEQ ID NO: 1704 - protein, 362 aa, Arabidopsis thaliana
  misc_feature (60)..(354): Pfam Name: Pectinesterase Pfam Description: Pectinesterase
  misc_feature: Ceres Clone ID no. 39717
  misc_feature: Bit score of 367.9 for HMM based on sequences of Figure 20
  misc_feature: Functional Homolog Of SEQ ID NO. 1660
MAQFTNSINYLFSVSLLLFVSFHCLCFRFSLVAACSNSTDDQQIQHHHHRKWVGPSGHKVITVSLNGHAQFRSVQDAVDSIPKNNNKSITIKIAPGFYREKVVVPATKPYITFKGAGRDVTAIEWHDRASDLGANGQQLRTYQTASVTVYANYFTARNISFTNTAPAPLPGMQGWQAVAFRISGDKAFFSGCGFYGAQDTLCDDAGRHYFKECYIEGSIDFIFGNGRSMYKDCELHSIASRFGSIAAHGRTCPEEKTGFAFVGCRVTGTGPLYVGRAMGQYSRIVYAYTYFDALVAHGGWDDWDHKSNKSKTAFFGVYNCYGPGAAATRGVSWARALDYESAHPFIAKSFVNGRHWIAPRDA

SEQ ID NO: 1705 - protein, 362 aa, Arabidopsis thaliana
  misc_feature (60)..(354): Pfam Name: Pectinesterase Pfam Description: Pectinesterase
  misc_feature: Public GI ID no. 15238111
  misc_feature: Bit score of 369.4 for HMM based on sequences of Figure 20
  misc_feature: Functional Homolog Of SEQ ID NO. 1660
MAQLTNSLNYLFSVSLLLFVSFHCLCFRFSLVAACSNSTDDQQIQHHHHRKWVGPSGHKVITVSLNGHAQFRSVQDAVDSIPKNNNKSITIKIAPGFYREKVVVPATKPYITFKGAGRDVTAIEWHDRASDLGANGQQLRTYQTASVTVYANYFTARNISFTNTAPAPLPGMQGWQAVAFRISGDKAFFSGCGFYGAQDTLCDDAGRHYFKECYIEGSIDFIFGNGRSMYKDCELHSIASRFGSIAAHGRTCPEEKTGFAFVGCRVTGTGPLYVGRAMGQYSRIVYAYTYFDALVAHGGWDDWDHKSNKSKTAFFGVYNCYGPGAAATRGVSWARALDYESAHPFIAKSFVNGRHWIAPRDA

SEQ ID NO: 1706 - protein, 349 aa, Vitis vinifera
  misc_feature (48)..(341): Pfam Name: Pectinesterase Pfam Description: Pectinesterase
  misc_feature: Public GI ID no. 157327785
  misc_feature: Bit score of 362.5 for HMM based on sequences of Figure 20
  misc_feature: Functional Homolog Of SEQ ID NO. 1660
MAPFTSFFSILTLFLCYAPLKYSATIIPSTNSTKRHHKWVGPSGHLFITVDARGTGDFLSVQAAVDAVPDNNTKNVLIKINAGCYVEKVVVPVTKPYITFQGDGRDETMIEWHDRASDRGTNGQQLRTYRTASVIVFANYFSARNISFKNTAPAPMPGMQGWQAAAFRISGDKAYFSGCGFYGAQDTLCDDAGRHYFKECYIEGSIDFIFGNGRSMYKDCELHSIATRFGSIAAQDRNSPDEKTGFAFVGCKVTGRGPLYVGRAMGQFSRIVYSYTYFDDVVAHGGWDDWDHTSNKNKTVFFGVYKCWGPGAEAVRGVTWARELDFETAHPFLVKSFVNGRHWIAPSDA

SEQ ID NO: 1707 - protein, 344 aa, Oryza sativa subsp. japonica
  misc_feature (43)..(335): Pfam Name: Pectinesterase Pfam Description: Pectinesterase
  misc_feature: Public GI ID no. 38345478
  misc_feature: Bit score of 354.3 for HMM based on sequences of Figure 20
  misc_feature: Functional Homolog Of SEQ ID NO. 1660
MAFAVATLATSLLPPLACQAAPAPCERPTRGHHQYRQPVGVRRIVVDASGGGDFLSIQQAVNSVPENNTVRVIMQINAGSYIEKVVVPATKPYITFQGAGRDVTVVEWHDRASDRGPDGQQLRTYNTASVTVLSNYFTAKNISFKNTAPAPMPGMQGWQAVAFRISGDKAFFFGCGFYGAQDTLCDDAGRHYFRDCYIEGSIDFVFGNGRSLYKDCELHSTAQRFGSVAAQGRHDPCERTGFAFVNCRVTGTGRLYVGRAMGQYSRIVYAYTYFDSVIAPGGWDDWDHASNKSMTAFFGMYRNWGPGADAVHGVPWARELDYFAARPFLGKSFVNGFHWLTPDV

SEQ ID NO: 1708 - protein, 359 aa, Arabidopsis thaliana
  misc_feature (60)..(351): Pfam Name: Pectinesterase Pfam Description: Pectinesterase
  misc_feature: Public GI ID no. 9758778
  misc_feature: Bit score of 363.6 for HMM based on sequences of Figure 20
  misc_feature: Functional Homolog Of SEQ ID NO. 1660
MAQLTNSLNYLFSVSLLLFVSFHCLCFRFSLVAACSNSTDDQQIQHHHHRKWVGPSGHKVITVSLNGHAQFRSVQDAVDSIPKNNNKSITIKIAPGLEKVVVPATKPYITFKGAGRDVTAIEWHDRASDLGANGQQLRTYQTASVTVYANYFTARNISFTNTAPAPLPGMQGWQAVAFRISGDKAFFSGCGFYGAQDTLCDDAGRHYFKECYIEGSIDFIFGNGRSMYKDCELHSIASRFGSIAAHGRTCPEEKTGFAFVGCRVTGTGPLYVGRAMGQYSRIVYAYTYFDALVAHGGWDDWDHKSNKRTAFFGVYNCYGPGAAATRGVSWARALDYESAHPFIAKSFVNGRHWIAPRDA

SEQ ID NO: 1709 - DNA, 1408 bp, Glycine max
  misc_feature: Ceres Clone ID no. 560813
  misc_feature: Encodes the peptide sequence at SEQ ID NO. 1710
atcttatcgctttttggctagcacgttgcacattcctcaaatatttaagaattcccatacaaataagcacagtgtgtctccgctatttcttcaacatttgttctctccgcgttcgatgctatctaatgacttcttcttcactcttggtgtcactgcaagtagcgcttgcgattttcgcttgcatattccatgcagcaacagtgacatgtaaaccccaccaccgcgaccgtaccttaaaaatattctcttctacgagcaactcctcaaagagtagccaccattggatcggacccattggtcaccgtaaaatcaccgttgacattaacggcggtggccactaccggtccgtccaagacgccgtcaatgccgtccccgacaacaaccgaaggaatgtccttattcaaatcaacgccggatgctacaaagaaaaggtagttgtgcccgtgacgaagccgtacataacttttgagggcgcgggtaaagaagtgacggtgatagaatggcatgatcgagcaagtgaccctggtcctagcggacagcaattgcgtacttacagaaccgcttctgttactgtttttgccagctatttttctgccaggaacatcagcttcaagaacacagcacctgcaccaatgccggggatgcagggatggcaagcggtggcgtttcgcatatccggcgacaaagcatacttctccggatgcggtttctacggtgcacaagacaccctttgcgacgatgcaggcagacattacttcaaggaatgctacattgaaggatccatcgatttcatttttggcaatggcaggtccatgtacaaggattgcgagctgcactcaatagcaacgaggttcggttccatagcggcccacgataggaaacagccagaagagaagacagggttcgcattcgtacgatgcaaggtgacaggaacgggtccgctatatgtgggacgagcaatgggacagtattcgagaattgtctactcctacacatatttcgatgatattgttgcacatggcggktgggatgattgggaccatgcccacaataagaacaagactgtgttcttcggagtgtacaagtgttggggaccaggagcagaggctgtacgtggggtytcatgggcccgagacttagatttcgaagctgcccatccatttatcaggaagagtttcgtcaatgggagacactggatcgcgccatcagatgcttaattagtcataacgtctttgttaactcactcacccttcacaagtgaacaaaacaatttacattcaaattacaaaaccgttgttgcatccttcattcattcatttgtttttgtcaatataggaatttttttatccatccttgtagaatggccggaacactttccaagattttttttattgaatattcttctatc

SEQ ID NO: 1710 - protein, 363 aa, Glycine max
  misc_feature (61)..(355): Pfam Name: Pectinesterase Pfam Description: Pectinesterase
  misc_feature: Ceres Clone ID no. 560813
  misc_feature: Bit score of 365.9 for HMM based on sequences of Figure 20
  misc_feature: Functional Homolog Of SEQ ID NO. 1660
  misc_feature (300)..(300): Xaa is any aa, unknown, or other
  misc_feature (332)..(332): Xaa is any aa, unknown, or other
MTSSSLLVSLQVALAIFACIFHAATVTCKPHHRDRTLKIFSSTSNSSKSSHHWIGPIGHRKITVDINGGGHYRSVQDAVNAVPDNNRRNVLIQINAGCYKEKVVVPVTKPYITFEGAGKEVTVIEWHDRASDPGPSGQQLRTYRTASVTVFASYFSARNISFKNTAPAPMPGMQGWQAVAFRISGDKAYFSGCGFYGAQDTLCDDAGRHYFKECYIEGSIDFIFGNGRSMYKDCELHSIATRFGSIAAHDRKQPEEKTGFAFVRCKVTGTGPLYVGRAMGQYSRIVYSYTYFDDIVAHGXWDDWDHAHNKNKTVFFGVYKCWGPGAEAVRGXSWARDLDFEAAHPFIRKSFVNGRHWIAPSDA

SEQ ID NO: 1711 - protein, 344 aa, Brassica oleracea
  misc_feature (42)..(336): Pfam Name: Pectinesterase Pfam Description: Pectinesterase
  misc_feature: Public GI ID no. 89257516
  misc_feature: Bit score of 332.2 for HMM based on sequences of Figure 20
  misc_feature: Functional Homolog Of SEQ ID NO. 1660
MASRDSYKQQCIRTVINSPCSNSTEEQHHRHRKWVGPSGHKVITVSLNGHAQFRSVQGAVDSIPKNNNMSIVIKIAPGYYREKVVVPATKPYITFKGAGRDVTVIEWHDRASDRGPDGQQLRTYQTASVTVYANHFSARNISFTNTAPAPMPGMQGWQAVAFRISGDKAYFSGCGFYGAQDTLCDDAGRHYFKECYIEGSIDFIFGNGRSMYKDCELHSIASRFGSIAAHGRTCPEEKTGFTFVGCRVTGTGPLYVGRAMGQYSRIVYAYTYFDALVAHGGWDDWDHKSNKSKTAFFGVYNCYGPGAAATTGVSWARALDYESAHPFIAKSFVNGRHWIAPRDA

SEQ ID NO: 1712 - protein, 370 aa, Physcomitrella patens subsp. patens
  misc_feature (75)..(363): Pfam Name: Pectinesterase Pfam Description: Pectinesterase
  misc_feature: Public GI ID no. 168033536
  misc_feature: Bit score of 342.5 for HMM based on sequences of Figure 20
  misc_feature: Functional Homolog Of SEQ ID NO. 1660
MAGLGYTVCLLVTVALVCSAEPAQGSQKVPETREEVIASFASWVQRVGEKHAAWERAAKTATTADEFASKVGETVIVVDQSGAGNFKTVNEALNSIPEHSKSPVTIKVNAGTYNERVVIPKSKEFITLQGAGRDVTKITASNAAGNSGTTYTSATFGVSAPHFTARNISFENSSPPPDGGAQQQAVALRTTGDMNAFYGCAFYGHQDTLYDHRGRHFFKDTLIVGTVDFIFGDGKSLYKNCELRVLPSSGGSLTAQKRLSGSEDTGYSFVNCKVTGSGPPQVYLGRAWGPYSRVIFAFTEFANIIKPEGWYNWGDPSREKTVFYGMYKCFGPGASSPSRAYYSKELTDAEAAPFLSLNYIDGGLWVKEGI

SEQ ID NO: 1713 - protein, 386 aa, Physcomitrella patens subsp. patens
  misc_feature (89)..(380): Pfam Name: Pectinesterase Pfam Description: Pectinesterase
  misc_feature: Public GI ID no. 167999009
  misc_feature: Bit score of 364.1 for HMM based on sequences of Figure 20
  misc_feature: Functional Homolog Of SEQ ID NO. 1660
MARPWNSKFLLLLRLLLFFQKLCNTQGRSYGWESAYARTQPVRFEPLEDAEEGASGSRFWANPDHGHHHKYGHPTHFKRTRALPSNTNYISVGKQGNVDFNTVQEAIDAIPENNAVWVEISIRAGVYREKVFIPSNKPFVILQGEGRSTTTIAHRQSASQSGTANSATVTVYSSNFIARGIGFQNDAPLAEPGQVDGQAVAVLLVTDKAAFYSCGFYGGQDTLFDFSGRHYFKECYFEGNIDIISGNGQSVFKNCEIHEIATQAYISGSLTAQKRSSPDENTGFVFINCLITGIGTGQVFLGRAWGPYSRVVYIYTYMDDVILPEGWQDWSNPSRERTVYYGQYQCSGPGSDASQRVKWSHELSDGEAQNFLQLSWIDGQAWLQEV

SEQ ID NO: 1714 - protein, 371 aa, Physcomitrella patens subsp. patens
  misc_feature (87)..(365): Pfam Name: Pectinesterase Pfam Description: Pectinesterase
  misc_feature: Public GI ID no. 168051768
  misc_feature: Bit score of 375.9 for HMM based on sequences of Figure 20
  misc_feature: Functional Homolog Of SEQ ID NO. 1660
MGSMSRCIFSALVILVAVCSVAKPASAAEFRTLSGQGSDSDSSWDKWLESVRVEYEKKQQQSVLGVDETMTTQAAPKGKTIYVNKQKGPYRTVQQAVNAVPKGNTKRIVIYIPDGVYKEKILVPKTKPFITFQCQSRKATLVWGDTAAKAGGTAKSASTAIESKGFIAYDCTFANSAPAPPGGAVGKQAVALRIQGDQGAFYRCAFLGAQDTLYDKEGRHYFRDCYIRGSIDFVFGDGQSIYKKCLIESIAKGTSGSITAQKRESFSRTGFVFDQCTIRGSGSIYLGRAWGTHSRVVFCRCNMANIIRPIGWQDWDDKRRQKTVFYAEYACTGPGANRKGRAPWSKVLSAAQAKPFLDYGFIDAKQWLPYV

SEQ ID NO: 1715 - protein, 360 aa, Brassica oleracea
  misc_feature (58)..(352): Pfam Name: Pectinesterase Pfam Description: Pectinesterase
  misc_feature: Public GI ID no. 89257486
  misc_feature: Bit score of 355.3 for HMM based on sequences of Figure 20
  misc_feature: Functional Homolog Of SEQ ID NO. 1660
MAQLRSFTYSLDLFSVSLLILIFHCLCFRFSFVAACSNSTEDQHHHHRKWVGPSGHKVITVSLDGHSQFRSVQDAVDSIPKNNNMSIVIKIAPGFYREKVVVPATKPYITFKGAGRDVTVIEWHDRASDRGPDGQQLRTYQTASVTVFANYFSARNITFTNTAPAPMPGMQGWQAVALRISGDKAYFSGCGFYGAQDTLCDDAGRHYFKECYIEGSIDFIFGNGRSMYKDCELHSIASRFGSIAAHGRTCPEEKTGFTFVGCRVTGTGPLYVGRAMGQYSRIVYAYTYFDALVAHGGWDDWDHKSNKSKTAFFGVYNCYGPGAAATTGVSWARALDYESAHPFIAKSFVNGRHWIAPRDA

SEQ ID NO: 1716 - DNA, 1128 bp, Populus balsamifera subsp. trichocarpa
  misc_feature: Ceres Annot ID no. 1484806
  misc_feature: Encodes the peptide sequence at SEQ ID NO. 1717
atgaaacgatcattctcttcttttgcattacttttgatcacattacaagctatccaaaccattcccacagcaatctccacgaccaaactcgtccctgcagacatctcaaaagtaaaagcatgggttgctaagaacatcaatgactttaatgatcgaaaatccaatgactccaaagggattccacgcattgttttggatgagcttttggcctcggccgaggacaggctgaggttgataagggtggcgaaggatggtttcgctgattttacaactatttctgatgccttggagaccattccaaaggacaacaagcgaagaacaattattcagattggtgggggtgagtattgggagaaaatcacaattaaatgcaataagccgtttattacattttatggggatccgatggatataccaagaattgtgttcaatggcaccgcttcccagtatggaacgatctatagcgcaaccgtggccgtagagagcgattacttcatggccgtcaatgtggcatttgtgaattcggctccgttgccaaatgtcaatagaactggtgggcaggcagtgtccatgagaatatctggagataaagcagcgtttcataactgcaagttcattgggtttcaggacactttatgtgatgatagaggcaggcatttcttcaaggactgctatgtccgtggaactgttgacttcatttttggaaacggaaaatccctctacttgaacacaactattgattctgtagcggaaggtactggggtgatcacagctcaagcgcgggaacatgtcaccgaggacagtggattcaccttcatccattgcaacttaactggtttaggcaacaacacttacctcggccgtgcatggaagcagagaccaagggttgtgttcgcttacacttacatgggccacctgattaacgatgaaggatggtccacctggaagttccctgagcgtgaagggactgtatattatggagagtacaagtgcgctggaccaggttctagctccttcggccgagttccatacacgaagtcattatctaaagcagaagcaaaacccttcctgagcatgacttacatcaatggaaacaagtggctaattccaccacccaagtttccttga

SEQ ID NO: 1717 - protein, 375 aa, Populus balsamifera subsp. trichocarpa
  misc_feature (81)..(365): Pfam Name: Pectinesterase Pfam Description: Pectinesterase
  misc_feature: Ceres Annot ID no. 1484806
  misc_feature: Bit score of 333.5 for HMM based on sequences of Figure 20
  misc_feature: Functional Homolog Of SEQ ID NO. 1660
MKRSFSSFALLLITLQAIQTIPTAISTTKLVPADISKVKAWVAKNINDFNDRKSNDSKGIPRIVLDELLASAEDRLRLIRVAKDGFADFTTISDALETIPKDNKRRTIIQIGGGEYWEKITIKCNKPFITFYGDPMDIPRIVFNGTASQYGTIYSATVAVESDYFMAVNVAFVNSAPLPNVNRTGGQAVSMRISGDKAAFHNCKFIGFQDTLCDDRGRHFFKDCYVRGTVDFIFGNGKSLYLNTTIDSVAEGTGVITAQAREHVTEDSGFTFIHCNLTGLGNNTYLGRAWKQRPRVVFAYTYMGHLINDEGWSTWKFPEREGTVYYGEYKCAGPGSSSFGRVPYTKSLSKAEAKPFLSMTYINGNKWLIPPPKFP

SEQ ID NO: 1718 - DNA, 1029 bp, Sorghum bicolor
  misc_feature: Ceres Annot ID no. 8702233
  misc_feature: Encodes the peptide sequence at SEQ ID NO. 1719
atggctctggctcgcatcctcttgttgctgctggtcaccgtcgcgagcctcctgccgccgatcgcgagccagcaggcagcagcgacgaagtgcgagtacagaaagcactcgggccaccggtacaggcacccggtgggcgtgcggaagatcgtggtagacgcgagcggcgccggcgacttcgtctccatccaacaggccgtcgactcggtgccggagggcaacaccatgcgcgtcatcatgcagatcaacgccggcacgtacatagagaaggtggtggtgccagcgtcgaagccgtacgtgacgttccagggcgccgggcgcgacgtgacggtggtggagtggcacgaccgggccagcgaccgcggccccgacgggaagccgctccgcacctacaacaccgcctcagtaaccattctcgctaactatttcaacgctaagaacatcagcttcaagaacacagctccggcaccaatgcccggcacgcaaggagggcaggcggtggcgttccgcatctccggcgacaaggccttcttcttcggctgcgggttctacggcgcgcaggacacgctgtgcgacgacgccggccggcactacttccgcgactgctacatccagggctccatcgacttcgtcttcggcaacgcccgctccctctacaaggactgcgagctgcactcgacggcgcagcggttcgggtcggtggcggcgcacgggcggcacgacccgtgcgagcgcacgggcttcgccttcgtcaactgccgtgtgaccggcacggggaggctctacgtagggcgagccatgggccagtactcgcgcatcgtctacgcctacacctacttcgacagcgtcatcgcgcccggcggatgggatgactgggatcacaccagcaacaagagcatgaactggggccccggagtcgacgccgtgcacggcgtgtcgtgggcgcgggagctcgactacttcgccgcccgccccttcctcggcaagagcttcgtcaacggataccactggctcacacctgatgtctga

SEQ ID NO: 1719 - protein, 342 aa, Sorghum bicolor
  misc_feature (49)..(335): Pfam Name: Pectinesterase Pfam Description: Pectinesterase
  misc_feature: Ceres Annot ID no. 8702233
  misc_feature: Bit score of 356.1 for HMM based on sequences of Figure 20
  misc_feature: Functional Homolog Of SEQ ID NO. 1660
MALARILLLLLVTVASLLPPIASQQAAATKCEYRKHSGHRYRHPVGVRKIVVDASGAGDFVSIQQAVDSVPEGNTMRVIMQINAGTYIEKVVVPASKPYVTFQGAGRDVTVVEWHDRASDRGPDGKPLRTYNTASVTILANYFNAKNISFKNTAPAPMPGTQGGQAVAFRISGDKAFFFGCGFYGAQDTLCDDAGRHYFRDCYIQGSIDFVFGNARSLYKDCELHSTAQRFGSVAAHGRHDPCERTGFAFVNCRVTGTGRLYVGRAMGQYSRIVYAYTYFDSVIAPGGWDDWDHTSNKSMNWGPGVDAVHGVSWARELDYFAARPFLGKSFVNGYHWLTPDV

SEQ ID NO: 1720 - DNA, 1071 bp, Solanum lycopersicum
  misc_feature: Ceres Annot ID no. 8463390
  misc_feature: Encodes the peptide sequence at SEQ ID NO. 1721
atggaatatcatccggcaacaagtattagcacaagtagtgctagaagggataatacattgaaggtggctaatgaagaaaaagactacttgaattggattcatcgcatgagttctcgcaatcattctgttttccaagaagctaagaacaaattagagccttgtaaatttattaaggtgaataaaaacccgaaattcggagattttactacggttcagaaggctattgattcaatcccaatagtcaattcgtgtcgagtggttatttctgttagtcctggaacttacagggaaaagattgaaattccagcaacaatggcttacattaccctggaaggtgctgcttcacataaaacaactatcaaatgggatgacactgcagataggacaggaaaaagtggccaaccaatgggaacttatggttccgcaacttttgctgttaattccccctatttcattgccaaaaacatcacctttaagaatgtagcaccaccaccaccatcaggggcactaggaaagcaagcggtggcattaagaatatcggcagacacagcggcgttcataaattgcaagttcattggagcacaggacacactgtatgatcacaggggcaggcactatttcaagaactgttatattcaaggttctgtagattttatatttggtgatgggctctccctttatgagaattgtcatttacgtgcaaaaacaaaaagctatggggcattgacagcccagaagagggagagtttactggaggaaactggattctcttttctcaattgcaaagttactggatctggtgctctttacttgggcagggcttggggtactttctctagggtcgtatttgcttacacttatatggataaaattatcacatcaaagggatggtatgactggggagataagaacaggcatatgacggtattttttgggcaattcaagtgttcaggaccaggggcagaccatggtgaaagggtgaaatggtccagggagctcactgaacaagaagctaaaccgtttatctcactcagtttcatagatggtcatgaatggttactccatatttga

SEQ ID NO: 1721 - protein, 356 aa, Solanum lycopersicum
  misc_feature (66)..(350): Pfam Name: Pectinesterase Pfam Description: Pectinesterase
  misc_feature: Ceres Annot ID no. 8463390
  misc_feature: Bit score of 339.3 for HMM based on sequences of Figure 20
  misc_feature: Functional Homolog Of SEQ ID NO. 1660
MEYHPATSISTSSARRDNTLKVANEEKDYLNWIHRMSSRNHSVFQEAKNKLEPCKFIKVNKNPKFGDFTTVQKAIDSIPIVNSCRVVISVSPGTYREKIEIPATMAYITLEGAASHKTTIKWDDTADRTGKSGQPMGTYGSATFAVNSPYFIAKNITFKNVAPPPPSGALGKQAVALRISADTAAFINCKFIGAQDTLYDHRGRHYFKNCYIQGSVDFIFGDGLSLYENCHLRAKTKSYGALTAQKRESLLEETGFSFLNCKVTGSGALYLGRAWGTFSRVVFAYTYMDKIITSKGWYDWGDKNRHMTVFFGQFKCSGPGADHGERVKWSRELTEQEAKPFISLSFIDGHEWLLHI

SEQ ID NO: 1722 - DNA, 1116 bp, Populus balsamifera subsp. trichocarpa
  misc_feature: Ceres Annot ID no. 1480738
  misc_feature: Encodes the peptide sequence at SEQ ID NO. 1723
atgtcaaactgtcgatacaactctgtccacctcttcgttcttactattctcctcctcaattccggccaaacactatgccacaccaaagggttaagaacaagaaatcctcggggagtgcaaccgatgatgaatgcgagcagagttcaattctcggagcagcaattcatgaagtgggtcacgttcgttggtagtcttaaacactctgttttcaaagcagcaaagaataagatattcccttcttacacccttattgtcgctaagaatccatccgccggagacttcacaacaattcaagaggcaattgattctcttcccttcatcaatcttgtgagggtgatcataaaaatccgtgcaggagtttacaaagaaaaggtgaatatacctccattaaaatccttcataaccatggaaggagcaggagcagataatacaattgttcaatggggagacactgctcaaacaccaggggctagaggacagcctatgggaacctacagttcggctacttttgctgtgaattccccgttttttgttgccaagaacatcacgttcaagaacacggcgccgctgccggcaccaggagccatgggacagcaagcagtggcattaagaatatcggcagatacagcagctttcctggggtgcaaattcttgggagcgcaggacacactatatgatcatgtgggcaggcattattacaaggattgctacattgaaggttctgtggatttcatttttggcaacgggttgtccttatttgaggggtgtcacgtgcatgcaatagctcaattcactggggccctgacggcacaaggcaggagtagtcttctagaagacacgggcttctcatttgtgaactgtaaggtcacggggtcaggcgctctttaccttgggagggcgtggggccccttttctcgggtcgtctttgcttacacttacatggacaacatcatcattcccaagggctggactgtgttctatgggcaatacaaatgcacagggcctggagcaagcttcgcagggagagtgtcatggtcgagagaactcactgactcggaagctaagccctttacttcacttaccttcatcgatggttctgaatggatcaaaatgtaa

SEQ ID NO: 1723 - protein, 329 aa, Populus balsamifera subsp. trichocarpa
  misc_feature (40)..(324): Pfam Name: Pectinesterase Pfam Description: Pectinesterase
  misc_feature: Ceres Annot ID no. 1480738
  misc_feature: Bit score of 338.2 for HMM based on sequences of Figure 20
  misc_feature: Functional Homolog Of SEQ ID NO. 1660
MNASRVQFSEQQFMKWVTFVGSLKHSVFKAAKNKIFPSYTLIVAKNPSAGDFTTIQEAIDSLPFINLVRVIIKIRAGVYKEKVNIPPLKSFITMEGAGADNTIVQWGDTAQTPGARGQPMGTYSSATFAVNSPFFVAKNITFKNTAPLPAPGAMGQQAVALRISADTAAFLGCKFLGAQDTLYDHVGRHYYKDCYIEGSVDFIFGNGLSLFEGCHVHAIAQFTGALTAQGRSSLLEDTGFSFVNCKVTGSGALYLGRAWGPFSRVVFAYTYMDNIIIPKGWTVFYGQYKCTGPGASFAGRVSWSRELTDSEAKPFTSLTFIDGSEWIKM

SEQ ID NO: 1724 - protein, 323 aa, Physcomitrella patens subsp. patens
  misc_feature (14)..(307): Pfam Name: Pectinesterase Pfam Description: Pectinesterase
  misc_feature: Public GI ID no. 168023639
  misc_feature: Bit score of 299.6 for HMM based on sequences of Figure 20
  misc_feature: Functional Homolog Of SEQ ID NO. 1660
MFVKFPKPKGKSRKITVSKFGKDDFITINAALDSIAEHERHRTVIHIREGVYEEKIVINASKPYITFRGDGLDKTIIQWGDQAGDFDDDDQMLKTYRSATVGVSSQYFIAENIQFRNTAPQPPPGAVLRQAVALRITGDRAAFYNCAFYGFQDTLYDHKGRHYFENCYIQGSIDFVFGNGRSLYKNCHLHSEAKVFGSVTAQKRNESHMNTGFSFVDASITGRGPIYLGRAWGNFSRTVFSYTWMDNIVYPPGWSDFGFADRQKKVFYAQYNCRGPGAYSKERVAWVRELTAEEAKPFLSVHFINGKTWLKKFLGKSKKSKRH

SEQ ID NO: 1725 - protein, 357 aa, Vitis vinifera
  misc_feature (60)..(347): Pfam Name: Pectinesterase Pfam Description: Pectinesterase
  misc_feature: Public GI ID no. 157342478
  misc_feature: Bit score of 326.3 for HMM based on sequences of Figure 20
  misc_feature: Functional Homolog Of SEQ ID NO. 1660
MIFIPAVVSDKTKHIPSDTSKLDAWIATNIREYRQRIWESKKGLHSSLDPILVAAEAEVNVIKVRKDGTGDFKTITDALNSIPKGNLKRTVIWIGGGEYWEKITIDRSKPFITLYGSTADMPSITYDGTAFKYGTVDSATVAVESDYFMAVNIAFVNSAPMPDGKRVGAQAVAMRISGDKAAFHNCMFIGFQDTLCDDRGRHFFKDCQIQGTVDFIFGDGKSLYLNTMIQSVAKGVGVITAQARENVADTSGFAFVHCNISGSGDTYLGRAWRLRPRVVFAYTYMGTLINGEGWSDNLHADRDKTVYYGEYMCEGPGATPSGRVKFAKLLTGEEAKPFLSMTYINGNKWLLPPPNYV

SEQ ID NO: 1726 - DNA, 1218 bp, Panicum virgatum
  misc_feature: Ceres Clone ID no. 1792586
  misc_feature: Encodes the peptide sequence at SEQ ID NO. 1727
atcccgctgaatcgctgtgctgtgcctgtaggtggccaactcatttcctcccccaactcccatgggcgactacggcaccgccaccaacccctcctcgccgcccgcggccatgaatcccgactccgaggtggccttcgacttcctgccctacctctgccagtacaagaacggccgcatctaccgccccggcggctccccaaccgtccccgccggcacggaccccgccaccggcgtcgtctccaaggacgtccgcgccggccccgcctccgtccgcatctacctcccgcccggcgccgccggcaagatcccggtcgtcgtctacttccacggcggcggctttgtggtcggctcgccggcgcggccgagcacgcacaactacctcgtcgacctggtggcccgctcgggcgccatcgtcgtgtccgtctactaccgcctcgcgccggagcacaagctccccgccgcgtacgacgacgggtgggcggggctgcggtgggcggccacgctcggcggcggcgaggagccctggctgctggaccacgccgacctcacccgcgtgttcctggtcggctgcagcgccggcgccaacatcgcgcacaacaccgccgtgcgggcctcggcccccggcgcgctcccggacggcgtggccctccgcgggctcgcgctggtgcacccgtacttcacgggcagggaggccgtcggcggcgaggtcgcgttcggccccgagatccgggggtacatggaccgcacgtggcgcttcgtgatctcggagacggtggggctggacgacccgcgcgtgtgcccgttcgtggacgacgccgcccgccggacctccgccgggatcccgtgcgagcgcgtgctcgtgtgcgtcgccgagaacgacttcctgctcagggagcgcgggctctggtaccaccgggagctcaaggccagcgggtacgccggcgagctggagatcttcgagtccaagggcgtcggccacgcgttccacttcgacctgctcggctccgagcagggcgtccagctgcaggagcggaccatcgctttcatcaacaaatgaatggaatctcggctcctgatatcgacatgggttcatgaagatatattattgtctatttctcatgaaataagtgtttatgagttttgtgctaccatcgatcatttccatacttcaactcgatcatttccatacttcaactgtaataccttgaaatttgcttc

SEQ ID NO: 1727 - protein, 331 aa, Panicum virgatum
  misc_feature (85)..(310): Pfam Name: Abhydrolase_3 Pfam Description: alpha/beta hydrolase fold
  misc_feature: Ceres Clone ID no. 1792586
  misc_feature: Bit score of 938.2 for HMM based on sequences of Figure 32
  misc_feature: Functional Homolog Of SEQ ID NO. 1727
  misc_feature: in Figure 32
MGDYGTATNPSSPPAAMNPDSEVAFDFLPYLCQYKNGRIYRPGGSPTVPAGTDPATGVVSKDVRAGPASVRIYLPPGAAGKIPVVVYFHGGGFVVGSPARPSTHNYLVDLVARSGAIVVSVYYRLAPEHKLPAAYDDGWAGLRWAATLGGGEEPWLLDHADLTRVFLVGCSAGANIAHNTAVRASAPGALPDGVALRGLALVHPYFTGREAVGGEVAFGPEIRGYMDRTWRFVISETVGLDDPRVCPFVDDAARRTSAGIPCERVLVCVAENDFLLRERGLWYHRELKASGYAGELEIFESKGVGHAFHFDLLGSEQGVQLQERTIAFINK

SEQ ID NO: 1728 - DNA, 993 bp, Sorghum bicolor
  misc_feature: Ceres Annot ID no. 8735802
  misc_feature: Encodes the peptide sequence at SEQ ID NO. 1729
atgggcgacgccaccgccaccaacccctcctcgccgaccgcggccatggatcccgactccgaggtcgtcttcgacttccagccctacctctgccagtacaagagcggccgcatccaccgccccggcggcgcccctaccgtccccgccggcacggaccccgccaccggcgtcgtctccaaggacatccgcgccggccccgcctccgtgcgcgtctacctccctcccggcgccaccggcaagatcccggtgatcgtctacttccacggcggcggcttcgtggtcgggtcgccggcgcggccgggcacgcacaactacctcaacgacctggtcgcccggtcgggcgccatcggcgtgtccggctactaccgcctcgcgccggagcacaagctgcccgccgcgtacgacgacgcgtgggcggcgctgcggtgggcggtgacgctcggcgacggcgaggacccgtggctgctggagcacgccgacctgtcccgcgtcttcctggcgggctgtagcgccggcgccaacatcgcgcacaacacggccgtgcgggcctccgccgccggcgcgctccccgacggcgtcaccatccgcgggctcgccctggtgcacccctacttcacgggcagcgaggccgtgggcggcgagatggcgttcggccccgagatccggccgttcatggaccggacctggcggttcgtggtctcggagacggtggggctggacgacccgcgcgtgaacccgttcgtggacgacgccgcgcgcaaggcctccgccgggatcccctgcgaccgcgtgctggtttgcgtggccgaggacgacttcctgctcaaggagcgcgcgctgtggtaccaccgggagatcaaggccagcgggtacgccggcgaggtcgagctgttcgagtccaagggcgtcggccatgcgttccacttcgacatgctggactcggagcaggccgttgaactccaggagcggaccgtggctttcatcaagaaatga

SEQ ID NO: 1729 - protein, 330 aa, Sorghum bicolor
  misc_feature (84)..(309): Pfam Name: Abhydrolase_3 Pfam Description: alpha/beta hydrolase fold
  misc_feature: Ceres Annot ID no. 8735802
  misc_feature: Bit score of 958.2 for HMM based on sequences of Figure 32
  misc_feature: Functional Homolog Of SEQ ID NO. 1727
  misc_feature: in Figure 32
MGDATATNPSSPTAAMDPDSEVVFDFQPYLCQYKSGRIHRPGGAPTVPAGTDPATGVVSKDIRAGPASVRVYLPPGATGKIPVIVYFHGGGFVVGSPARPGTHNYLNDLVARSGAIGVSGYYRLAPEHKLPAAYDDAWAALRWAVTLGDGEDPWLLEHADLSRVFLAGCSAGANIAHNTAVRASAAGALPDGVTIRGLALVHPYFTGSEAVGGEMAFGPEIRPFMDRTWRFVVSETVGLDDPRVNPFVDDAARKASAGIPCDRVLVCVAEDDFLLKERALWYHREIKASGYAGEVELFESKGVGHAFHFDMLDSEQAVELQERTVAFIKK

SEQ ID NO: 1730 - DNA, 1274 bp, Zea mays
  misc_feature: Ceres Clone ID no. 292537
  misc_feature: Encodes the peptide sequence at SEQ ID NO. 1731
gtccgcctcgctgtgcctgtgttgtacttgtactactgctactgctaggtagccaactcatttcctcccccaacccaaatgggcgactccaccgccaccaacccctcctcggcgaccgcagccatggatcccgactccgaggtcgtcttcgacttccagccctacctctgccagtacaagagcggccgcatccaccggcccggcggcgcccccaccgtccccgccggcacggacccggccaccggcgtcgtctccaaggacatccgctccggccccgcctccgcgcgcgtctacctccctcccggcgccaccggcaagatcccggtgatcgtctacttccacggcggcggcttcgtggtcggctcgccggcgcggccgggcacgcacagctacctgaacgacctcgtcgcccggtcgggcgccatcggcgtgtccgtctactaccgcctcgcgccggagcacaagctgcccgccgcgtacgacgacgcgtgggcggcgctgcggtgggcggtgacgctcggcggcgaggacccgtggctgctggagcacgccgacctgtcccgcgtgttcctggcgggctgcagcgccggcgccaacatcgcgcacgacacggccgtgcgagcctccgcggccggcgcgctccccgacggcgtggccatccgcgggctcgccctggtgcacccgtacttcactggcagggaggccgtgggcggcgagacggcggcgttcggccccgagatccggccgtccatggaccggacttggcggttcgtggtgtcggacacggtggggctggacgacccgcgcgtgaacccgttcgtggacgacgcggcgcgcaaggcctccgccgggatcccgtgccagcgcgtgctggtgtgtgtggccgagaacgacttcctgctcaaggagcgcgcgctgtggtaccaccgggagatcaaggccagtggctacgccggcgaggtcgagctgttcgagtctaagggcgtcggccacgcgttccacttcgacatgctggactcggagcagggcgtcgcactccaggagcggatcgtggctttcataaataaatgaaaaccgagacgataaataagagttttcttttttttgtccactatcgattcacggagtaaatcgattgtttggtttggtccattttatccgctgtcggtccacggagtaattcgttgtctcgttttttgttagaacaatttgtatcgattcacagagctatcagtgcggtgattgatcaccagcggtatgtaactccattcctg

SEQ ID NO: 1731 - protein, 330 aa, Zea mays
  misc_feature (84)..(309): Pfam Name: Abhydrolase_3 Pfam Description: alpha/beta hydrolase fold
  misc_feature: Ceres Clone ID no. 292537
  misc_feature: Bit score of 940.8 for HMM based on sequences of Figure 32
  misc_feature: Functional Homolog Of SEQ ID NO. 1727
  misc_feature: in Figure 32
MGDSTATNPSSATAAMDPDSEVVFDFQPYLCQYKSGRIHRPGGAPTVPAGTDPATGVVSKDIRSGPASARVYLPPGATGKIPVIVYFHGGGFVVGSPARPGTHSYLNDLVARSGAIGVSVYYRLAPEHKLPAAYDDAWAALRWAVTLGGEDPWLLEHADLSRVFLAGCSAGANIAHDTAVRASAAGALPDGVAIRGLALVHPYFTGREAVGGETAAFGPEIRPSMDRTWRFVVSDTVGLDDPRVNPFVDDAARKASAGIPCQRVLVCVAENDFLLKERALWYHREIKASGYAGEVELFESKGVGHAFHFDMLDSEQGVALQERIVAFINK

SEQ ID NO: 1732 - protein, 319 aa, Oryza sativa subsp. japonica
  misc_feature (72)..(297): Pfam Name: Abhydrolase_3 Pfam Description: alpha/beta hydrolase fold
  misc_feature: Public GI ID no. 51090388
  misc_feature: Bit score of 889.4 for HMM based on sequences of Figure 32
  misc_feature: Functional Homolog Of SEQ ID NO. 1727
  misc_feature: in Figure 32
MDPDSEVAFDFQPYLCQYKSGRVFRLGGDPTVPAGTDPVTRVVSRDIHAGAARARVYLPPGAAVSTEKLPVVVYFHGGGFVTGSPARPSTHAYLNDLVARAGAIGVSVYYRLAPENPLPAAYEDAWAAVRWAATRGDGADPWLLDHADLSRLFLAGCSAGANIAHNMAVRCGGGGALPDGVTLRGLVVVHPYFTGKEAVGAEAAFGPDVREFFDRTWRFVFPETSGLDDPRVNPFVDDATRAAAAAIPCERVQVCVAEQDVLLKERGLWYHRELKASGYGGEVELFESKGVGHAFHFVGMAGSDQAVELLERNVEFIKK

SEQ ID NO: 1733 - DNA, 1291 bp, Triticum aestivum
  misc_feature: Ceres Clone ID no. 732524
  misc_feature: Encodes the peptide sequence at SEQ ID NO. 1734
tacatactgccggcgatcgagacccgagagcgaagcctcgaagcgacggcacgagcgagctagcccacgaacgaccgaatacgcgacgcgaccagaagagctcagctagctcgtcccaatggcggcgacgggcggctcggacgaggaggtgtacttcgacttcttcccgctcgtccgccagtacaagagcggccgcgtggagcgcttcttcaacttccccccgatcccggccggcgtcgaccccgccacgggcgtcacctccaaggacgtcgtcatcgacccggccaacggcctctgggcgcgcgtcttcctcccgcccggcgccgccggcaggctccccgtcctcgtctacttccacggcggcgcctacgtcatcggctccgcgtccgaccccatgacgcacaactacctcaacggcctcgtcgccgcggccaacgtcctcgcggtggcgctagagtaccgcctcgcgccggagcacccgctccccgcggcctacgacgactcctgggaggggctcaagtgggtggcgtcccacgccgcgggcggcggagccgccgccgagccgtggctggtcgaccacggcgacttctcccgcgtgttcctggcgggcggcagcgccgggggcaccatcgcgcacgtcatggccgtgcgcgccggcgagcagggcgccctccccggcggggtcggcatcaaggggaccatcgtggtgcacccctacttcagcggcgcggcggagatcggcaaagaggcgaccacggggaaggcggagaaggccaaggccgacgccttctggcggttcctctacccgggctcgccggggctggacgacccgctgtccaacccgttctccgaggcggccggcggcagcgcggcgcgcatcgccggcgaccgcgtgctcgtctgcgtagccgagaaggacggcctccgggacaggggcgtctggtactacgagagcctcaaggcgtgcggctacggcggcgaggtggagctgctcgagtccatggacgaggaccacgtcttctactgcatgaagccgcggtccgagaaagcgatcgagttgcaggaccgcatcctcggattcctccgcaaatgagccgcttccgcgcacgccggcgagtgaagggaagggaaggttcccgtgatggaatgaataattttaccgccactgattttcctatgtttgagcttgagagatctccctttatttgttgttcctcggttatggtctcgccgatgcagccgaccgatgtttatctcaataccatggcgaagagagctagtgggtttcttg

SEQ ID NO: 1734 - protein, 324 aa, Triticum aestivum
  misc_feature (76)..(303): Pfam Name: Abhydrolase_3 Pfam Description: alpha/beta hydrolase fold
  misc_feature: Ceres Clone ID no. 732524
  misc_feature: Bit score of 873.9 for HMM based on sequences of Figure 32
  misc_feature: Functional Homolog Of SEQ ID NO. 1727
  misc_feature: in Figure 32
MAATGGSDEEVYFDFFPLVRQYKSGRVERFFNFPPIPAGVDPATGVTSKDVVIDPANGLWARVFLPPGAAGRLPVLVYFHGGAYVIGSASDPMTHNYLNGLVAAANVLAVALEYRLAPEHPLPAAYDDSWEGLKWVASHAAGGGAAAEPWLVDHGDFSRVFLAGGSAGGTIAHVMAVRAGEQGALPGGVGIKGTIVVHPYFSGAAEIGKEATTGKAEKAKADAFWRFLYPGSPGLDDPLSNPFSEAAGGSAARIAGDRVLVCVAEKDGLRDRGVWYYESLKACGYGGEVELLESMDEDHVFYCMKPRSEKAIELQDRILGFLRK

SEQ ID NO: 1735 - protein, 329 aa, Oryza sativa subsp. japonica
  misc_feature (83)..(308): Pfam Name: Abhydrolase_3 Pfam Description: alpha/beta hydrolase fold
  misc_feature: Public GI ID no. 115467066
  misc_feature: Bit score of 699.5 for HMM based on sequences of Figure 32
  misc_feature: Functional Homolog Of SEQ ID NO. 1727
MAAAAAAGAGADEEVDFEFFPIIRRYKGGRVERFMNIPPLPAGTDPATGVTSKDVVVDPAVGLWARLFLPPGGGAPQGKLPVVVYYHGGAYVVGSAADPFTHSYLNGLVAEAGILAVALEYRLAPEHHLPAAYDDSWEGLRWVASHANGGGGVEPWLLEHGDFSRVFLAGASAGGNIAHYVAARAGEHGGLGLSIRGLLVVHPYFSGAADICAEGTTGKAEKAKADEFWRFIYPGSPGLDDPLSNPFSDAAGGISAARVAADRVLVCVAEKDSLRDRGVWYYESLKASGYAGEVDLLESMGEGHVFYCMDPRCERAREMQARILSFLRK

SEQ ID NO: 1736 - DNA, 1002 bp, Sorghum bicolor
  misc_feature: Ceres Annot ID no. 8735801
  misc_feature: Encodes the peptide sequence at SEQ ID NO. 1737
atggcggcggacccggacacggaggtgcaggcggagttcccgccgctggtccgccagtacaagagcggccgcgtcgagcggttctttaacccgtccccgctcccggccggcaccgacccggccacgggcgtcgtgtccaaggacgtcgtcgtcgatccggccaccggcctctgggcgcgcctcttcctcccgcccagcagcagccacggcaagaagcagcagctccccatcgtcgtctactaccacggcggcgcctacgtgatcggctcggcggccgacccgtggacgcacacctacctcaacgggctcgtcgccaaggccggcgtcctcgccgtggcgctcgagtaccgcctcgcgccggagcacccgctcccggccgcctacgaggactcgtgggaggggctcaagtgggtggccacccacgccgccgccaccgccgccgcgggcgggggaccggagccgtggctgaccgagcacggcgacttctcccgcgtgttcctggccggagccagcgcgggcggcaccatcgcgcactacgtcgccgtccgtgccggcgagcagcagggccagggccagggcgacctcctcggggtgcgcgtcagggggctgctgatagtgcacccctacttcagcggcgcggcggacatcggcgacgaggggacgacggggaagcagcgcaaggcgcaggccgacgcgttctggcggttcctgtaccccggctcccccgggctcgacgacccgctttccaacccgttctcggaggccgccggcggcagcgcggcgcgcgtcgccgccgagcgagtgctcgtctgcgtcgccgagaaggatgacctcagggacaggggcgtctggtactacgagagcctcaaggccggcggctaccccggcgaggtggagctgctcgagtccaagggcgagggccacgtcttctactgcatgaacccgagctgcgacagggcgcgggagatggaggagcgcgtcctgagcttcctacgcaagtga

SEQ ID NO: 1737 - protein, 333 aa, Sorghum bicolor
  misc_feature (78)..(312): Pfam Name: Abhydrolase_3 Pfam Description: alpha/beta hydrolase fold
  misc_feature: Ceres Annot ID no. 8735801
  misc_feature: Bit score of 664.4 for HMM based on sequences of Figure 32
  misc_feature: Functional Homolog Of SEQ ID NO. 1727
MAADPDTEVQAEFPPLVRQYKSGRVERFFNPSPLPAGTDPATGVVSKDVVVDPATGLWARLFLPPSSSHGKKQQLPIVVYYHGGAYVIGSAADPWTHTYLNGLVAKAGVLAVALEYRLAPEHPLPAAYEDSWEGLKWVATHAAATAAAGGGPEPWLTEHGDFSRVFLAGASAGGTIAHYVAVRAGEQQGQGQGDLLGVRVRGLLIVHPYFSGAADIGDEGTTGKQRKAQADAFWRFLYPGSPGLDDPLSNPFSEAAGGSAARVAAERVLVCVAEKDDLRDRGVWYYESLKAGGYPGEVELLESKGEGHVFYCMNPSCDRAREMEERVLSFLRK

SEQ ID NO: 1738 - DNA, 1308 bp, Panicum virgatum
  misc_feature: Ceres Clone ID no. 1807095
  misc_feature: Encodes the peptide sequence at SEQ ID NO. 1739
ccgggattcctcccccactacatagcgccgcgcggccagcctcgcagccgcaccgacgccggggacgagcgatggcggcggcggacccggacacggaggtgcaggctgatttcttccccatggtccgccggtacaggagcggccgcgtggagcggttcatgaacatggccccggtcccggccggcgccgacccggccacgggcgtcgtgtccaaggacgtcgtcgtcgacccggccacgggcgtctgggcgcgcctcttcctcccgcccggcaccccgcgcggcgcgaagctccccgtcgtcgtctactaccacggcggcgccttcgtggtgggctccgccgccgacccgttcacgcacagctacctcaacgcgctcgccgcggaggccggcgtcctcgcggtcgcgcccgagtaccgcctcgcgccggagcacccgctcccggcggcgtacgacgactcgtgggaggcgctcaagtgggtggcctcccacgccgcgggcggcggcgggccggacccggacccgtggctggccgagcacggcgacttgtcccgcctgttcctggccggggccagcgccgggggcaccatcgcgcacgtggtcgccgcgcgcgcgggcgggctcggcgtgcgcgccaggggcctcctgatcgtgcacccctacttcagcggcgcggtggacatcggcgacgagggggcggcggggaaggagcgcaaggcgcgcgccgacgcgttctggcggttcctgtacccgggctcccccgggctcgacgacccgctgtccaacccgttctcggaggccgccggcggcagcgcggcgcgcgtcgccgccgaccgcgtgctcgtctgcgtcgcccagaaggacgacctccgcgacaggggcgtctggtactacgagagcctcagggccagcgggtaccccggcgaggtggagctgctcgagtccatgggcgagggccacgtcttctactgcatcaacccgcggtgcgacagggcgaaggagatgcaggagcgcgtcctcagtttcctgcgcaagtgaagtgagcacctagtagtgctctgcaactgcaagggaagatcagatctcccatggccatgttgttggatcaagaatcctcgtgtaatttgtggttgattgacgatttgatgtttccatcctcccaagctccacatccgtgacatatttttcacggaacgaagggagatcctatatttgttaggcgagtgaaaacatacatacactcggtcccagttatccaaaataaacgcgggttaatcattattcaataaggcacgttgatagttttttt

SEQ ID NO: 1739 - protein, 321 aa, Panicum virgatum
  misc_feature (77)..(300): Pfam Name: Abhydrolase_3 Pfam Description: alpha/beta hydrolase fold
  misc_feature: Ceres Clone ID no. 1807095
  misc_feature: Bit score of 645.1 for HMM based on sequences of Figure 32
  misc_feature: Functional Homolog Of SEQ ID NO. 1727
MAAADPDTEVQADFFPMVRRYRSGRVERFMNMAPVPAGADPATGVVSKDVVVDPATGVWARLFLPPGTPRGAKLPVVVYYHGGAFVVGSAADPFTHSYLNALAAEAGVLAVAPEYRLAPEHPLPAAYDDSWEALKWVASHAAGGGGPDPDPWLAEHGDLSRLFLAGASAGGTIAHVVAARAGGLGVRARGLLIVHPYFSGAVDIGDEGAAGKERKARADAFWRFLYPGSPGLDDPLSNPFSEAAGGSAARVAADRVLVCVAQKDDLRDRGVWYYESLRASGYPGEVELLESMGEGHVFYCINPRCDRAKEMQERVLSFLRK

SEQ ID NO: 1740 - DNA, 1254 bp, Panicum virgatum
  misc_feature: Ceres Clone ID no. 2024952
  misc_feature: Encodes the peptide sequence at SEQ ID NO. 1741
gctgcgcgtctgtgccactacaccaaccgtctggtccgcgcgctccacccgtcccgcggattcctcccccactacatagcgccgcgcggccggcctcgcgcagccgcaccgacgccgggaacgagcgatggaggcggcggcggcggcggcggacccggacacggaggtgcaggcggatttcttccccatggtacgccagtaccggagcggccgcgtggagcggttcatgaacatagccccgctcccggccggcgccgacccggccacgggcgtcgtgtccaaggacgtcgtcgtcgacccggccacaggcgtctgggcgcgcctcttcctcccgcccggcaccccgcccggcaagaagctccccgtcgtcgtctactaccacggcggcgcctacgtggtgggctccgccgccgacccgttcacgcacacctacctcaacgcgctcgccgcggaggccggcgtcctcgcggtcgcgcccgagtaccgcctcgcgccggagcacccgctcccggccgcgtacgacgactcgtgggaggcgctcaggtgggtggcctcccacgccgcgggcggcggcggcggcggggcggagccgtggctggccgagcacagcgacttctcccgcctgttcctggccggggccagcgcggggggcaccatcgcgcacgtggtggccacccgcgcgggcgccctcggcgtgcgcgccaggggcctcctgatcgtgcacccctacttcggcggcgcggcggacatcggcgacgaggggggcgcggggaaggagcgcaaggcgcgcgccgacgcgttctggcggttcctctacccgggctcccccggcctcgacgacccgctgtccaacccgttctcggaggccgccggcggcagcgcggcgcgcgccgccgccgaccgcgtgctcatctgcgtcgccgagaaggacgagctccgcgacaggggcgtctggtactacgagagcctcagggccagcgggtaccccggcgaggtggagctgctcgagtccatgggcgagggccacgtcttctactgcatcaacccgctgagcgacagggcgcgggagatgcaggagcgcgtcctcagcttcctgcgcaagtgaactgagcacctagtagtgctctgcaactgcaggggaagatcacaagatctcccgtggtggaataattttagattttatcacccgcaatccgtgtaatttgtggccatgttttggatccagaatcctcctgtaatttgtggttggttgac

SEQ ID NO: 1741 - protein, 325 aa, Panicum virgatum
  misc_feature (81)..(304): Pfam Name: Abhydrolase_3 Pfam Description: alpha/beta hydrolase fold
  misc_feature: Ceres Clone ID no. 2024952
  misc_feature: Bit score of 653.2 for HMM based on sequences of Figure 32
  misc_feature: Functional Homolog Of SEQ ID NO. 1727
MEAAAAAADPDTEVQADFFPMVRQYRSGRVERFMNIAPLPAGADPATGVVSKDVVVDPATGVWARLFLPPGTPPGKKLPVVVYYHGGAYVVGSAADPFTHTYLNALAAEAGVLAVAPEYRLAPEHPLPAAYDDSWEALRWVASHAAGGGGGGAEPWLAEHSDFSRLFLAGASAGGTIAHVVATRAGALGVRARGLLIVHPYFGGAADIGDEGGAGKERKARADAFWRFLYPGSPGLDDPLSNPFSEAAGGSAARAAADRVLICVAEKDELRDRGVWYYESLRASGYPGEVELLESMGEGHVFYCINPLSDRAREMQERVLSFLRK

SEQ ID NO: 1742 - DNA, 1265 bp, Zea mays
  misc_feature: Ceres Clone ID no. 281110
  misc_feature: Encodes the peptide sequence at SEQ ID NO. 1743
actgcgcgtgtgcgscactacaccaaccgtttggtccgccgttcggggattccttccgcactactacatagtagcacccgtgtggccgtgtccgagctacccacgcccccaacgccaagaacgtcgacgggcgcgacggcatggcggcggcggacccggacaccgaggtgcaggcagagttcccacccctcgtccgccagtacaaaagcggccgcgtcgagcggttcttcaacctggccccgctcccggccggcaccgacccggccacgggcgtcgtgtccaaggacgtcgtcgtcgacccggccaccggcctctgggcgcgcctcttcctccccgccggcagccacgggaagaagctccccgtcgtcgtctactaccatggcggcgcctacgtgatcggctcggcggccgacccgatgacgcacggctacctcaacgcgctcgtcgccaaggccggcgtcctcgcggtcgcgctcgagtaccgcctcgcgccggagcacccgctcccggccgcctacgaggactcatgggagggactcaagtgggtggccacccacgcctccgcctccgccgccgcgggaggaggaccggccgccgagccgtggctaaccgagcacggcgacttctcccgygtgttcctggccggggccagcgcgggggccaccatcgctcacttcgtakcagtccgtgccggtgagcagcacaagagcggcggcctcgggatgcggatcagggggctgctgatagtgcacccctacttcagcggcgcggcggacatcggcgacgaggggacgacggggaaggcgcgcaaggcgcgggccgacgcgttctggcggttcctgtgccctggcacccccgggctcgacgaccctctctccaacccgttctcggaggcctccggcgggagcgcggcgcgcgtcgccgccgagcgcgtgctcgtctgcgtcgccgagaaggacgacctcagggacaggggcgtctggtactacgagagcctcaaggccagcggctaccctggcgaggtggagctgctcgagtccatgggcgagggccacgtcttctactgcatgaacccgcgctgcgacagggcgcgggagatggaggagcgcgtcctcggcttcctgcgcaagtgagcgagcgacggagcgcgcgccttgctacgcgattgagatggaataatttcaccgtttccagatgtggaggcgtttgagcatgaggccatgagggtcttatttgtttgcttaagatcaattgattgaagtttc

SEQ ID NO: 1743 - protein, 330 aa, Zea mays
  misc_feature (76)..(309): Pfam Name: Abhydrolase_3 Pfam Description: alpha/beta hydrolase fold
  misc_feature: Ceres Clone ID no. 281110
  misc_feature: Bit score of 672.2 for HMM based on sequences of Figure 32
  misc_feature: Functional Homolog Of SEQ ID NO. 1727
  misc_feature (164)..(164): Xaa is any aa, unknown, or other
  misc_feature (181)..(181): Xaa is any aa, unknown, or other
MAAADPDTEVQAEFPPLVRQYKSGRVERFFNLAPLPAGTDPATGVVSKDVVVDPATGLWARLFLPAGSHGKKLPVVVYYHGGAYVIGSAADPMTHGYLNALVAKAGVLAVALEYRLAPEHPLPAAYEDSWEGLKWVATHASASAAAGGGPAAEPWLTEHGDFSXVFLAGASAGATIAHFVXVRAGEQHKSGGLGMRIRGLLIVHPYFSGAADIGDEGTTGKARKARADAFWRFLCPGTPGLDDPLSNPFSEASGGSAARVAAERVLVCVAEKDDLRDRGVWYYESLKASGYPGEVELLESMGEGHVFYCMNPRCDRAREMEERVLGFLRK

SEQ ID NO: 1744 - DNA, 1023 bp, Sorghum bicolor
  misc_feature: Ceres Annot ID no. 8735800
  misc_feature: Encodes the peptide sequence at SEQ ID NO. 1745
atggacatggacctggacggcgaggtgcagtacgacttcttccctttcatccgccagtacaagagcggccgcgtcgtccgcttcggcgccaccgacaccgtccctgccggcaccgacgacgacacggccggcggcacgggcgtgacgtctaaggacgtcgtgattaacccgagctcgggactctgggctcgcctctacctcccgtcgtcgctgctccccgccgccgggcgccgccaagacagcaagctccccgtcgtcgtctactaccacggcggcgccttcgtcatcgggtcaacggcgaaccggcccacgcacgagtacctcaaccgcctggcggccgacgccaacgtcctcgtcgtctcacccgagtaccgcctcgcgccggagcacccgctgccgacggcgcacgacgactcgtgggaggccctcaggtgggtggcgtcccactcgacgacgacgggggaggagaggccggacccggacccggagccctggctcgtcgagcacggggacctgacgcgcgtgttcctggtcggggtcagcgccgggggcaacatcgcgcacaacatggcggagcgcgccggcggcggggcgcagagcctcggcggcgtgcccatcagagggctgctgctcgtccacccctacttcaccagcggagcgcccgccggcaccgaagcgacgacggacacggcaaggaaggccatgtccgaggcgttctggcggtacctgtgccccggcacgctggggccagacgacccgctgggcaacccgttctcggaggccgcgggtggcagcgcggcgcgtgtcgccgccgagcgcgtgctcgtctgcgtcgcggagaaggactggctccgtggcaggggcgtctggtactacgagagcctcagggggagcggctacggcggcgaggtggagctgcacgagtccgtgggcgaggggcatgtcttccattacggcaacccggggtgcgaggaagcgcgggtgttgcaggcgcgcgtcctgcgtttcctccgtgcgcgatga

SEQ ID NO: 1745 - protein, 340 aa, Sorghum bicolor
  misc_feature (86)..(318): Pfam Name: Abhydrolase_3 Pfam Description: alpha/beta hydrolase fold
  misc_feature: Ceres Annot ID no. 8735800
  misc_feature: Bit score of 550.2 for HMM based on sequences of Figure 32
  misc_feature: Functional Homolog Of SEQ ID NO. 1727
MDMDLDGEVQYDFFPFIRQYKSGRVVRFGATDTVPAGTDDDTAGGTGVTSKDVVINPSSGLWARLYLPSSLLPAAGRRQDSKLPVVVYYHGGAFVIGSTANRPTHEYLNRLAADANVLVVSPEYRLAPEHPLPTAHDDSWEALRWVASHSTTTGEERPDPDPEPWLVEHGDLTRVFLVGVSAGGNIAHNMAERAGGGAQSLGGVPIRGLLLVHPYFTSGAPAGTEATTDTARKAMSEAFWRYLCPGTLGPDDPLGNPFSEAAGGSAARVAAERVLVCVAEKDWLRGRGVWYYESLRGSGYGGEVELHESVGEGHVFHYGNPGCEEARVLQARVLRFLRAR

SEQ ID NO: 1746 - protein, 324 aa, Oryza sativa subsp. japonica
  misc_feature (81)..(303): Pfam Name: Abhydrolase_3 Pfam Description: alpha/beta hydrolase fold
  misc_feature: Public GI ID no. 115479613
  misc_feature: Bit score of 394.5 for HMM based on sequences of Figure 32
  misc_feature: Functional Homolog Of SEQ ID NO. 1727
MAGSGDIDGEVVFEVEHCIRIFKGGRVERYFGSDSVPASTDAATGVASKDRAISPDVSVRLYLPPVAGVSGEGEGKKLPLLIYFHGGGFCLHTAFNFVFHAYLTSLAARTRAIVVSVEYRLAPEHPLPAAYEDSWQAVLWAASHAPGAGEETWLTDHADFSRVYLAGESAGANIAHNMAMRAGAEGLPHGGRVNGVVLVHPYFLGRGKVPSEDWDPAMAENVVKMWSVVCPATTGVDDPWINPLADGAPGLEGLACGRVLVCLAEKDVIRDRGRAYCEGLKASGWAGEVEVVEVAGHGHCFHLMDFNGDEAVRQDDAIAEFVNR

SEQ ID NO: 1747 - protein, 319 aa, Malus pumila
  misc_feature (71)..(297): Pfam Name: Abhydrolase_3 Pfam Description: alpha/beta hydrolase fold
  misc_feature: Public GI ID no. 82697943
  misc_feature: Bit score of 404.5 for HMM based on sequences of Figure 32
  misc_feature: Functional Homolog Of SEQ ID NO. 1727
MSNEELCYDFSPMIKAYKDGRIERLLGTATVPPSTQPETGVQSKDVVISQQPAISVRLYIPKSAATKLPLLVYFHGGGFCIESASSPTYHDYLNSLVSEANVVAVSVEYRLAPEHPVPAAYDDSWAALKWVASHFDGTRKGGEEEDEDWITSYADSQRVFFAGDSAGANIAHHMGLKVGSDGLVGVKLIGVVLVHPYFWGSESIGVELNAPAAMREFMAAMWRFVNPLSSGSDDPLMNPEKDPKLGKLGCGKVVVFVAEKDVLKDRGWYYGEVLRKSGWNGVVEVMEAKGEGHCFHLDDLTCENAVAMQKKIVSFLNQV

SEQ ID NO: 1748 - DNA, 993 bp, Sorghum bicolor
  misc_feature: Ceres Annot ID no. 8713623
  misc_feature: Encodes the peptide sequence at SEQ ID NO. 1749
atggccgccgcacccgtggccccgccgccggcgtccgcggacgacgagatcgtgtacgagtccatgccctgcatccgcgtctacaagaaccgcgtggagcgctacttcggcaccgagttcgtcgccgcgtccacggacgccgccacgggcgtcgcctccagggacgtcgtcatctcccccaacgtctccgcgcgcctctacctcccgccgcgcctcgacgacgggagcgccgccaagctccccatcctcgtctactaccacggcggcggcttctgcctcggctccgccttcaaccccaccttccacgcctacttcaacaccttcgcgggcctcgccaacgtcctcgtcgtctccgtcgagtaccgtctcgccccggaacaccccgtccccgccgcctacgccgattcctgggacgcgctcacctgggtcgtctcccacctcgccgccgacgactccgacaaccgggacccgtggatcgcgggccacgccgacttctcccgcctctacctgggcggcgagagcgcggggtccaacatcgcgcaccacatggcgatgcgcgtcgccacggagggcgggctggcgcacggcgcccggatccggggcctcgtcatgatccacccttacttcctgggcaccgacaaggttccctccgacgacctcagcccggaggtgcgcgagagcctggggtccctgtggcgcgtcatgtgcccgaccaccacgggggaggacgacccgctcatcaacccgttcgtggacggcgcgccgccgctggcgtccctggcgtgcagccgcgtgctcgtgtgcgtcggcgagggcgacgtgctccgcgaccgcggccgcaactactacgaccggctcacggccagcgggtggcccggcgaggcggagatctggcaggcgccaggcaagggacacacgttccacctcctggagccaagctgcgacgaggccgtcgcgcaggacaaggtcatcagcgacttcctcaaccgctga

SEQ ID NO: 1749 - protein, 330 aa, Sorghum bicolor
  misc_feature (83)..(309): Pfam Name: Abhydrolase_3 Pfam Description: alpha/beta hydrolase fold
  misc_feature: Ceres Annot ID no. 8713623
  misc_feature: Bit score of 376.3 for HMM based on sequences of Figure 32
  misc_feature: Functional Homolog Of SEQ ID NO. 1727
MAAAPVAPPPASADDEIVYESMPCIRVYKNRVERYFGTEFVAASTDAATGVASRDVVISPNVSARLYLPPRLDDGSAAKLPILVYYHGGGFCLGSAFNPTFHAYFNTFAGLANVLVVSVEYRLAPEHPVPAAYADSWDALTWVVSHLAADDSDNRDPWIAGHADFSRLYLGGESAGSNIAHHMAMRVATEGGLAHGARIRGLVMIHPYFLGTDKVPSDDLSPEVRESLGSLWRVMCPTTTGEDDPLINPFVDGAPPLASLACSRVLVCVGEGDVLRDRGRNYYDRLTASGWPGEAEIWQAPGKGHTFHLLEPSCDEAVAQDKVISDFLNR

SEQ ID NO: 1750 - DNA, 1381 bp, Zea mays
  misc_feature: Ceres Clone ID no. 243558
  misc_feature: Encodes the peptide sequence at SEQ ID NO. 1751
cccagctagacctacagaaaaaaaactctaaaatagttgttggtaaaccagcaggtgagcagtcgaacatcgtggccgcctctgctcagcccagatctccgatggccaccgcacccgccgccccgccgccggcctccgcggacgacgagatcatctacgagtccatgccctgcatccgcgtctacaaggaccgcgtggagcgctacttcggcaccgagttcgtcgccgcctcgacgaacgactccaccggcgtggcctccagggacgtcgtcatctcccccaacgtctccgcgcgcctctacctcccgcgcctggacgacgggaacgccaagctccccatcttcgtctactaccacggcggcggcttctgcatcggctccgccttcaaccccatcttccacgactacttcaactgcctcgtggccctcgccgacatcctcgtcgtctccgtcgagtaccgcctcgccccggagcaccccgtccccgccgcctacgccgactcctgggaagcgctcgcctgggtcatctctcacctcggccccgccggcgacggcgcccgggacccgtggatcgcgagccacgccgacttctcccgcctcttcctgggcggcgagagcgcgggctccaacatcgcgcaccacatggcgatgcgcgctgccgcggaggggctggcccacggcgcccggatccggggactcgtcatgatccacccctacttcctgggcacggacaaggtgccctccgacgacctcagcccggaggtgcgcgagagcctggggtccctgtggcgcttcatgtgcccgaccaccacgggggaggacgacccgctcatcaaccccttcgttgacggcgccccgccgctagcgtccctgccgtgcggccgcgtgctcgtgtgcatcggcgagggcgacgtcctccgcgaccgcggccgcgcctactacgaccggctcagggccagcgggtggcccggcaaggcagagatttggcaggcgcccggcaagggacacacgttccacctcctggatccgtgctgcgacgaggccatcgcgcaggataaagtcatcagctacttcctcagccactgactcgcctcgcgtcctcgccggtggtggtggcgttgttgggcttggatcaaaattagcttctttcatgctggcgctacactacataccttacttctagtacatatcaggttcagagttgtatccgtattctttgaaattggatctcagaatggagctttgcccattgttagtaggcaatggtgttgatgtattgcacctggtaatttggggacgatgatacagtcatagtgtcatacatatgaaattatacttgtttgtcacacagaatttgttgaaacaaatgttccatcttttac

SEQ ID NO: 1751 - protein, 327 aa, Zea mays
  misc_feature (81)..(306): Pfam Name: Abhydrolase_3 Pfam Description: alpha/beta hydrolase fold
  misc_feature: Ceres Clone ID no. 243558
  misc_feature: Bit score of 367.8 for HMM based on sequences of Figure 32
  misc_feature: Functional Homolog Of SEQ ID NO. 1727
MATAPAAPPPASADDEIIYESMPCIRVYKDRVERYFGTEFVAASTNDSTGVASRDVVISPNVSARLYLPRLDDGNAKLPIFVYYHGGGFCIGSAFNPIFHDYFNCLVALADILVVSVEYRLAPEHPVPAAYADSWEALAWVISHLGPAGDGARDPWIASHADFSRLFLGGESAGSNIAHHMAMRAAAEGLAHGARIRGLVMIHPYFLGTDKVPSDDLSPEVRESLGSLWRFMCPTTTGEDDPLINPFVDGAPPLASLPCGRVLVCIGEGDVLRDRGRAYYDRLRASGWPGKAEIWQAPGKGHTFHLLDPCCDEAIAQDKVISYFLSH

SEQ ID NO: 1752 - DNA, 1427 bp, Triticum aestivum
  misc_feature: Ceres Clone ID no. 816193
  misc_feature: Encodes the peptide sequence at SEQ ID NO. 1753
gtttgaccggcacacggtacagggctagaagaacggcggcaagcacggagccatttttttctcgtttatttactacggcggggagcacagggctatcgggagcatctcctccgcgcactccccgccgtgtcccattcgccgatgcttcgccgtcgcccatattcatcttccaagaagctcactcctccgctgccatagccgcccgccgcgccatccttgattccttgccgcatcgtttcgcccgtcagatggaccctgaatccgaggtcacgttcgagttcgtgccggtgatccggcagtacaggagcggccgcgtcgagcgcctgctccccgtagaccccgtcccgccctccgtcgacgccgccaccggagtcgcctcaagggacgtcgtcttcgacccggccaccggcgcgtgggcccgcctctacctccccgcgcgccctcccggcggcgcgggcgacaggctccccatcatggtgtacctccatggaggcggcctcgtcggcggctcggccgcggacgggcccgagcacgcgttcctcaaccgcctgtgcgcccgcgcgcgcgtcctggtcgtgtccgtcgagtaccgcctcgcgccggagcaccccgtcccggcctgctacgacgacgcgtgggccgcgctccggtgggccgccgagggcgccgacccgtggctccgggaccgcggcgaccgcggccggatgttcgtggtcgggtacagcgccggcggcaacgttgcccacaacgtggcgctccgcgcgggctcggaggccggcgcgctcccccgcggcgcccgggtcaggggcatcgggctcctgcacccatacttcctctcggccgagaaggccgacggcgagacggagcagtcgtggctgaggggcaagctggaggagctgtggccgttcgcgtgcggcggccgcaccgccgggctggacgacccgcgggtcaacccggtggccgacggggcgccgagcttgcggcggctcggttgcgaccgcgtcctcgtctgcgtcgccgaggacgagctgcggctccggggcaaggcgtaccacgacggactgctggggagcgggtgggcggagggcgacgttgagctgctcgactccatcggcgaggaccaccagttcttcctccgggagcccccgagcgcgacggcgctggttctcatggaccggctggccgcgctcctcgccgccggcgcgaaccagcagtagaccagacgtcaggcgctggtactagtgtgtttggtgttgtactagtactctgttctactccgcgtgtatctggaattttagggtcccgataactgccacacgtgtggtgtatcgggtagttgtgccacacgcctcgtgtggcatggacagcaaccagcccacacacctacgtgtgagcaaaacaactaatgttcacacacatctttttcc

SEQ ID NO: 1753 - protein, 322 aa, Triticum aestivum
  misc_feature (76)..(296): Pfam Name: Abhydrolase_3 Pfam Description: alpha/beta hydrolase fold
  misc_feature: Ceres Clone ID no. 816193
  misc_feature: Bit score of 368.0 for HMM based on sequences of Figure 32
  misc_feature: Functional Homolog Of SEQ ID NO. 1727
MDPESEVTFEFVPVIRQYRSGRVERLLPVDPVPPSVDAATGVASRDVVFDPATGAWARLYLPARPPGGAGDRLPIMVYLHGGGLVGGSAADGPEHAFLNRLCARARVLVVSVEYRLAPEHPVPACYDDAWAALRWAAEGADPWLRDRGDRGRMFVVGYSAGGNVAHNVALRAGSEAGALPRGARVRGIGLLHPYFLSAEKADGETEQSWLRGKLEELWPFACGGRTAGLDDPRVNPVADGAPSLRRLGCDRVLVCVAEDELRLRGKAYHDGLLGSGWAEGDVELLDSIGEDHQFFLREPPSATALVLMDRLAALLAAGANQQ

SEQ ID NO: 1754 - DNA, 984 bp, Sorghum bicolor
  misc_feature: Ceres Annot ID no. 8654590
  misc_feature: Encodes the peptide sequence at SEQ ID NO. 1755
atggccggctccggcgccagcgacgatgaggtcatcttcgagatggcgcagttcatccgcgtctacaagagcggccgcgtggagcgcttcttcggctccgaccccgtcccggcctccacggacgcggccacgggcgtcgcctccaaggaccacgccgtctcctcagacgtcgccgtccgcctctacctccctccgcccgctaaggagaccgaagacaacggcggaagcaggaagaagcttccaatcctagtgtacttccacggcggcggcttctgcctgcacaccgcgttcaacttcgtcttccacgcgtacctcacctccctcgccgcgcgcgcccgcgccatcgtcgtctccgtggagtaccgcctcgcgcccgagcacccgctccccgccgcgtacgacgactcctggcgggcgctcgtctgggtcgcctcccacgccctccctggatccggtgaggaaccctggctcaccgaccacggcgacttctcccgcttgtgcgtcggcggcgacagcgcgggcgccaacatcgcgcaccacatggcgatgcgcgccggcgccgagcccctcccgcacggcgcccgcatcagcggcgtcgcgatcgtgcacgcctacttcctcggagccgatcgggtggcctccgaggagacggaccccgctctggtcgagaacgtggtgaccatgtggcgcgtggtgtgcccgggcacctcgggcctggacgacccctggatcaacccgctcgcggccggcgcgcctacgctggaggggctcgcgtgcgcgcgcgtcctcgtgtgcctcgcggagaaggacgtgtgccgcgaccgggggcgcgcgtacgccgaggaactgagggccagcggatggaccggggaggtggaggtgctcgaggtgagcgggcagggccactgcttccaccttgtcgacttggcgtgcgccgacgctatcgcgcaggacgacgccattgccagatttgttaacctgtag

SEQ ID NO: 1755 - protein, 327 aa, Sorghum bicolor
  misc_feature (83)..(306): Pfam Name: Abhydrolase_3 Pfam Description: alpha/beta hydrolase fold
  misc_feature: Ceres Annot ID no. 8654590
  misc_feature: Bit score of 394.9 for HMM based on sequences of Figure 32
  misc_feature: Functional Homolog Of SEQ ID NO. 1727
MAGSGASDDEVIFEMAQFIRVYKSGRVERFFGSDPVPASTDAATGVASKDHAVSSDVAVRLYLPPPAKETEDNGGSRKKLPILVYFHGGGFCLHTAFNFVFHAYLTSLAARARAIVVSVEYRLAPEHPLPAAYDDSWRALVWVASHALPGSGEEPWLTDHGDFSRLCVGGDSAGANIAHHMAMRAGAEPLPHGARISGVAIVHAYFLGADRVASEETDPALVENVVTMWRVVCPGTSGLDDPWINPLAAGAPTLEGLACARVLVCLAEKDVCRDRGRAYAEELRASGWTGEVEVLEVSGQGHCFHLVDLACADAIAQDDAIARFVNL

SEQ ID NO: 1756 - DNA, 1336 bp, Panicum virgatum
  misc_feature: Ceres Clone ID no. 1725434
  misc_feature: Encodes the peptide sequence at SEQ ID NO. 1757
tccccgagacgcagcagcagcagctaggtgcggacaggcagagctcccctcacagtctcacactccactctgccaccccctgtctgagctgcgtctgttgccatggccgcgcggatcttgctcccgctgctgctcttcctcctcggctcgcattgctggtccggggcggcggcggcggggaggcggcagctgctgcaggcgcggcgcgccggggaccccaactcgcaggtcaagttcgacttctcgccgttcctcatcgagtacaagagcgggcgcgtgaagcggctgatgggcaccgacgtggtggcggcgtcctcggacgcgctcacgggcgtcacctcccgcgacgtcgtcatcgacccgtccacgggcgtcgcggcgcggctctacctcccgagcttccgcggcggcgcccgggtgcccgtgctggtctacttccacggcggcgcgttcgtggtggagtccgcgttcacgcccatctaccacgcctacctcaacacgctggcggcgagggcgggcgtggtggccgtgtccgtcaactaccgcctggcgccggagcacccgctcccggcggcgtacgacgactcgtgggcggcgctccggtgggtactcgcgagcgcggccgggtcggacccggacccgtggctgtcccagtacggcgacctgtcccggctgttcctcgccggcgacagcgcgggcggcaacatcgcgcacaacctggcattgcgcgccggggaggagggcctggacggcggcgtgcggatcaagggcgtggcgctactggacccctacttccagggccggagcctcgtgggggccgacgccgcggacccggcgtacctccagtcggcggcgcgcacctggagcttcatctgcgcggggcggtacccgatcacccacccctacgccgacccgctggtgctgccggcggcgtcgtggcagcacctgggcgcgtcccgcgtgctggtgaccgtgtcggagcgggaccggctgagcccctggcagcgcgcctactacgccgcgctccggggcagcggctggcccggggaggcggagctgtacgagacccccggcgagggccacgtctacttcctcaccaagctcggctcgccgcaggcgctcgccgagatggccaagctcgtcgccttcattaaccgcgactagtagccggggtggcgatcggagccgccggctcgccgctgcggcagctcagtaacccatcagtatactacagtagtggcggtaactagcgaggagtgaggggtggttagtactagtaattactagtttttttgtccttgatggtgattaccggtcaattagtactattcactat

SEQ ID NO: 1757 - protein, 353 aa, Panicum virgatum
  misc_feature (109)..(331): Pfam Name: Abhydrolase_3 Pfam Description: alpha/beta hydrolase fold
  misc_feature: Ceres Clone ID no. 1725434
  misc_feature: Bit score of 370.8 for HMM based on sequences of Figure 32
  misc_feature: Functional Homolog Of SEQ ID NO. 1727
MAARILLPLLLFLLGSHCWSGAAAAGRRQLLQARRAGDPNSQVKFDFSPFLIEYKSGRVKRLMGTDVVAASSDALTGVTSRDVVIDPSTGVAARLYLPSFRGGARVPVLVYFHGGAFVVESAFTPIYHAYLNTLAARAGVVAVSVNYRLAPEHPLPAAYDDSWAALRWVLASAAGSDPDPWLSQYGDLSRLFLAGDSAGGNIAHNLALRAGEEGLDGGVRIKGVALLDPYFQGRSLVGADAADPAYLQSAARTWSFICAGRYPITHPYADPLVLPAASWQHLGASRVLVTVSERDRLSPWQRAYYAALRGSGWPGEAELYETPGEGHVYFLTKLGSPQALAEMAKLVAFINRD

SEQ ID NO: 1758 - protein, 322 aa, Oryza sativa subsp. japonica
  misc_feature (78)..(301): Pfam Name: Abhydrolase_3 Pfam Description: alpha/beta hydrolase fold
  misc_feature: Public GI ID no. 125596482
  misc_feature: Bit score of 342.2 for HMM based on sequences of Figure 32
  misc_feature: Functional Homolog Of SEQ ID NO. 1727
MASTDADADAVAVELLPFIRVYVSGRVERLLGTDTVAASLDEPTGVASKDVTVDPATNLSVRLYLPPAVAAGKRLPILVYFHGGGFMVESATSPTYHRYLNALASRARVVAVSVEYRLAPEHPLPAAYDDSWAALAWAVATAAAPGAVDPEPWLAAHGDASRVFIAGDSAGANIAHNVAMRAAAAPLPGGAGITGVLLMHPYFWDASNTMGPALEDRIRREWRFMCGSPDVRVDDPRLSPTVQQGAPSLAALPCRRVMVAVAGDDFLAGKGRAYHAALVASRWHGEAELVDTPGEDHLFHLTRPGTAAAAKMMDLVVDFVTR

SEQ ID NO: 1759 - protein, 327 aa, Oryza sativa subsp. japonica
  misc_feature (84)..(306): Pfam Name: Abhydrolase_3 Pfam Description: alpha/beta hydrolase fold
  misc_feature: Public GI ID no. 115476880
  misc_feature: Bit score of 365.5 for HMM based on sequences of Figure 32
  misc_feature: Functional Homolog Of SEQ ID NO. 1727
MDAAPTAPPAASADDEIVYESMPCIRIYKNRVERYFGSEFVAASTDAATGVASHDRVISSNVSARLYLPRLDDSAAAKAKLPVLVYYHGGGFCLGSAFNPTFHAYFNTFAALANALVVSVEYRLAPEHPVPAAYADSWEALAWVAGHAAGDGDEAWLVDHADFSRLYLGGESAGSNIAHHIAMRVAEEGLPHGAKIRGLVMIHPYFLGTNRVASDDLDPAVRESLGSLWRVMCPATTGEDDPLINPLVDGAPALDALACDRVLVCIGEGDVLRDRGRAYYDRLTSSGWRGEAEIWQAPEKGHTFHLLEPHCDAAIAQDKVISGFLNR

SEQ ID NO: 1760 - DNA, 1325 bp, Panicum virgatum
  misc_feature: Ceres Clone ID no. 1814324
  misc_feature: Encodes the peptide sequence at SEQ ID NO. 1761
acctaattccgagacggtgcagggtcctcccctcgaacagcaggtccacccaaccaccgctgcctgctgcattcagcccagatctcgcccccgccgcgcgatggccgccttccccgtcgcgcctccgccggccgcggcggacgacgagatcgtctacgagtccatgccctgcatccgcatctacaagaaccgcgtggagcgctacttcggctccgagttcgtcgccgcctccaccgacgccgccaccggcgtcgcgtccggggacgtggtcatctcccccaacgtctccgcgcgcctctacctcccgcgcctcggcgacggggccgccaagctccccgtcctcgtctactaccacggcggcggcttctgcctcggctccgccttcaaccccaccttccacgcctacttcaacagcttcgcggcgctcgccagcgtcctcgtcgtctccgtcgagtaccgcctcgcccccgagcaccccgtccccgccgcctacgccgactcctgggaggccctcgcctgggtcgtctcccacctcgccggcggcggcggggacccgtgggtcgcgggccacgccgacttcggccgcctctacctcggcggtgagagcgcgggctccaacatcgcgcaccacatggcaatgcgcgtcgccgcggaggggctgccccacggcgcccagatccggggcctcgtcatgatccacccctacttcctgggcaccgacaaggtgccctccgacgacctcgaccccgtggcgcgcgagagcctgggctccctgtggcgcgtcatgtgcccggccaccaccggcgaggacgacccgctcatcaaccccttcgtcgacggcgcgccgccgctggcgtccctggcttgcggccgcgtgctcgtgtgcgtcggcgagggcgacgtgctccgcgaccgcggccgcgcctactacgaccggctcagggccagcggctggcaaggcgaggcggcgatctggcaggcgcccaacaagggccacacgttccacctcctggagccgagctgcgccgaggccgtcgcgcaggacaaggtcatcagcgacttcctcaacagctgactcgcctcatcgtctcaccgccggcggtggcgtatacgcggcaatcggattgaataataactgcagcttcatcgccgatgaatgctgctgggctacactacttattgctagtctatttcagattcagaaattgtgtctctgttctttcaagggggatcgccattgttggtgttgtattgctttggaaattagggggacggtgatacagtcatagtgtcatacagatgaattatacttgttggacgcacag

SEQ ID NO: 1761 - protein, 324 aa, Panicum virgatum
  misc_feature (81)..(303): Pfam Name: Abhydrolase_3 Pfam Description: alpha/beta hydrolase fold
  misc_feature: Ceres Clone ID no. 1814324
  misc_feature: Bit score of 355.7 for HMM based on sequences of Figure 32
  misc_feature: Functional Homolog Of SEQ ID NO. 1727
MAAFPVAPPPAAADDEIVYESMPCIRIYKNRVERYFGSEFVAASTDAATGVASGDVVISPNVSARLYLPRLGDGAAKLPVLVYYHGGGFCLGSAFNPTFHAYFNSFAALASVLVVSVEYRLAPEHPVPAAYADSWEALAWVVSHLAGGGGDPWVAGHADFGRLYLGGESAGSNIAHHMAMRVAAEGLPHGAQIRGLVMIHPYFLGTDKVPSDDLDPVARESLGSLWRVMCPATTGEDDPLINPFVDGAPPLASLACGRVLVCVGEGDVLRDRGRAYYDRLRASGWQGEAAIWQAPNKGHTFHLLEPSCAEAVAQDKVISDFLNS

SEQ ID NO: 1762 - protein, 322 aa, Oryza sativa subsp. indica
  misc_feature (78)..(301): Pfam Name: Abhydrolase_3 Pfam Description: alpha/beta hydrolase fold
  misc_feature: Public GI ID no. 125554537
  misc_feature: Bit score of 346.7 for HMM based on sequences of Figure 32
  misc_feature: Functional Homolog Of SEQ ID NO. 1727
MASTDADADAVAVELLPFIRVYVSGRVERLLGTDTVAASLDEPTGVASKDVTVDPATNLSVRLYLPPAVAAGERLPILVYFHGGGFMVESATSPTYHRYLNALASRARVVAVSVEYRLAPEHPLPAAYDDSWAALAWAVATAAAPGAVDPEPWLAAHGDASRVFIAGDSAGANIAHNVAMRAAAAPLPGGAGITGVLLMHPYFWDASNTMGPALEDRIRREWRFMCGSPDVRVDDPRLSPTVQQGAPSLAALPCRRVMVAVAGDDFLAGKGRAYHAALVASRWHGEAELVDTPGEDHVFHLTRPGTAAAAKMMDLVVDFVTR

SEQ ID NO: 1763 - DNA, 1250 bp, Triticum aestivum
  misc_feature: Ceres Clone ID no. 1031198
  misc_feature: Encodes the peptide sequence at SEQ ID NO. 1764
acaaaatatcgaaattgttcggtttaaaatggcacgtcccctgcttgttctgcttcacttgtcctgcgccagcaccgcgctccaggtcacaagctcgacctcgcagagcgcgcccgccgccggaatggcttccagcgccgccgccgacgtggttgagaccgagctgctcccgttcatccgcgtgtacaagagcggccgcgtcgagcgcctgctcggcaccgacaccgtgccggcgtccttcgacgcgcccacgggcgtggcgtccaaggacgtcgtcatcgacccggccaccggcgtctccgtccgcctctaccttccgccagcggctgcggcatccgggggcgaaggcaagaagctgcccgtcctcgtgtacttccacggcggcgggttcatggtcgagacggcggcctccccgacgtaccaccgctacctgaacgcgctcgccgcccacgcgggcgtcctcgcggtgtccgtggagtaccgccgcgtgccggagcacccgctccccgcggcctacgacgactcctgggcggccctcgcgtgggcggtcgccggcaccgccccgggatgccccgagccgtggctcgcggcgcacggggacgcgtcccgcgtgttcctcgccggcgacagcgcgggcgccaacatcgcgcacaacgtcgccctgcgcgccgccgccgaggggctcccgcgcccgtgcgcggccatcgtcggcgtgctgctggtgcacccctacttctgggacccgaccaacgccatgacgcccgctctggaggtcaggatccgccgcgagtggcggttcatgtgcgcgcgccccgacgccgaggtcgacgacccgaggttctgcccgacgtgcgccgaggcggcgccgctgctcgcggcgctgccgtgcaagagggcgatgctggccgtggcgggcgacgacttcctggcggtgaaggggcgggcgtactacgcggcgctgctcgcgagcgggtggcgcggcgaggccgagctggtggacacgccggggcaggaccacgtgttccatctcatgcggccggggacggaggcggccgccgagatgttggaccgcgtcgcgggtttcatttctcgtgcttgacctcacctgctccccgtcttgcgtcagggcggctaataaatgaagcagactcgctatctcccaagagcgttttgaagtctcctctcggaattttgctatacatctgtgctgcacccatcggcgtgcgttgaaattaatatatttcgtgtct

SEQ ID NO: 1764 - protein, 324 aa, Triticum aestivum
  misc_feature (81)..(302): Pfam Name: Abhydrolase_3 Pfam Description: alpha/beta hydrolase fold
  misc_feature: Ceres Clone ID no. 1031198
  misc_feature: Bit score of 344.4 for HMM based on sequences of Figure 32
  misc_feature: Functional Homolog Of SEQ ID NO. 1727
MASSAAADVVETELLPFIRVYKSGRVERLLGTDTVPASFDAPTGVASKDVVIDPATGVSVRLYLPPAAAASGGEGKKLPVLVYFHGGGFMVETAASPTYHRYLNALAAHAGVLAVSVEYRRVPEHPLPAAYDDSWAALAWAVAGTAPGCPEPWLAAHGDASRVFLAGDSAGANIAHNVALRAAAEGLPRPCAAIVGVLLVHPYFWDPTNAMTPALEVRIRREWRFMCARPDAEVDDPRFCPTCAEAAPLLAALPCKRAMLAVAGDDFLAVKGRAYYAALLASGWRGEAELVDTPGQDHVFHLMRPGTEAAAEMLDRVAGFISRA

SEQ ID NO: 1765 - protein, 380 aa, Oryza sativa subsp. japonica
  misc_feature (135)..(358): Pfam Name: Abhydrolase_3 Pfam Description: alpha/beta hydrolase fold
  misc_feature: Public GI ID no. 115479609
  misc_feature: Bit score of 372.2 for HMM based on sequences of Figure 32
  misc_feature: Functional Homolog Of SEQ ID NO. 1727
MVAKIKRQIGGLSLLAKLGLLLLALLLLLAAILLLVFLLPRHHRRPLPPGSPPVNASDPDNIVAFDFSPFLILYKSGRVHRMDGTDRVPAGVDEATGVTSKDVVIDRSTGVGARMYLPPAKGAGKKDLAGALPVLVFFHGGAFVIESAFTAKYHDYLNKVTAKARVVAVSVDYRLAPEHPVPTAYDDSWQALNWVAKNGRSGPEPWLRDRGNMSRLFLAGDSAGANIAHNMAMRAGKDGGQLEGGVAITGILLLDPYFWGKNPVGAETTDPARRRQYEATWSFICDGKYGIDDPLVDPLSMPAPEWRKLACSRVAVTVSDLDDFKERGKAYAAALRDSGWGGEVEEYETAGEVHVYFLDKPSSPKSAKELTFVAGYLSHE

SEQ ID NO: 1766 - protein, 317 aa, Oryza sativa subsp. indica
  misc_feature (79)..(295): Pfam Name: Abhydrolase_3 Pfam Description: alpha/beta hydrolase fold
  misc_feature: Public GI ID no. 116310075
  misc_feature: Bit score of 360.2 for HMM based on sequences of Figure 32
  misc_feature: Functional Homolog Of SEQ ID NO. 1727
MSSDAGDDDDVVLDFRPLIVVYKSGRLERPLATPPVPPGTDAATGVASRDVRLSAASFVRLYLPPPCAAVAGGERLPVVVYFHGGGFVIGSAVLPAYHRCLNDLAAACPAVAVSVDYRLAPEHPLPAAYEDSAAALAWVLSAADPWLAVHGDLSRVFLAGDSAGGNICHHLAMRHGLTSQHPPHRLKGIVLIHPWFWGKEPIGGEAAAGEQKGLWEFVCPDAADGADDPRMNPTAAGAPGLENLACEKVMVCVAEGDTLRWRGRAYAEAVVRARGGEAAAVELLESEGVGHVFYLFEPGHEKADELLRRIAAFISAK

SEQ ID NO: 1767 - protein, 379 aa, Oryza sativa subsp. japonica
  misc_feature (125)..(349): Pfam Name: Abhydrolase_3 Pfam Description: alpha/beta hydrolase fold
  misc_feature: Public GI ID no. 115476872
  misc_feature: Bit score of 353.1 for HMM based on sequences of Figure 32
  misc_feature: Functional Homolog Of SEQ ID NO. 1727
MMARSVAAANVSWMQWLLRVCGVAAAGCKHNKQKTINSVQDLVITLLIPAMNPDTEVDFDFSPLLIRYKSGRVHRLMGTARVDAGTDAVTGVTSKDVVIDAQSGGLAARLYLPGGVPRCEKLPVVVYFHGGGFVVHSAFSRVHSRFLNALVAAAGVVAVSVDYRLAPEHPLPAAYDDAWAALRWTVASCSASGGPEPWLAEHGDAARIFVAGDSAGANIAHNVTMRAGKDGLPGGARIEGMVLLHPFFRGGELMPSERVDPELPRRAERSWGFMCAGRYGIDHPFINPLSTPAEEWAALGCRRALVTVGELDTMRDRARMYVEVLRGSAWEGEEAALYETGGEGHVYFLEEAAAAAGGDKAEAELDAVVSFIKRSSAAT

SEQ ID NO: 1768 - DNA, 1340 bp, Panicum virgatum
  misc_feature: Ceres Clone ID no. 1989171
  misc_feature: Encodes the peptide sequence at SEQ ID NO. 1769
gtcaacttccccatttcccatcccaatcactagaggctagacggattagctgcagggggccttgcctctaaccaccgctgcctgcttcagcccagatctccctccccgccgcgcgatggccgcctcccccgtcgcgcctccgccggccgcggcggacgacgagatcgtctacgagtcgatgccctgcatccgcatctacaagaaccgcgtggagcgctacttcggctccgagttcgtcgccgcctccaccgacgccgccaccggcgtcgcgtccagggacgtggtcatctcccccaaagtctccgcgcgcctctacctcccgcgcctcgagggcggggccgccaagctccccgtcctcgtctactaccacggcggcggcttctgcctcggctccgccttcaaccccaccttccacgcctacttcaacagcttcgcggcgctcgccggcgtcctcgtcgtctccgtcgagtaccgcctcgcgcccgagcaccccgtccccgccgcctacgccgactccagggaggccctcgcctgggtcgtctcccacctcgccggtcccgccaaggacccgtgggtcgcgggccacgccgacttcgcccgcctctacctcggcggcgagagcgcgggctccaacatcgcgcaccacatggcgatgcgcgtcgccgcggaggggctgccccacggcgcccagatccggggcctcgtcatgatccacccctacttcctgggcaccgacaaggtgccctccgacgacctcgaccccgtggcgcgcgagagcctgggctccctgtggcgcgtcatgtgcccggccaccaccggcgaggacgacctgctcatcaaccccttcgtggacggcgcgccgccgctggcgtccctggcgtgcggccgcgtgctcgtgtgcgtcggcgagcgcgacgtgctccgcgaccgcggccgcgcctactacgaccggctcagggccagcggctggcaaggcgaggccgcgatctggcaggcgcccaacaagggccacacgttccacctcctggagccgagctgcgacgaggccgtcgcgcaggacaaggtcatcagcgacttcctcaaccgctgactcgcctcagctcaccgccggcagtggcgtatacgcggcaatcggattgaataactgcagcttcgtcgccgatgaatgctgctagtctatttcagattcagaaattgtgtctctgtcattgcaagggggattgccattgtgttgtattgctttgggaattagtggatgctgatacagtcatacagataaattatacttgttggacgcacagaaattgttgaaatattgactggatcttcgattatacttg

SEQ ID NO: 1769 - protein, 324 aa, Panicum virgatum
  misc_feature (81)..(303): Pfam Name: Abhydrolase_3 Pfam Description: alpha/beta hydrolase fold
  misc_feature: Ceres Clone ID no. 1989171
  misc_feature: Bit score of 351.5 for HMM based on sequences of Figure 32
  misc_feature: Functional Homolog Of SEQ ID NO. 1727
MAASPVAPPPAAADDEIVYESMPCIRIYKNRVERYFGSEFVAASTDAATGVASRDVVISPKVSARLYLPRLEGGAAKLPVLVYYHGGGFCLGSAFNPTFHAYFNSFAALAGVLVVSVEYRLAPEHPVPAAYADSREALAWVVSHLAGPAKDPWVAGHADFARLYLGGESAGSNIAHHMAMRVAAEGLPHGAQIRGLVMIHPYFLGTDKVPSDDLDPVARESLGSLWRVMCPATTGEDDLLINPFVDGAPPLASLACGRVLVCVGERDVLRDRGRAYYDRLRASGWQGEAAIWQAPNKGHTFHLLEPSCDEAVAQDKVISDFLNR

SEQ ID NO: 1770 - protein, 319 aa, Oryza sativa subsp. japonica
  misc_feature (79)..(297): Pfam Name: Abhydrolase_3 Pfam Description: alpha/beta hydrolase fold
  misc_feature: Public GI ID no. 115479603
  misc_feature: Bit score of 377.7 for HMM based on sequences of Figure 32
  misc_feature: Functional Homolog Of SEQ ID NO. 1727
MDPATTELRFDTPLLRIYNDGRVERLFGTETTPAGFDGATGVTSKDVVIDDATGVSARLYIPDLPASGPGHHRKKLPIVVYFHGGGMVLDSAASPTYHRYLNSLVSKAGALAVSVNYRLAPEHPLPAAYDDAWAALSWTASAADPWLSEHGDVGRVFLAGDSGGANVVHNVAIMAGAGQSSLPPGATVEGVIILHPMFSGKEPIDGENAETRELTEKLWPLICADAEAGLDDPRLNPMAEGAPSLQKLGCRKLLVCSAESDIVLARAAAYYQAVMASGWPGMAEWLESKGEEHVFFLNKPDCEESVALMDRVVAFLAGN

SEQ ID NO: 1771 - DNA, 1243 bp, Zea mays
  misc_feature: Ceres Clone ID no. 100896047
  misc_feature: Encodes the peptide sequence at SEQ ID NO. 1772
ggcagctctcagtctcacactctgccaatcccagcctgagttctgctctgctctgcttctagccatggtggcctcgcggatcttgctcccgctgctgctctccctcttcctatgctcgcattgctgtaccggagcggcggcggcgaagcggcagctgctgcaggcgcagtcgcaggtgaagttcgacttctccccgttcctgatcgagtacaagaacgggcgcgtgaagcggctgatgggcaccaacgtggtgtccgcgtcgtcggacgcgctgacgggcgtcacctcccgcgacgtgaccatcgacgcttcgacgggcgtcgccgcgcggctctacctcccgagcttccgcgccagcgcccgggtgcccgtgctcgtctacttccacggcggcgcgttcgtggtggagtcggcgttcacgcccatctaccacgcctacctcaacacgctggccgccagggcgggcgtggtggccgtgtcggtgaactaccggctggcgccggagcacccgctcccggcggcgtacgacgactcctgggcggcgctcaggtgggtgctggcgagcgcggccgggtcggacccgtggctggcccagtacggcgacctgttccgcctgttcctggccggcgacagcgccggcggcaacatcgcgcacaacctggcactgcgcgcgggggaggaaggcctggacggcggcgcgcggatcaagggcgtggcgctgctggacccctacttccagggccggagccccgtgggcgccgagtccgcggacccggcgtacctccagtccgcggcgcgcacctggagcttcatctgcgcggggaggtacccgatcaaccacccctacgcggacccgctcctgctgccggcctcctcgtggcagcacctcggcgcctcccgcgtgctggtcaccgtgtcggggcaggaccgcctcagcccctggcagcgcgggtactacgccgcgctccagggcagcggctggcccggcgaggccgagctgtacgagacccccggcgagggccacgtctacttcctcaccaagcttggctcgccgcaggcgctcgccgagatggccaagctcgtcgccttcattaaccgcgactagcagccgccggagtaaatccggtacatgcaggccgctgcagtgccgcgacaacatcagcatacctatagtaactagcgagagcgaggtgattggtagtggtaattacatttttttttgggtccttgatgatgattactg

SEQ ID NO: 1772 - protein, 346 aa, Zea mays
  misc_feature (104)..(324): Pfam Name: Abhydrolase_3 Pfam Description: alpha/beta hydrolase fold
  misc_feature: Ceres Clone ID no. 100896047
  misc_feature: Bit score of 350.7 for HMM based on sequences of Figure 32
  misc_feature: Functional Homolog Of SEQ ID NO. 1727
MVASRILLPLLLSLFLCSHCCTGAAAAKRQLLQAQSQVKFDFSPFLIEYKNGRVKRLMGTNVVSASSDALTGVTSRDVTIDASTGVAARLYLPSFRASARVPVLVYFHGGAFVVESAFTPIYHAYLNTLAARAGVVAVSVNYRLAPEHPLPAAYDDSWAALRWVLASAAGSDPWLAQYGDLFRLFLAGDSAGGNIAHNLALRAGEEGLDGGARIKGVALLDPYFQGRSPVGAESADPAYLQSAARTWSFICAGRYPINHPYADPLLLPASSWQHLGASRVLVTVSGQDRLSPWQRGYYAALQGSGWPGEAELYETPGEGHVYFLTKLGSPQALAEMAKLVAFINRD

SEQ ID NO: 1773 - protein, 356 aa, Oryza sativa subsp. japonica
  misc_feature (101)..(323): Pfam Name: Abhydrolase_3 Pfam Description: alpha/beta hydrolase fold
  misc_feature: Public GI ID no. 42408206
  misc_feature: Bit score of 352.4 for HMM based on sequences of Figure 32
  misc_feature: Functional Homolog Of SEQ ID NO. 1727
MAGALLSPRAPPPAPAALTGAGDGEDVDFFFFPFLVLYKSGRVVRFIGTDTVPASMDPATGVASKDVVIDADAGLAVRLYLPNVANLTAGKRGGGDKLPVVVFYHGGGFVTESAFSPTYHRYLNALVSKARVVAVSVEYHLAPEHRLPRAYDDAWAALRWVLENAGAGPEPWLSRHGDTARLFLVGDSAGGNIAHNVAMRAGGEGGLHGGAAIRGVALLDPYFWGKRPVPSETADPATRRWRERTWGFVCAGRYEVDDPVIDPVAMARGEWRRLGRARVLVTVASLDTLSARGRAYVAAARASGWGGEAVLYETPGENHVYFLVEPDGEKAAKEMDAVVAFINEGEQVITASRMDA

SEQ ID NO: 1774 - protein, 319 aa, Oryza sativa subsp. indica
  misc_feature (79)..(297): Pfam Name: Abhydrolase_3 Pfam Description: alpha/beta hydrolase fold
  misc_feature: Public GI ID no. 125564014
  misc_feature: Bit score of 372.9 for HMM based on sequences of Figure 32
  misc_feature: Functional Homolog Of SEQ ID NO. 1727
MDPATTELRFDTPLLRIYNDGRVERLFGTETTPAGFDGATGVTSKDVVIDDATGVSARLYIPDLPASGPGHHRKKLPIVVYFHGGGMVLDSAASPTYHRYLNSLVSKAGALAVSVNYRLAPEHPLPAAYDDAWAALSWTASAADPWLSEHGDVGRVFLAGDSGGANVVHNVAIMAGAGQSSLPPGAAVEGVIILHPMFSGKEPIDGENAETRELTEKLWPLICADPEAGLDDPRLNPMAEGAPSLQKLGCRKLLVCSAESDIGLARAAAYYQAVMASGWPGMAEWLESKGEEHVFFLNKPDCEESVALMDRVVAFLAGN

SEQ ID NO: 1775 - DNA, 1595 bp, Zea mays
  misc_feature: Ceres Clone ID no. 457826
  misc_feature: Encodes the peptide sequence at SEQ ID NO. 1776
agtcagtccccgaggaggaggaacagctaggtgtggacaggcagctctcagtctcacactctgccactcccaatcccagcctgagttctgctctgctctgcttctagccatggtggcctcgcggatcttgctcccgctgctgctctccctcttcctaggctcgcattgctgtaccggagcggcggcggcgaagcggcagctgctgcaggcgcgtcgagccggggacccgagctcgcagtcgcaggtgaagttcgacttctccccgttcctgatcgagtacaagaacgggcgcgtgaagcggctgatgggcacgaacgtggtggccgcgtcgtcggacgcgctgacgggcgtcacctcccgcgacgtgaccatcgacgcttcgacgggcgtcgccgcgcggctctacctcccgagcttccgcgccagcgcccgggtgcccgtgctcgtctacttccacggcggcgcgttcgtggtggagtcggcgttcacgcccatctaccacgcctacctcaacacgctggccgccagggcgggcgtggtggccgtgtcggtgaactaccggctggcgccggagcacccgctcccggcggcgtacgacgactcctgggcggcgctcaggtgggtgctggcgagcgcggccgcgtcggacccgtggctggcccagtacggcgacctgtcccgcctgttccttgccggcgacagcgccggcggcaacatcgcgcacaacctggcactgcgcgcgggggaggaaggcctggacggcggcgcgcggatcaagggcgtggcgctgctggacccctacttccagggccggagccccgtgggcgccgagtccgcggacccggcgtacctccagtccgcggcgcgcacctggagcttcatctgcgcggggaggtacccgatcaaccacccctacgcggacccgctcctgctgccggcctcctcgtggcagcacctcggcgcctcacgcgtgctggtcaccgtgtcggggcaggaccgcctcagcccctggcagcgcgggtactacgccgcgctccagggcagcggctggcccggcgaggccgagctgtacgagacccccggcgaaggccacgtctacttcctcaccaagcttggctcgccgcaggcgctcgccgagatggccaagctcgtcgccttcattaaccgcgactagcagccgccggagtaaatccggtacatgcaggctgctgcagtgccgcgacaacatcagcatacctatagtaactagagagagcgaggtgattggtagtggtaattacattttttttgtccttgatgttgattactgtgcgtcggaagaaaagaacggttcctctctccagcaacctcgtccggacggataggagggaccggaccggtgtgttcgcttgcgcggcgttgcgtgtcattgactgcagtctacaggctaccgtgccgtgcactgttaactgcgtgtagcgcggtactgccagttacagtagtcttcagagtataatattttttttagtatagaagcgtcactctactaccgacccaatgcatcgtgtaacttttgtggtactagtgctatatggtggtgattttgtcggagtggt

SEQ ID NO: 1776 - protein, 354 aa, Zea mays
  misc_feature (112)..(332): Pfam Name: Abhydrolase_3 Pfam Description: alpha/beta hydrolase fold
  misc_feature: Ceres Clone ID no. 457826
  misc_feature: Bit score of 357.1 for HMM based on sequences of Figure 32
  misc_feature: Functional Homolog Of SEQ ID NO. 1727
MVASRILLPLLLSLFLGSHCCTGAAAAKRQLLQARRAGDPSSQSQVKFDFSPFLIEYKNGRVKRLMGTNVVAASSDALTGVTSRDVTIDASTGVAARLYLPSFRASARVPVLVYFHGGAFVVESAFTPIYHAYLNTLAARAGVVAVSVNYRLAPEHPLPAAYDDSWAALRWVLASAAASDPWLAQYGDLSRLFLAGDSAGGNIAHNLALRAGEEGLDGGARIKGVALLDPYFQGRSPVGAESADPAYLQSAARTWSFICAGRYPINHPYADPLLLPASSWQHLGASRVLVTVSGQDRLSPWQRGYYAALQGSGWPGEAELYETPGEGHVYFLTKLGSPQALAEMAKLVAFINRD

SEQ ID NO: 1777 - protein, 316 aa, Vitis vinifera
  misc_feature (75)..(295): Pfam Name: Abhydrolase_3 Pfam Description: alpha/beta hydrolase fold
  misc_feature: Public GI ID no. 157335490
  misc_feature: Bit score of 367.7 for HMM based on sequences of Figure 32
  misc_feature: Functional Homolog Of SEQ ID NO. 1727
MDSAKPELAREVLPLLRIHKDGSVERLRGTEVVPAGTDPQTGVSSKDVTIIPEIDLSARLFLPKLTNPNQKLPLLVYFHGGGFYLSTPFAPNYHNYLNSLVSQANVVAVSVNYRKAPEHPIPAAYEDSWAALQWVASHCNGNGPEAWLNEHANFERIFLSGESAGANIVHNLAMAAGRGDAEMKLVGIGLIHPYFWGEDQIGSEAKDPVRKAMVDKWWQLVCPSGRGNDDPLINPFVDGAPSFKDLGCDKVLVCVAERDILRDRGRLYYETLVKSGWGGTAEMVETEGEDHVFHIFQADSDKARSLVRSVASFINH

SEQ ID NO: 1778 - DNA, 1273 bp, Triticum aestivum
  misc_feature: Ceres Clone ID no. 1017543
  misc_feature: Encodes the peptide sequence at SEQ ID NO. 1779
acgacgccggacgtccttgaagttgcacgcccgccgcgcaccgaacaggctgacaatggcaaagaactccacggccaccgccgacgccggcgacgagatcgtccacgacttctctccgctcctcctggtccacaggagcggcaggctcgagcggcccctcgccatgccgcgcgtcccggccggccacgacgccgccacgggcgtcgtgtccaaggacgtgtcgctctcgcccttctcgttcgtgcgtctctacctcccacccgaaacgggcgccggcgccggcaaaaagctccccgtcctcgtgtacttccacggcggggggttcgtgatcgggtctgccgcgtcggccgcctaccaccgctgcctcaacgacctcaccgcggcctgcgccgctgtcgccgtctccgtcgactaccgcctcgccccggagcacccactccccgccgcgtacgaggactccctcgcggccctcaagtgggtgctctccaccgccgatccgtggctcgccgagagagccgatctctcccgcattttcctcgcgggagacagcgccggcggcaacatctgccaccacctggccatgcaccacgacttgagggacgccgcaggaaggctcaaaggcatcgtcctgatccacccgtggttctggggcaaggagcccatcggcgaagagccccggccggggcgcgcggagggcgtggagcagaagggcctgtgggagttcgtgtgccccgacgcagcggacggcgcagacgatccccggatgaacccgaccgcggagggcgcgccggggctggagaacctggcgtgcgagaaggtcatggtgtgcgtcgccgagggggatttcttgcgttggcgaggcagggcgtacgcggatgcggcggcccgggcgaggggccccgagccggcggtggagctgttcgagtcggacggggtcgggcacgtgttctacctgtgggagcctgcaacggagaaggccagggagctgctcgagaggatcgtcgcgttcgtcagagcggagtgagcacgcgcgcgccctggactgaacggaaacgatgaaagaaggcgcaagtatcaaaataaacgacgactagacgtttcaagtgtgtattttctgagggaagaaaagaggatgaagatttgaaacggacgcatgtttctatcctcagagctcaaatgtgctcggggtgaacagtaaaatccgtttcttcttaataaaattttaaaaacgaaaaaaatgttgcaaatattgacaaatgttttcaatgcctgc

SEQ ID NO: 1779 - protein, 322 aa, Triticum aestivum
  misc_feature (82)..(300): Pfam Name: Abhydrolase_3 Pfam Description: alpha/beta hydrolase fold
  misc_feature: Ceres Clone ID no. 1017543
  misc_feature: Bit score of 371.6 for HMM based on sequences of Figure 32
  misc_feature: Functional Homolog Of SEQ ID NO. 1727
MAKNSTATADAGDEIVHDFSPLLLVHRSGRLERPLAMPRVPAGHDAATGVVSKDVSLSPFSFVRLYLPPETGAGAGKKLPVLVYFHGGGFVIGSAASAAYHRCLNDLTAACAAVAVSVDYRLAPEHPLPAAYEDSLAALKWVLSTADPWLAERADLSRIFLAGDSAGGNICHHLAMHHDLRDAAGRLKGIVLIHPWFWGKEPIGEEPRPGRAEGVEQKGLWEFVCPDAADGADDPRMNPTAEGAPGLENLACEKVMVCVAEGDFLRWRGRAYADAAARARGPEPAVELFESDGVGHVFYLWEPATEKARELLERIVAFVRAE

SEQ ID NO: 1780 - DNA, 1180 bp, Zea mays
  misc_feature: Ceres Clone ID no. 219954
  misc_feature: Encodes the peptide sequence at SEQ ID NO. 1781
atcagatctccagctagcttccttgctacttactcccctacccgctgcaccctcgccatggatccgccgagctccgatatcgtagtcgacactccatacttccgcatctacagtgaccggcgcatcgaccgcttggtcggcaccgataccgtgccggcgggctttgatcccaccaccggcgtcacctccaaagacgtcgttgtagacagcgacgccggcgtctacgttcgcctgtacctcccggacacggctacggggtccgatgattccaagaagctcccggtgctagtctacttccacggcggcggctttgtcacccactcggcagcgtctccgccctatcagtccttcctcaacaccctggccgcgaaggccggcctgctcatcgtctccgtgaactaccgcctcgcgccagagcacccgctgcctgcaggctacgaggactccttccgcgcgctcaggtggacggcctctggtagcggggacccctggctgtcacatcacggcgacctgggccgcatcttcctggccggcgacagcgccggtgggaacttcgtccacaacatcgctgtgatggcagccgcgtcggaggtgccagtgcgaatcaggggtgcggtcctcctgcacgcggggttcggtggcagggagcgcatcgacggagagacgccggagactgtggcgctgatggagaagctgtggggggtcgtgtgcctcgaggcgacggacggcctgaacgacccgcggataaatccgttggctgccgccgcggcgccgagcctgcggaacctgccgtgtgagagggtgctcgtctgcgcggcagagttggacttcctgcggccgaggaacagggcgtactacgaggccctcgcagcaagctggcggggcggcacggtggagtggttcgagtcgaagggcaaggagcacgtcttcttcctctacaaccccggctgcggcgaggccgtggagctcatggatcgtctggtcgcgttctttgctgggaactgaaattcgtcatgtgtggatgtgaccgcgaccacatccacatgcagtgagacggatggatcaaacgaagatgcagctcatcgccgaatcgaatggttgagctgtgtccaggaaaagaaaactaaaagtgactagaataattgagctcggagccttggattgatcagtttgtgctatc

SEQ ID NO: 1781 - protein, 315 aa, Zea mays
  misc_feature (77)..(293): Pfam Name: Abhydrolase_3 Pfam Description: alpha/beta hydrolase fold
  misc_feature: Ceres Clone ID no. 219954
  misc_feature: Bit score of 343.7 for HMM based on sequences of Figure 32
  misc_feature: Functional Homolog Of SEQ ID NO. 1727
MDPPSSDIVVDTPYFRIYSDRRIDRLVGTDTVPAGFDPTTGVTSKDVVVDSDAGVYVRLYLPDTATGSDDSKKLPVLVYFHGGGFVTHSAASPPYQSFLNTLAAKAGLLIVSVNYRLAPEHPLPAGYEDSFRALRWTASGSGDPWLSHHGDLGRIFLAGDSAGGNFVHNIAVMAAASEVPVRIRGAVLLHAGFGGRERIDGETPETVALMEKLWGVVCLEATDGLNDPRINPLAAAAAPSLRNLPCERVLVCAAELDFLRPRNRAYYEALAASWRGGTVEWFESKGKEHVFFLYNPGCGEAVELMDRLVAFFAGN

SEQ ID NO: 1782 - DNA, 1065 bp, Sorghum bicolor
  misc_feature: Ceres Annot ID no. 8654584
  misc_feature: Encodes the peptide sequence at SEQ ID NO. 1783
atggcctcgccctcgcggatcttgatcttgctcccgctgctcttcctcctgctgggctcgcattgctctaccggggcggcggcgaggcggcagctgctgcgagccggggacccgagctcgcaggtcaagttcgacttctctccgttcctcatcgagtacaagaacgggcgcgtgaagcggctgatgggcaccaacgtggtggcggcgtcctcggacgcgctcacgggcgtcacctcccgcgacgtgaccatcgacccgtccacgggcgtcgcggcgcggctctacctcccgagcttccgcgccagcacccgggtgcccgtgctggtctacttccacggcggcgcgttcgtggtggagtcggcgttcacgcccatctaccacgcctacctcaacacgctggccgccagggcgggcgtcgtggccgtgtcggtgaactaccgcctggcgccggagcacccgctcccggcggcgtacgacgactcgtgggcggcgctcaagtgggtgctcgcgagcgcggcggccgggtccgggtcggacccgtggctttcccagtacggcgacctgtcccgcctgttcctcgccggcgacagcgcgggcggcaacatcgcgcacaacctggcattgcgcgccggggaggaaggccttgacggcggcgcgcggatcaagggcgtggcgctgctggacccttacttccagggccggagccccgtgggcgccgactccacggacccggcgtacctgcagtccgcggcgcgcacctggaacttcatctgcgcggggaggtacccgatcaaccacccctacgcggacccgctcctgctgccggcgtcctcgtggcagcacctcggcgcctcccgcgtgctggtcaccgtgtccgggcaggaccgcctcagcccctggcagcgcgcctactacgccgcgctcaggggcagcgcctggcccggggaggccgagctgtacgagacccccggcgagggccacgtctacttcctcaccaagctcagctcgccacaggcgctcgccgagatggccaagctcgtcgccttcattaaccgcgacgactag

SEQ ID NO: 1783 - protein, 354 aa, Sorghum bicolor
  misc_feature (108)..(331): Pfam Name: Abhydrolase_3 Pfam Description: alpha/beta hydrolase fold
  misc_feature: Ceres Annot ID no. 8654584
  misc_feature: Bit score of 361.2 for HMM based on sequences of Figure 32
  misc_feature: Functional Homolog Of SEQ ID NO. 1727
MASPSRILILLPLLFLLLGSHCSTGAAARRQLLRAGDPSSQVKFDFSPFLIEYKNGRVKRLMGTNVVAASSDALTGVTSRDVTIDPSTGVAARLYLPSFRASTRVPVLVYFHGGAFVVESAFTPIYHAYLNTLAARAGVVAVSVNYRLAPEHPLPAAYDDSWAALKWVLASAAAGSGSDPWLSQYGDLSRLFLAGDSAGGNIAHNLALRAGEEGLDGGARIKGVALLDPYFQGRSPVGADSTDPAYLQSAARTWNFICAGRYPINHPYADPLLLPASSWQHLGASRVLVTVSGQDRLSPWQRAYYAALRGSAWPGEAELYETPGEGHVYFLTKLSSPQALAEMAKLVAFINRDD

SEQ ID NO: 1784 - protein, 370 aa, Oryza sativa subsp. japonica
  misc_feature (115)..(337): Pfam Name: Abhydrolase_3 Pfam Description: alpha/beta hydrolase fold
  misc_feature: Public GI ID no. 115476870
  misc_feature: Bit score of 354.2 for HMM based on sequences of Figure 32
  misc_feature: Functional Homolog Of SEQ ID NO. 1727
MSNGGNRRLVVSNGGNRRLATRIKSSVQQAALTGAGDGEDVDFFFFPFLVLYKSGRVVRFIGTDTVPASMDPATGVASKDVVIDADAGLAVRLYLPNVANLTAGKRGGGDKLPVVVFYHGGGFVTESAFSPTYHRYLNALVSKARVVAVSVEYHLAPEHRLPRAYDDAWAALRWVLENAGAGPEPWLSRHGDTARLFLVGDSAGGNIAHNVAMRAGGEGGLHGGAAIRGVALLDPYFWGKRPVPSETADPATRRWRERTWGFVCAGRYEVDDPVIDPVAMARGEWRRLGRARVLVTVASLDTLSARGRAYVAAARASGWGGEAVLYETPGENHVYFLVEPDGEKAAKEMDAVVAFINEGEQVITASRMDA

SEQ ID NO: 1785 - DNA, 1284 bp, Zea mays
  misc_feature: Ceres Clone ID no. 1446903
  misc_feature: Encodes the peptide sequence at SEQ ID NO. 1786
aatgtgaaactgtcgtcttctcgcgcggagcgtctagctcttgtaccaatcttcaaatacaatcgccacggctcatccatttgccgccacaaatctgataaccaccacgccatcatcgcgcttaccagggtcgacatggatcccgacgcggaggtcacgttcgagttcgtccccgtgatccggcagtacaagagcggccgtgtggagcgcctgctccccgtcaatccggtcccaccctccgtcgacgccgccaccggggtcgcctccaaggacgtcaccgttgacaaggccacgggcctgtgggcgcgtctctacctcccagacccagatctatccgcgcgccccggcggcgacaggcgtctccccatcgtcctctacttccacggcgggggcctcgtggtcggatctgcggccgacgcccccgagcacgccttcgtgaaccgcctcgcagcgcgggccggcgcgctcgccgtgtccgtggagtaccgcctggcgccggagcaccccgtccccgcctgctacgacgacgcttgggccgcgctccgttgggtggtggcgtcggcggccgacccgtgggtccgcgaccacggcgacgtggcgcgcgtgttcgtgctcgggttcagcgccggcgggaacctcgcgcacaacctcaccctccgcgccggctcggagccggacctcctcccccgcggcgcccgggtgcaggggatggcgctgctgcacccgttcttcctgtcgccgccggcgccgggaagcgaggcggcggagggcgaggtagcgaagtacgcgtgggtgcgcgccaaactgtcggagatgtgggcgttcgcgtgcggcgggcggacggcggggcccgacgacccgcgcgtgaacccgctcacggacggcgcgcccagcctgaggcgcctcgggtgcgcccgggtcctcgtgtgcctcgcggatgacgcgctggctgctgagggcaaggcctactacgatggcctgctggcgagcgggtgggcggcggcggacgccaagctgctggactccgcgcccgcggaccacgagttccacctccgcgagcccgagagcgccaaggcggcgctcctcatggaccggctggctgcgctcatctccgggaactagcagtagcagtagagtcgcacgcacgtcaacggagctggcgcaagagcgtacgtgcacttgctgccattgtgctgtactggaattggtcaaacaattccaagttctaatcgaaacgatataaaatgctgacctataataaagaacttattctcagtttaggcc

SEQ ID NO: 1786 - protein, 328 aa, Zea mays
  misc_feature (79)..(306): Pfam Name: Abhydrolase_3 Pfam Description: alpha/beta hydrolase fold
  misc_feature: Ceres Clone ID no. 1446903
  misc_feature: Bit score of 337.1 for HMM based on sequences of Figure 32
  misc_feature: Functional Homolog Of SEQ ID NO. 1727
MDPDAEVTFEFVPVIRQYKSGRVERLLPVNPVPPSVDAATGVASKDVTVDKATGLWARLYLPDPDLSARPGGDRRLPIVLYFHGGGLVVGSAADAPEHAFVNRLAARAGALAVSVEYRLAPEHPVPACYDDAWAALRWVVASAADPWVRDHGDVARVFVLGFSAGGNLAHNLTLRAGSEPDLLPRGARVQGMALLHPFFLSPPAPGSEAAEGEVAKYAWVRAKLSEMWAFACGGRTAGPDDPRVNPLTDGAPSLRRLGCARVLVCLADDALAAEGKAYYDGLLASGWAAADAKLLDSAPADHEFHLREPESAKAALLMDRLAALISGN

SEQ ID NO: 1787 - DNA, 1635 bp, Panicum virgatum
  misc_feature: Ceres Clone ID no. 1907709
  misc_feature: Encodes the peptide sequence at SEQ ID NO. 1788
tttttctcctaacccagcaccagcagagcccagcttactcttccgatccctgtcagggcagttagccttcagctggtggaggatcatggtggccaagagcaggcgacaggtcgccaagctcgcgctgcttgcactcgccctgctcctcctcctcctcgccgccaccttgctgtgcgtcctcctgatcccgcgccaccgccggaagccgctgccgccgggcccgccgccggggaacgcctcgaaccccgacgacagcatcgtggcgttcgacttctccccgtacctcatcatgtacaagagcggccgcgtgcaccggctggacggcaccgcccggtgcgcggccggcgtcgacggggacacgggggtggcctccaaggacgtcgtcatcgacgccgggacggggctcgcggcgcggttgtacctgcccccggcgcccggcgggaagaccaaggacctcgccaggctccccgtgctcgtgttctaccacggcggcgcgttcgtcatcgagtccgccttcacgccgctgtaccacgcgtacctgaacgcggtgtcggccaaggcgcgcgtcgtggcggtgtccgtggagtaccgcctcgcgccggagcaccggctgccggcggcgtacgacgactcgtggcgggcgctcaactgggtggccaggaacgccgccgggtccgggccggagccgtggctgcgggaccggggcaacctgtcccgcctcttcgtggcgggggacagcgccggcgccaacatcgcgcacaacatggccatgcgcgcgggcacggaggaagggggcctggacggcggcgccgccatcgcggggctcctcctcctggacccctacttctggggcaagaagcccgtggccggggagacgacggaccgggcgacgcggcggcagtacgaggcgacgtggtccttcatctgcggcgggcggtacggcatcgacgacccgctggtgaacccgctgtcggcggagctgaggaggctggcgtgctcacgcgtggcggtgacgacgtcgggcctggacgacttccggccgcgcggcctggcgtacgcggcggcgctccggaacagcgggtggggcggggaggtcgagcagtacgagacgcccggcgagcggcacgtctacttcctggacaggcccaaggaccccaactccgtcaaggagctggccttcgtcaccggcttcctgagccgggagtagccatgactggcctagcagctagcgaggcagatcaggtcgtcggcgtaggtgcgcgatcgccaggatagcgctgcgctgcgctgcgctgcgctgcggtatagtatgattcatagtttgattgatactagtagattatcggcagagtagcatgttcttattgttttcttgcgtttggatcttcaatttttgacggggttctcgagaggtcacgaactgatgaggatctcgttaaatttggggatctcggaggttggaacacctcctctgtcaccgtgactccgtgcggaaaggtgcctgcaccgcgatactttccgtgcctgtagaggtcaggagaatcagggaaagtcgttgctgtgcttgtctgctactctgcttgggcaggaaatgctctcctccgctagaatcatgttctgggatcctgattggtc

SEQ ID NO: 1788 - protein, 373 aa, Panicum virgatum
  misc_feature (130)..(351): Pfam Name: Abhydrolase_3 Pfam Description: alpha/beta hydrolase fold
  misc_feature: Ceres Clone ID no. 1907709
  misc_feature: Bit score of 363.8 for HMM based on sequences of Figure 32
  misc_feature: Functional Homolog Of SEQ ID NO. 1727
MVAKSRRQVAKLALLALALLLLLLAATLLCVLLIPRHRRKPLPPGPPPGNASNPDDSIVAFDFSPYLIMYKSGRVHRLDGTARCAAGVDGDTGVASKDVVIDAGTGLAARLYLPPAPGGKTKDLARLPVLVFYHGGAFVIESAFTPLYHAYLNAVSAKARVVAVSVEYRLAPEHRLPAAYDDSWRALNWVARNAAGSGPEPWLRDRGNLSRLFVAGDSAGANIAHNMAMRAGTEEGGLDGGAAIAGLLLLDPYFWGKKPVAGETTDRATRRQYEATWSFICGGRYGIDDPLVNPLSAELRRLACSRVAVTTSGLDDFRPRGLAYAAALRNSGWGGEVEQYETPGERHVYFLDRPKDPNSVKELAFVTGFLSRE

SEQ ID NO: 1789 - DNA, 1008 bp, Sorghum bicolor
  misc_feature: Ceres Annot ID no. 8722921
  misc_feature: Encodes the peptide sequence at SEQ ID NO. 1790
atggccgccgcgcccgtcaccccgcctccggcctcggcggacgacgagctggtctacgagtcgctgccctgcatccgcgtctacaagaaccgcgtggagcgctacttcggctccgagttcgtccccgcctccacggacgccgccaccggcgtcacctccagggacgtcgtcatctcccccaacgtctccgcgcgcctctacctcccgcgcctcggcgacggcaacggcgacgccaagctccccattctcgtctactaccacggcggcggcttctgcatcggctccgccttcaaccccatcttccacgcctacttcaacgccttcaccagcctcgccaccgccctcgtcgtctccgtcgagtaccgcctcgcccccgagcaccccgtccccgctgcctacgctgactcctgggacgcccttgcctgggtcgtctcccactcccacctcgcttcctcctccgccgcccgcgacccgtggatcgcgggccacgccgacttctcccgcctgtacctgggcggggagagcgcgggcgccaacatcgcgcaccacatggcgatgcgcgccgccgccgccgcggagggggagctggcgcacggccgtgcccggatccggggcctcgtcatggtgcacccttacttcctgggcacggaccgggtgccctccgacgacctcagcgccgagacgcgcgagagcctggcgtccctgtggcgcgtcatgtgcccgtcgtccaccgcgggggacgacgacccgctcatcaaccccctggtggacggcgccccggccctggcgtccctggcgtgcgcccgcgtgctcgtgtgcgtcgccgagggcgacgtgctccgcgaccggggccgcgcgtactacgaccggctcagggctagcggatggcccggcgaggcggagttttggcaggcgcctgacaggggacacacgttccatttcatggacccgtgctgcgacgaggccgtcgcgcaggacaaggtcatcagcgacttcctcaaccgctga

SEQ ID NO: 1790 - protein, 335 aa, Sorghum bicolor
  misc_feature (83)..(314): Pfam Name: Abhydrolase_3 Pfam Description: alpha/beta hydrolase fold
  misc_feature: Ceres Annot ID no. 8722921
  misc_feature: Bit score of 356.9 for HMM based on sequences of Figure 32
  misc_feature: Functional Homolog Of SEQ ID NO. 1727
MAAAPVTPPPASADDELVYESLPCIRVYKNRVERYFGSEFVPASTDAATGVTSRDVVISPNVSARLYLPRLGDGNGDAKLPILVYYHGGGFCIGSAFNPIFHAYFNAFTSLATALVVSVEYRLAPEHPVPAAYADSWDALAWVVSHSHLASSSAARDPWIAGHADFSRLYLGGESAGANIAHHMAMRAAAAAEGELAHGRARIRGLVMVHPYFLGTDRVPSDDLSAETRESLASLWRVMCPSSTAGDDDPLINPLVDGAPALASLACARVLVCVAEGDVLRDRGRAYYDRLRASGWPGEAEFWQAPDRGHTFHFMDPCCDEAVAQDKVISDFLNR

SEQ ID NO: 1791 - DNA, 975 bp, Sorghum bicolor
  misc_feature: Ceres Annot ID no. 8735798
  misc_feature: Encodes the peptide sequence at SEQ ID NO. 1792
atggcctcccgcgacgccgctaccgacgatgtcgccgtcgagctcctgccgttcatccgcctctacaagagcggccgcgttgagcgcctgatcggcaacgacacggcccccgcctccctcgacgacggtacttctaccggcggcgtcgcctccaaggacgtcaccatcgaccccgccaccaacctctccgtgcgcctgtaccttcccacggcggctggcgccggggacaagctgcccatcgtcgtgtacttccacggcggcggcttcatggtcgaatcggccagctccgccaagtaccaccgctacctcaacgcactcgccgcccgcgccggcgccgtcgcggtgtccgtggactaccgccgcgtgccggagcaccggctcccggcggcctacgacgactcgtgggcggcgctcgcgtgggccgtcggcgccgcctgcggcgacgagtccgagccggagccatggttgaccaagcacggggacccttcccgcgtgttcctggctggggacagcgcgggcgcgaacatcgcccacaacgtcgccatgcgcgcggccgtcgccgagggtctcccggcgatcaggatcaggggcgtgctgctgatgcacccgtacctctgggacgcgtccgacgccatgggacccgacctggaggagcgcatccgccgcgagtggcagctcatgacggggcgccctgacgcgcgggtggacgacccatggctgtcgccgacgtccgcacgggcgccgccactcgcgctgctgccgacgcagcgggtgctggttgccgtggccggggaggacttcctggcgcccaaggggcgagcctaccacgcggcgctgctgcacagtgggtggcccggcgaggccgagctggtggacactccgggcgagcagcacgtgttccacctcgaccagcccgggacggcggtggccgaggagttgatggatcgtgtggtggctttcattgctggagcttga

SEQ ID NO: 1792 - protein, 324 aa, Sorghum bicolor
  misc_feature (81)..(302): Pfam Name: Abhydrolase_3 Pfam Description: alpha/beta hydrolase fold
  misc_feature: Ceres Annot ID no. 8735798
  misc_feature: Bit score of 312.9 for HMM based on sequences of Figure 32
  misc_feature: Functional Homolog Of SEQ ID NO. 1727
MASRDAATDDVAVELLPFIRLYKSGRVERLIGNDTAPASLDDGTSTGGVASKDVTIDPATNLSVRLYLPTAAGAGDKLPIVVYFHGGGFMVESASSAKYHRYLNALAARAGAVAVSVDYRRVPEHRLPAAYDDSWAALAWAVGAACGDESEPEPWLTKHGDPSRVFLAGDSAGANIAHNVAMRAAVAEGLPAIRIRGVLLMHPYLWDASDAMGPDLEERIRREWQLMTGRPDARVDDPWLSPTSARAPPLALLPTQRVLVAVAGEDFLAPKGRAYHAALLHSGWPGEAELVDTPGEQHVFHLDQPGTAVAEELMDRVVAFIAGA

SEQ ID NO: 1793 - DNA, 1080 bp, Sorghum bicolor
  misc_feature: Ceres Annot ID no. 8713597
  misc_feature: Encodes the peptide sequence at SEQ ID NO. 1794
atggcagctgcgttgcttaccccacccgctcttcctcccgggctggcctccgtgggcgccagcgccgacgacggggaagtcgacttcttcttcttcccgttcctagtcctctacaagagcggcctcgtgcagcgattcatcggcacggacaccgtgccagcctccacggacgcggccaccggcgtcacctccagggacgtcgtcgtcaacgctgccacgggcctcgccgtgcgcctctacctgcctcctagcctcgccaccaaccgcacaggcacggacaccgacgacagcggtggaaggctgccgctcctcgtgttctaccacggcggcgcgttcgtcacagagtcggccttctcgccgacgtaccaccggtacctgaacgcgctggtgtccagggcacgggtgctcgccgtgtccgttgagtaccacctcgcgcccgagcaccgcctcccgacggcgtacgacgacgcgtgggcggcactccggtgggcgctcgccaacacgcggcgggccgggaccgggacggacccctggctgtcgcgccacgccgacccggcgcggctgttcctggccggcgacagtgccggcggcaacatcgcgcactacgtggcgctgcgcgcggggcgggatggccttgactgcgacgacggcgctgccgccgtccggggcctcgtgctgctcgacccctacttctgggggaagcgccccgtgccgtcggagacgagcgacgaggacattcggcggtggcacgagcgcacgtggagcttcttgtgcggcggccgctacgggatcgacgacccggtgatcaacccggtgcccatgccaccggaggagtggcgccggctcccctgcacgcgcgtgctggtcaccgtggcggggctggacatgctcagcgccaggggccgtgcgtacgtccacgcgctcagggccagcgggtggcaaggcgaggcggagctgtacgagacccccggcgagtatcacgtctacttcctgaacaagcccgacagcgatgaggcggcgaaggagatggaggttgtggtgaacttcatcaatggcgatcaagtgagcaccagaggatag

SEQ ID NO: 1794 - protein, 359 aa, Sorghum bicolor
  misc_feature (104)..(331): Pfam Name: Abhydrolase_3 Pfam Description: alpha/beta hydrolase fold
  misc_feature: Ceres Annot ID no. 8713597
  misc_feature: Bit score of 361.8 for HMM based on sequences of Figure 32
  misc_feature: Functional Homolog Of SEQ ID NO. 1727
MAAALLTPPALPPGLASVGASADDGEVDFFFFPFLVLYKSGLVQRFIGTDTVPASTDAATGVTSRDVVVNAATGLAVRLYLPPSLATNRTGTDTDDSGGRLPLLVFYHGGAFVTESAFSPTYHRYLNALVSRARVLAVSVEYHLAPEHRLPTAYDDAWAALRWALANTRRAGTGTDPWLSRHADPARLFLAGDSAGGNIAHYVALRAGRDGLDCDDGAAAVRGLVLLDPYFWGKRPVPSETSDEDIRRWHERTWSFLCGGRYGIDDPVINPVPMPPEEWRRLPCTRVLVTVAGLDMLSARGRAYVHALRASGWQGEAELYETPGEYHVYFLNKPDSDEAAKEMEVVVNFINGDQVSTRG

SEQ ID NO: 1795 - protein, 323 aa, Vitis vinifera
  misc_feature (76)..(297): Pfam Name: Abhydrolase_3 Pfam Description: alpha/beta hydrolase fold
  misc_feature: Public GI ID no. 225428761
  misc_feature: Bit score of 384.2 for HMM based on sequences of Figure 32
  misc_feature: Functional Homolog Of SEQ ID NO. 1727
MDSNTNPELSFNFPPFLRVFKDGKVERFVGTDSVPPSLNIETGVNSKDIVIDPETGVSARLYIPKINDQSQKLPLLVYFHGGAFCIETFSSPTYHNYLDSLVAEANVVAVSIEYRRAPEHPLPVAYDDCWAAVKWLVSHSNSQGPEPWLNDYADLDRLFFAGDSAGANLSHNMAIRAGTRGHELGSVKVSGIILIHPYFWGKDPVGAEVKDLQKKGLVDSLWLFVCPTTSGCDDPLINPATDPKLASLGCQRVLVFVAEKDTLRDRGWFYHETLGKSGWSGVVEVMEAEGEDHVFHLFNPTCDKAVAMLKQMAMFLNMAQCNS

SEQ ID NO: 1796 - DNA, 1684 bp, Arabidopsis thaliana
  misc_feature: Ceres Clone ID no. 21240
  misc_feature: Encodes the peptide sequence at SEQ ID NO. 1797
atccttcgaagacccttcctctatataaggaagttcatttcakttggagctctagaacacgggggatccycygggctgcaggaattcgcacsacwscagtggtacctagaacatcctaatcgaaaaaaaaccaaaacgatggcgtttcatcacaatcatctctcacaagacctctccttcaatcatttcaccgaccaacaccaacctccacctccgcaaccgcctcctcctcctccgcaacagcaacaacatttccaagaagcaccgcctcctaattggttaaacacagcgcttcttcgttcctcagataacaacaataacttcctcaacctccacacagccaccgctaacaccacaaccgcaagcagctccgattctccttcctccgccgccgccgccgccgctgctaaccagtggctatctctctcctcctctttcctccaacgaaacaacaacaacaacgcttccatagtcggagatgggatcgatgatgtcaccggaggagcagacactatgattcagggagagatgaaaaccggcggtggagaaaacaaaaacgacggcggaggagctacggcggcggatggagtagtgagctggcagaatgcgagacacaaggcggagatcctttcgcatcctctttacgagcagcttttgtcggcgcacgttgcttgtttgagaatcgcgactccggttgatcagcttccgagaatcgatgctcagcttgctcagtctcaacacgtcgtcgctaaatactcagctttaggcgccgccgctcaaggtctcgtcggcgacgataaagaacttgaccagttcatgacacattatgtgttgctactgtgttcatttaaagagcaattgcaacaacatgtgcgtgttcatgcaatggaagctgtgatggcttgttgggagattgagcagtctcttcaaagcttaacaggagtgtctcctggagaagggatgggagcaacaatgtctgacgatgaagatgaacaagtagagagtgatgctaatatgttcgatgggggattagatgtgttgggttttggtcctttgattcctactgagagtgagaggtcgttgatggaaagagttagacaagaacttaaacatgaactcaaacagggttacaaggagaagatagtagacataagagaggagatattaaggaagagaagagctgggaagttaccaggagataccacctctgttctcaaagcttggtggcaatctcattccaaatggccttaccctactgaggaagataaggcgaggttggtgcaagagacaggtttgcagctaaaacagataaacaattggttcatcaatcagagaaagaggaactggcatagcaatccatcttcttccactgtattgaagaacaaacgcaaaagcaatgcaggtgacaatagcggaagagagcggttcgcgtagaaacaacaaacatatgatgtgaattggggaggtggaagatgggatttgaaagcagggttttagggatttaaagttgagaattttatggaggagtttggattatacagagagaggggacagtattagaaagtaactttttgtgcaattacatagtaacgtagtttggttatgtgattatgcccatatattttattaagtagcacacaaaccaaaaagaaaatatgaaaactgaagatgcaggcttttgttc

SEQ ID NO: 1797 - protein, 431 aa, Arabidopsis thaliana
  misc_feature (213)..(268): Pfam Name: KNOX2 Pfam Description: KNOX2 domain
  misc_feature (157)..(201): Pfam Name: KNOX1 Pfam Description: KNOX1 domain
  misc_feature (322)..(343): Pfam Name: ELK Pfam Description: ELK domain
  misc_feature: Ceres Clone ID no. 21240
  misc_feature: Bit score of 871.1 for HMM based on sequences of Figure 5
  misc_feature: Functional Homolog Of SEQ ID NO. 1797
  misc_feature: in Figure 5
MAFHHNHLSQDLSFNHFTDQHQPPPPQPPPPPPQQQQHFQEAPPPNWLNTALLRSSDNNNNFLNLHTATANTTTASSSDSPSSAAAAAAANQWLSLSSSFLQRNNNNNASIVGDGIDDVTGGADTMIQGEMKTGGGENKNDGGGATAADGVVSWQNARHKAEILSHPLYEQLLSAHVACLRIATPVDQLPRIDAQLAQSQHVVAKYSALGAAAQGLVGDDKELDQFMTHYVLLLCSFKEQLQQHVRVHAMEAVMACWEIEQSLQSLTGVSPGEGMGATMSDDEDEQVESDANMFDGGLDVLGFGPLIPTESERSLMERVRQELKHELKQGYKEKIVDIREEILRKRRAGKLPGDTTSVLKAWWQSHSKWPYPTEEDKARLVQETGLQLKQINNWFINQRKRNWHSNPSSSTVLKNKRKSNAGDNSGRERFA

SEQ ID NO: 1798 - protein, 448 aa, Prunus persica
  misc_feature (227)..(282): Pfam Name: KNOX2 Pfam Description: KNOX2 domain
  misc_feature (174)..(218): Pfam Name: KNOX1 Pfam Description: KNOX1 domain
  misc_feature (339)..(360): Pfam Name: ELK Pfam Description: ELK domain
  misc_feature: Public GI ID no. 111038269
  misc_feature: Bit score of 931.6 for HMM based on sequences of Figure 5
  misc_feature: Functional Homolog Of SEQ ID NO. 1797
  misc_feature: in Figure 5
MAYHNHLSQQDLPLHHFTDQTQQQHQPFQSDQHDPNSKPTEPHHPFQPAPNWLNTALLRNYTNADANNNHNNSPNNNGGGGASNFLNLHVTASDSTTSQASNQWLSQPHRPILHRNHSDVIDDVTAIAGDSMIAATISHDSADLKPDSSLNKTDIVVESGGGGGDGGMINWQNARHKAEILAHPLYEPLLSAHVACLRIATPVDQLPRIDAQLAQSQNVVAKYSALGHGMVGDDKELDQFMRHYVLLLCSFKEQLQQHVRVHAMEAVMACWEIEQSLQSLTGVSPGEGTGATMSDDEDDQVDSDANLFDGSMEGHDSMGFGPLIPTESERSLMERVRQELKHELKQGYKEKIVDIREEILRKRRAGKLPGDTTSVLKAWWQSHSKWPYPTEEDKARLVQETGLQLKQINNWFINQRKRNWHSNPSTSTVLKSKRKRSNAGENSSDRFG

SEQ ID NO: 1799 - protein, 427 aa, Malus x domestica
  misc_feature (218)..(273): Pfam Name: KNOX2 Pfam Description: KNOX2 domain
  misc_feature (165)..(209): Pfam Name: KNOX1 Pfam Description: KNOX1 domain
  misc_feature (330)..(351): Pfam Name: ELK Pfam Description: ELK domain
  misc_feature: Public GI ID no. 3023961
  misc_feature: Bit score of 913.9 for HMM based on sequences of Figure 5
  misc_feature: Functional Homolog Of SEQ ID NO. 1797
  misc_feature: in Figure 5
MAYHNHLSQDLPLHHFTDQTHHQHQQYQSDQPDPNSKPPEPHHSFQPAPNWLNSALLRNFTNTDTNPTNSNNANNNGGGVSNFLNLHVTASDSAASQASNQWLSQSHRPILHRNHSDVNDDVTVAGDSMIAAALSHDSADLKPDSILNKNEGGGGDGGVMNWQNARHKAEILAHPLYEPLLSAHVACLRIATPVDQLPRIDAQLAQSQNVVAKYSALGNGMVGDDKELDQFMRNYVLLLCSFKEQLQQHVRVHAMEAVMACWEIEQSLQSLTGVSPGEGTSATMSDDEDDQVDSDANLFDEGMEGHDSMGFGPLIPTESERSLMERVRQELKHELKQGYKEKIVDIREEILRKRRAGKLPGDTTSVLKAWWQSHSKWPYPTEEDKARLVQETGLQLKQINNWFINQRKRNWHSNPSTSTVLKSKRKR

SEQ ID NO: 1800 - DNA, 1359 bp, Populus balsamifera subsp. trichocarpa
  misc_feature: Ceres Annot ID no. 1531214
  misc_feature: Encodes the peptide sequence at SEQ ID NO. 1801
atggcctatcaccataacttgtcatcacaagacctccctcttcaccacttcacagaccaacaagcaacagagaaccacacagcaccaccgaattggctgaacactgccctcctccgctctcaacaaccaccacagcaacaaactcaccaccacttcactgataacaacaacacaaacaatttcttaaacctccacaccgccaccactaccgccaccgccaccacttctgactcaaactctcataacccagttcaatggctctcccggtcctcctcctccctcctaaaccgcaaccacagtgacgtcatcgacgacgtcgccgccggcggggaccacgccatcataactagtatatcgcaagaatcgtcggaattgaagaatatgaataagggtgaaggtgaagccatggatagtggtggaggagagtcggtggtgaattggcaaaatgcaaggtataaagcggacatattgacgcatccgttgtacgatcaattgctgtcggcacacgtggcgtgtttaaggattgccacgccagttgatcagttgccgaggattgatgcacagttggctcagtcacagcaagtagtaactaagtactctgctcttggaagtcaccaaggattggttcctgatgataaagagcttgatcagtttatgacacattattttcttttgctctgttccttcaaagaacaattgcaacaacatgttcgagttcatgcaatggaagcagtgatggcgtgctgggagatagagcaatccctacagagtttaacgggagtttctccaggtgaaggtacaggcgcaacaatgtccgatgacgatgaagaccaagttgacagtgatgccaatttgttcgttggaagtttggagggtgcagatacactggggtttggtcccttggtccctacagagagtgagagatctttgatggagcgtgtgagacaagaattgaagcatgaattaaaacagggttacaaagaaaaaattgttgacattagagaggaaattctgcgaaagagaagagcaggaaagcttcctggggacacaacctcagtcttaaaagcttggtggcaatcacattccaagtggccatatcctaccgaggaagacaaggcaagattggtgcaggaaacgggcttgcaattaaagcagataaataattggttcatcaatcaaaggaagaggaactggcacagtaatccttcaacctcaacagtcttgaaaagcaaacgcaaaagaaaaactctactgagcctgggcaaggaaaaacaaaccctatcgatcaatgcagaagttgaagcaaccagcccccttgaagagggttggtacgcaggagtgactgattccagtcattga

SEQ ID NO: 1801 - protein, 452 aa, Populus balsamifera subsp. trichocarpa
  misc_feature (205)..(260): Pfam Name: KNOX2 Pfam Description: KNOX2 domain
  misc_feature (150)..(194): Pfam Name: KNOX1 Pfam Description: KNOX1 domain
  misc_feature (317)..(338): Pfam Name: ELK Pfam Description: ELK domain
  misc_feature: Ceres Annot ID no. 1531214
  misc_feature: Bit score of 904.5 for HMM based on sequences of Figure 5
  misc_feature: Functional Homolog Of SEQ ID NO. 1797
  misc_feature: in Figure 5
MAYHHNLSSQDLPLHHFTDQQATENHTAPPNWLNTALLRSQQPPQQQTHHHFTDNNNTNNFLNLHTATTTATATTSDSNSHNPVQWLSRSSSSLLNRNHSDVIDDVAAGGDHAIITSISQESSELKNMNKGEGEAMDSGGGESVVNWQNARYKADILTHPLYDQLLSAHVACLRIATPVDQLPRIDAQLAQSQQVVTKYSALGSHQGLVPDDKELDQFMTHYFLLLCSFKEQLQQHVRVHAMEAVMACWEIEQSLQSLTGVSPGEGTGATMSDDDEDQVDSDANLFVGSLEGADTLGFGPLVPTESERSLMERVRQELKHELKQGYKEKIVDIREEILRKRRAGKLPGDTTSVLKAWWQSHSKWPYPTEEDKARLVQETGLQLKQINNWFINQRKRNWHSNPSTSTVLKSKRKRKTLLSLGKEKQTLSINAEVEATSPLEEGWYAGVTDSSH

SEQ ID NO: 1802 - DNA, 1746 bp, Glycine max
  misc_feature: Ceres Clone ID no. 667754
  misc_feature: Encodes the peptide sequence at SEQ ID NO. 1803
  misc_feature (133)..(133): n is a, c, t, g, unknown, or other
aagaggctcttttcctctctagtagattagtacaatccttcacttcaccatgtccatgaaccaatagctgctaccttttcagaagttactttctcgttttaagtatatggcgtaccataacccccaagacctnccacttcaccatttcactgaccaacaacaacaccataaccatactctccctcacaactccttgctctccgaccctgcctccaaacctgcctccgatcctcaccaacccgcgccaaattggctcaacaacgcccttctccgaacggactacacccacaccaccaccaccaccaccaccaacaccgctgctaacaacagcaacaacagcaccaacttcctcaacctccacacttccgcttccgactccggccaatggcaggcccgcccgatccttaaccgcaaccacagcgaggtcatcgatgacgtggccggcgcasgcgccgaatccggagatttgaagggagagacggcgccggtggacggcctcttgaactggcagaatgcgagattgaaggcggagattttaacgcatcctctgtacgaacagcttctgtcggcacacgtggcgtgcttgcggatcgccacgccggtcgaccagttgcccaggatcgacgctcagctcgcacagtcccagaatgtggtcgccaagtactctgccttcggacaagccatcgttggcgacgataaagaactcgatcagttcttgtcccactatgttctgttgctctgttctttcaaagaacaacttcaacagcatgtccgggtccatgcaatggaagcagtcatggcttgttgggagatcgagcaatccttacaaagtttaacaggagtttcacccggggaaggtacgggagcaacaatgtctgatgacgaagatgagcaagtagatagtgatgccaatctgtttgatggtgctttggatggtcctgatagcatgggattcggtcctcttattcccacagagaatgagaggtccctcatggaacgtgtaagacatgaattgaagcacgaattgaaacagggttataaagataaaatcgtggacataagagaggaaattttacgtaagagacgagctgggaaacttcctggtgacacgacctctgtccttaaagcttggtggcaatcacattccaagtggccttatcctacggaggaggataaggcacggttggtgcaggaaacgggtttgcagttaaagcagatcaataattggtttatcaatcaaaggaagaggaactggcatagcagtccctcaacttctactgttttgaagagcaagcgcaaaagaagtaatgcaggtcttaatagtgctgatcagtacacgtaaatggaggaaaactcgagaaccaatcccttactgtactctgttagtatgtctctgcggtcaatcatggtgcatggcaagggattcaagtaaagtcaatgatagaaaaaaaagttcagattttgtttttgctcaaggaacaggcctaaaacacagatgtggaggattaaaagcctgtagtacggtgatgcatcaaaattagggagttcaattaggaattatataccgatatcaaaatgggtacctccatgggagcatatttttagtctcattaatgtttgtgaaatatatataatagtgaggggttgtgggtgtatagtaataatctgagcgtttttccttcaatcgtactattttttatttttttttgttattcttaaaatggttattttacatggagcttggat

SEQ ID NO: 1803 - protein, 411 aa, Glycine max
  misc_feature (190)..(245): Pfam Name: KNOX2 Pfam Description: KNOX2 domain
  misc_feature (137)..(181): Pfam Name: KNOX1 Pfam Description: KNOX1 domain
  misc_feature (302)..(323): Pfam Name: ELK Pfam Description: ELK domain
  misc_feature: Ceres Clone ID no. 667754
  misc_feature: Bit score of 890.3 for HMM based on sequences of Figure 5
  misc_feature: Functional Homolog Of SEQ ID NO. 1797
  misc_feature: in Figure 5
  misc_feature (9)..(9): Xaa is any aa, unknown, or other
  misc_feature (115)..(115): Xaa is any aa, unknown, or other
MAYHNPQDXPLHHFTDQQQHHNHTLPHNSLLSDPASKPASDPHQPAPNWLNNALLRTDYTHTTTTTTTNTAANNSNNSTNFLNLHTSASDSGQWQARPILNRNHSEVIDDVAGAXAESGDLKGETAPVDGLLNWQNARLKAEILTHPLYEQLLSAHVACLRIATPVDQLPRIDAQLAQSQNVVAKYSAFGQAIVGDDKELDQFLSHYVLLLCSFKEQLQQHVRVHAMEAVMACWEIEQSLQSLTGVSPGEGTGATMSDDEDEQVDSDANLFDGALDGPDSMGFGPLIPTENERSLMERVRHELKHELKQGYKDKIVDIREEILRKRRAGKLPGDTTSVLKAWWQSHSKWPYPTEEDKARLVQETGLQLKQINNWFINQRKRNWHSSPSTSTVLKSKRKRSNAGLNSADQYT

SEQ ID NO: 1804 - protein, 439 aa, Medicago truncatula
  misc_feature (226)..(281): Pfam Name: KNOX2 Pfam Description: KNOX2 domain
  misc_feature (171)..(215): Pfam Name: KNOX1 Pfam Description: KNOX1 domain
  misc_feature (339)..(360): Pfam Name: ELK Pfam Description: ELK domain
  misc_feature: Public GI ID no. 132424655
  misc_feature: Bit score of 884.7 for HMM based on sequences of Figure 5
  misc_feature: Functional Homolog Of SEQ ID NO. 1797
  misc_feature: in Figure 5
MAYQNQHLSQELPIQHFTDQTNNNNNNSFRSILPDSPDPNSKPDSDPNNQLQTTPNWLNNAILRTHYTDNNNNNNNNDDVTNNVNNDSDGNGASNFLNLQQTSDTVQTTGQWLARSILHRQHGEVIDNVTMASEVEHELANMKNDGDSDGLGGKSEVAVVGDGGLVNWQMGRWKAEIMAHPLYEQLLSAHVACLRIATPVDQLPRIDAQLAQSQNVVAKYSAFGQNIGAGVDDKELDHFMSHYVLLLCSFKEQLQQHVRVHAMEAVMACWEIEQSLQSLTGVSPGEGTGATMSDDEDEQVDSDANLFDGSFDGGADNMGFGPLIPTENERSLMERVRQELKHELKHGYKEKIVDIREEILRKRRAGKLPGDTTSVLKAWWQSHSKWPYPTEENKARVVQETGLQLKQINNWFINQRKRNWHSNPSTSTVLKSKRKRSQN

SEQ ID NO: 1805 - protein, 408 aa, Bryophyllum daigremontianum x Bryophyllum delagoense
  misc_feature (199)..(254): Pfam Name: KNOX2 Pfam Description: KNOX2 domain
  misc_feature (143)..(187): Pfam Name: KNOX1 Pfam Description: KNOX1 domain
  misc_feature (311)..(332): Pfam Name: ELK Pfam Description: ELK domain
  misc_feature: Public GI ID no. 167178664
  misc_feature: Bit score of 828.1 for HMM based on sequences of Figure 5
  misc_feature: Functional Homolog Of SEQ ID NO. 1797
  misc_feature: in Figure 5
MAYHSQMSQELPLQHFGDQQLAETTSSVMQQMPQASPDASGKQQASSEQNQTGPNWLNNAILRHQQNHQYGGDNSSGFLNLHASSNPNGDRMMSAASMSHESANLGDGSRVGRNGNGEQELVVESGAVVVAGGVEGAMNWQSARLKAEVLSHPLYEQLLSAHVSCLRIATPVDQLPRIDAQLSQSQHVVSKYSGLGQGNQGLMGDDKELDQFMTNYVLLLCSFKEQLQQHVRVHAMEAVMACWEIEQSLQSLTGVAPGEGTGATMSDDEDDQVDSDANLYDGGLDGLDTMGFGPLIPTESERSLMERVRQELKHELKQGYKEKIVDIREEILRKRRAGKLPGDTTSVLKAWWQSHSKWPYPTEEDKARLVQETGLQLKQINNWFINQRKRNWHSNPSTSTVLKSKRKR

SEQ ID NO: 1806 - protein, 422 aa, Nicotiana tabacum
  misc_feature (215)..(270): Pfam Name: KNOX2 Pfam Description: KNOX2 domain
  misc_feature (163)..(207): Pfam Name: KNOX1 Pfam Description: KNOX1 domain
  misc_feature (325)..(346): Pfam Name: ELK Pfam Description: ELK domain
  misc_feature: Public GI ID no. 3116212
  misc_feature: Bit score of 841.8 for HMM based on sequences of Figure 5
  misc_feature: Functional Homolog Of SEQ ID NO. 1797
  misc_feature: in Figure 5
MAYNPNHMSQEMDMHHFSDENSAVLRSILPEQLAQSSPDVKPLDHQQPPTWLNSAILRQESHYTGTGGRGVGENFLNLHSNSESSAAASQASNQWLSRSILRRNVSDVQTSNNSSAVIAAADLKNDDGNNNNDNGNNNAGGQLTDSEVVGGGGTDGILNWQNAGYKAEILAHPLFEQLLSAHVACLRIATPVDQLPRIDAQLAQSQQVVAKYSTLGQNIGDDKELDQFLTHYVLLLCPFKEQLQQHVRVHAMEAVMACWEIEQSLQSLTGVSPGEGTGATMSDDEDDQVDSEANLFDGSLDGHDGMAFGLPTESERSLMERVRQELKHDLKQGYKEKLVDIREEILRKRRAGKLPGDTTSVLKAWWQSHAKWPYPTEEDKAKLVQETGLQLKQINNWFINQRKRDWHSNASSSTTSKSKRKR

SEQ ID NO: 1807 - protein, 430 aa, Vitis vinifera
  misc_feature (221)..(276): Pfam Name: KNOX2 Pfam Description: KNOX2 domain
  misc_feature (169)..(213): Pfam Name: KNOX1 Pfam Description: KNOX1 domain
  misc_feature (333)..(354): Pfam Name: ELK Pfam Description: ELK domain
  misc_feature: Public GI ID no. 225463014
  misc_feature: Bit score of 838.8 for HMM based on sequences of Figure 5
  misc_feature: Functional Homolog Of SEQ ID NO. 1797
  misc_feature: in Figure 5
MAFHNQLSHDMALQHFTDSHLTENTAVLRGILPEQLGQSSSDGAGKPPSHQQLGGGGGGGGPTWLNNAILRQQSQYADGSFLHLQTNSDSTSSPATATTTTNQWLSRSMSNVGAQNDDVPVSSGSVIAAISADLNGNQEKRNGGNNQNRGDNNGEDMLDCDSGGNWENARYKADILAHPLYEQLLSAHVSCLRIATPVDQLPRIDAQLAQSQGVVTKYSVLANQPLDDKELDQFMTHYVLLLCSFKEQLQQHVRVHAMEAVMACWELEQSLQSLTGVSPGEGTGATMSDDEDDQADSEINLFDGSLDGPDSMGFGPLVPTETERSLMERVRQELKHELKQGYKEKIVDIREEILRKRRAGKLPGDTTSLLKAWWQSHSKWPYPTEEDKARLVQETGLHLKQINNWFINQRKRNWHSNPSSSAVLKTKRKR

SEQ ID NO: 1808 - protein, 371 aa, Medicago truncatula
  misc_feature (160)..(215): Pfam Name: KNOX2 Pfam Description: KNOX2 domain
  misc_feature (104)..(148): Pfam Name: KNOX1 Pfam Description: KNOX1 domain
  misc_feature (274)..(295): Pfam Name: ELK Pfam Description: ELK domain
  misc_feature: Public GI ID no. 132424659
  misc_feature: Bit score of 808.7 for HMM based on sequences of Figure 5
  misc_feature: Functional Homolog Of SEQ ID NO. 1797
  misc_feature: in Figure 5
MAYHNQDNPLHHFTEQQQPTSDPHHSFQTAPNWLNNALLRNLDTNVNATATNNNNGSQSSGQWLSRPILHRNHSEVIDDVTGAGMKAEESGEATAEGVMNWQKAKHKGEIMAHPLYEQLLSAHVSCLRIATPVDQLPRIDAQLAESQNVVAKYSALGQQGMLDNDDNKQLDHFMSHYVLLLCSFKEQLQQHVRVHAMEAVMACWEIEQSLQSLTGVSPGEGTGATMSEDEDEQVDSDVNLFDGGLDGSDNSMGGFGPLVLTENERSLMERVRHELKHELKQGYKEKIVDIREEILRKRRAGKLPGDTTSVLKDWWQSHSKWPYPTEEDKARLVQETGLQLKQINNWFINQRKRNWHSNPSTSNALKSKRKR

SEQ ID NO: 1809 - protein, 426 aa, Solanum lycopersicum
  misc_feature (215)..(270): Pfam Name: KNOX2 Pfam Description: KNOX2 domain
  misc_feature (161)..(205): Pfam Name: KNOX1 Pfam Description: KNOX1 domain
  misc_feature (327)..(348): Pfam Name: ELK Pfam Description: ELK domain
  misc_feature: Public GI ID no. 6016226
  misc_feature: Bit score of 821.5 for HMM based on sequences of Figure 5
  misc_feature: Functional Homolog Of SEQ ID NO. 1797
  misc_feature: in Figure 5
MEFQDHFSQEMVLHQQQQQQQQQQNAVLRSMLPESPHHDARKSPPTWLNTSLLRQQHSQFGNASSPSSAAAAAAVAGGNNFLHLQTSNSDSSNSNQWLSPTAAAGGGSNGGGSGHNDELSESMNFAKKMSQQHSGGGEENNNNNNNNNNNNNEEENSWEREKCKADILNHPLYDQLLSAHVSCLRIATPVDQLPRIDAQLAQSQNVVAKYSVLGQGQPPLDDKDLDQFMTHYVLLLSSFKEQLQQHVRVHAMEAVMACWELEQSLQSLTGVAPGEGTGATMSDDDDDQADSDTNFLDGGFDGPDSMGFGPLVPTESERSLMERVRQELKHELKQGYKEKIVDIREEILRKRRAGKLPGDTTSVLKAWWQSHSKWPYPTEEDKARLVQETGLQLKQINNWFINQRKRNWHSNPSTSSSQKSQTQECR

SEQ ID NO: 1810 - protein, 374 aa, Oryza sativa subsp. japonica
  misc_feature (159)..(215): Pfam Name: KNOX2 Pfam Description: KNOX2 domain
  misc_feature (106)..(150): Pfam Name: KNOX1 Pfam Description: KNOX1 domain
  misc_feature (270)..(291): Pfam Name: ELK Pfam Description: ELK domain
  misc_feature: Public GI ID no. 221272018
  misc_feature: Bit score of 752.2 for HMM based on sequences of Figure 5
  misc_feature: Functional Homolog Of SEQ ID NO. 1797
  misc_feature: in Figure 5
MAFHGHLPHEMTMQALGADDAAVAAAAAAGGVGAGGAPAWMRYNDGSFLHLQTTSDSSASPSGAAAAAAAAAAAAAAGVQQWMGGGGGGEDAVAAAMGGGGEADAARCKAEILAHPLYEQLLSAHVACLRIATPVDQLPRIDAQLAQSQGVVAKYSALAAAAAGDDGRELDQFMTHYVLLLCSFKEQLQQHVRVHAMEAVMACWELEQNLQSLTGASPGEGTGATMSDGEDDQADSEANMYDPSLDGADNMGFGLPTESERSLMERVRQELKHELKQGYKEKLIDIREEILRKRRAGKLPGDTTSTLKAWWQSHAKWPYPTEEDKARLVQETGLQLKQINNWFINQRKRNWHSNPSSSTSVKTKRKSNAGDNNS

SEQ ID NO: 1811 - protein, 431 aa, Arabidopsis thaliana
  misc_feature (213)..(268): Pfam Name: KNOX2 Pfam Description: KNOX2 domain
  misc_feature (157)..(201): Pfam Name: KNOX1 Pfam Description: KNOX1 domain
  misc_feature (322)..(343): Pfam Name: ELK Pfam Description: ELK domain
  misc_feature: Public GI ID no. 15238743
  misc_feature: Bit score of 873.4 for HMM based on sequences of Figure 5
  misc_feature: Functional Homolog Of SEQ ID NO. 1797
MAFHHNHLSQDLSFNHFTDQHQPPPPQPPPPPPQQQQHFQEAPPPNWLNTALLRSSDNNNNFLNLHTATANTTTASSSDSPSSAAAAAAANQWLSRSSSFLQRNNNNNASIVGDGIDDVTGGADTMIQGEMKTGGGENKNDGGGATAADGVVSWQNARHKAEILSHPLYEQLLSAHVACLRIATPVDQLPRIDAQLAQSQHVVAKYSALGAAAQGLVGDDKELDQFMTHYVLLLCSFKEQLQQHVRVHAMEAVMACWEIEQSLQSLTGVSPGEGMGATMSDDEDEQVESDANMFDGGLDVLGFGPLIPTESERSLMERVRQELKHELKQGYKEKIVDIREEILRKRRAGKLPGDTTSVLKAWWQSHSKWPYPTEEDKARLVQETGLQLKQINNWFINQRKRNWHSNPSSSTVLKNKRKSNAGDNSGRERFA

SEQ ID NO: 1812 - protein, 419 aa, Arabidopsis thaliana
  misc_feature (213)..(268): Pfam Name: KNOX2 Pfam Description: KNOX2 domain
  misc_feature (157)..(201): Pfam Name: KNOX1 Pfam Description: KNOX1 domain
  misc_feature (322)..(343): Pfam Name: ELK Pfam Description: ELK domain
  misc_feature: Public GI ID no. 79328660
  misc_feature: Bit score of 854.4 for HMM based on sequences of Figure 5
  misc_feature: Functional Homolog Of SEQ ID NO. 1797
MAFHHNHLSQDLSFNHFTDQHQPPPPQPPPPPPQQQQHFQEAPPPNWLNTALLRSSDNNNNFLNLHTATANTTTASSSDSPSSAAAAAAANQWLSRSSSFLQRNNNNNASIVGDGIDDVTGGADTMIQGEMKTGGGENKNDGGGATAADGVVSWQNARHKAEILSHPLYEQLLSAHVACLRIATPVDQLPRIDAQLAQSQHVVAKYSALGAAAQGLVGDDKELDQFMTHYVLLLCSFKEQLQQHVRVHAMEAVMACWEIEQSLQSLTGVSPGEGMGATMSDDEDEQVESDANMFDGGLDVLGFGPLIPTESERSLMERVRQELKHELKQGYKEKIVDIREEILRKRRAGKLPGDTTSVLKAWWQSHSKWPYPTEEDKARLVQETGLQLKQINNWFINQRKRNWHSNPSSSTVLKNKRKR

SEQ ID NO: 1813 - protein, 393 aa, Arabidopsis thaliana
  misc_feature (177)..(232): Pfam Name: KNOX2 Pfam Description: KNOX2 domain
  misc_feature (121)..(165): Pfam Name: KNOX1 Pfam Description: KNOX1 domain
  misc_feature (286)..(307): Pfam Name: ELK Pfam Description: ELK domain
  misc_feature: Public GI ID no. 1045044
  misc_feature: Bit score of 778.8 for HMM based on sequences of Figure 5
  misc_feature: Functional Homolog Of SEQ ID NO. 1797
MAFHNNHFNHFTDQQQHQPPPPPQQQQQQHFQESAPPNWLLRSDNNFLNLHTAATAAATSSDSPSSAAANQWLSRSSSFLQRGNTANNNNNETSGDVIEDVPGGEESMIGEKKEAERWQNARHKAEILSHPLYEQLLSAHVACLRIATPVDQLPRIDAQLAQSQNVVAKYSTLEAAQGLLAGDDKELDHFMTHYVLLLCSFKEQLQQHVRVHAMEAVMACWEIEQSLQSFTGVSPGEGTGATMSEDEDEQVESDAHLFDGSLDGLGFGPLVPTESERSLMERVRQELKHELKQGYKEKIVDIREEILRKRRAGKLPGDTTSVLKSWWQSHSKWPYPTEEDKARLVQETGLQLKQINNWFINQRKRNWHSNPSSSTVSKNKRRSNAGENSGRDR

SEQ ID NO: 1814 - DNA, 1791 bp, Arabidopsis thaliana
  misc_feature: Ceres Annot ID no. 882143
  misc_feature: Encodes the peptide sequence at SEQ ID NO. 1815
atggatcaccaaaaagctggtactctacaatttaataataaaagaagaagaataaatataggaataaatcgtcttttttggtgtaagctacatataaaattcaaaccgtcaaacacacatacacatcgaaacccttatatttcattttctttctgttttagagaagaaagtttctataattgattgataaatctgaacatcaaagctaagaatttctcttctttttttcttcttaattcatctttccctctccgaaacagaaattcaaaaacaaattcaacacgaaaacgatggcgtttcataacaatcactttaatcatttcaccgaccaacaacaacatcagcctcctcctccgccgcaacagcagcagcaacaacattttcaagaatcagcaccccctaattggctcctccgctccgacaacaacttcctcaatctccacacagctgcctctgccgccgctacaagctccgattctccttcttccgccgccgctaaccagtggctctcacgatcctcatccttcctccaacgaggcaacaccgcaaacaacaacaacaacgaaacatccggtgacgtcatcgaagacgttcccggcggagaggagtcaatgatcggagagaagaaggaggcggagaggtggcagaatgcgagacacaaggcggagatactgtctcatccactatacgagcaacttttgtcggcacacgtggcgtgcctgaggatcgcaacgccggtggatcagcttccgaggatagacgcacagcttgctcagtctcaaaacgtcgtggctaagtactcaactttagaagccgctcaaggactcctcgccggcgatgacaaggagcttgaccacttcatgacgcattatgtactattgctttgctctttcaaagaacaactgcaacagcatgttcgtgttcatgcaatggaagctgttatggcctgttgggagattgaacagtcgcttcaaagttttacaggggtatctcctggtgaaggcacaggagcaacaatgtctgaggatgaagatgagcaagtagagagtgatgctcatttgtttgatggaagcttagatgggttagggtttggtcctctagttcccactgagagcgagagatctttgatggaacgagtcagacaagaactcaaacatgaactcaagcagggttacaaggagaaaattgtggacataagagaggagatactgaggaagagaagagctggaaaattaccaggagacaccacctctgttctcaaatcatggtggcaatctcattctaagtggccttaccctactgaggaagataaggcgaggttggtgcaggagacgggtttgcagctcaaacagataaacaattggttcatcaatcaaagaaagaggaattggcatagcaatccatcttcttctaccgtctcaaagaataaacgccgaagcaatgcaggtgaaaacagcggaagagaccgttgagatcaagcttgcatgtagagatccaaaagctttatagaaaggtggaggcatgaagacaaagaattcttacacaacaaacgtaggacgtaattttgtgccagtacatggtatggctttcatatttggtaatgattagggccacacaaaattaaaccccaaagcatgatttgtaatatgaggttttagatggactttatgataggatcgtcagtcttcactgccatctccattctccaccatcaatccatcattatatcttgtgaataacatggaaatttctcgttatgcatttaatttgtgcaatcattggccgtaatct

SEQ ID NO: 1815 - protein, 393 aa, Arabidopsis thaliana
  misc_feature (177)..(232): Pfam Name: KNOX2 Pfam Description: KNOX2 domain
  misc_feature (121)..(165): Pfam Name: KNOX1 Pfam Description: KNOX1 domain
  misc_feature (286)..(307): Pfam Name: ELK Pfam Description: ELK domain
  misc_feature: Ceres Annot ID no. 882143
  misc_feature: Bit score of 779.0 for HMM based on sequences of Figure 5
  misc_feature: Functional Homolog Of SEQ ID NO. 1797
MAFHNNHFNHFTDQQQHQPPPPPQQQQQQHFQESAPPNWLLRSDNNFLNLHTAASAAATSSDSPSSAAANQWLSRSSSFLQRGNTANNNNNETSGDVIEDVPGGEESMIGEKKEAERWQNARHKAEILSHPLYEQLLSAHVACLRIATPVDQLPRIDAQLAQSQNVVAKYSTLEAAQGLLAGDDKELDHFMTHYVLLLCSFKEQLQQHVRVHAMEAVMACWEIEQSLQSFTGVSPGEGTGATMSEDEDEQVESDAHLFDGSLDGLGFGPLVPTESERSLMERVRQELKHELKQGYKEKIVDIREEILRKRRAGKLPGDTTSVLKSWWQSHSKWPYPTEEDKARLVQETGLQLKQINNWFINQRKRNWHSNPSSSTVSKNKRRSNAGENSGRDR

SEQ ID NO: 1816 - protein, 306 aa, Arabidopsis thaliana
  misc_feature (88)..(143): Pfam Name: KNOX2 Pfam Description: KNOX2 domain
  misc_feature (32)..(76): Pfam Name: KNOX1 Pfam Description: KNOX1 domain
  misc_feature (197)..(218): Pfam Name: ELK Pfam Description: ELK domain
  misc_feature: Public GI ID no. 21539535
  misc_feature: Bit score of 657.2 for HMM based on sequences of Figure 5
  misc_feature: Functional Homolog Of SEQ ID NO. 1797
MIQGEMKTGGGENKNDGGGATAADGVVSWQNARHKAEILSHPLYEQLLSAHVACLRIATPVDQLPRIDAQLAQSQHVVAKYSALGAAAQGLVGDDKELDQFMTHYVLLLCSFKEQLQQHVRVHAMEAVMACWEIEQSLQSLTGVSPGEGMGATMSDDEDEQVESDANMFDGGLDVLGFGPLIPTESERSLMERVRQELKHELKQGYKEKIVDIREEILRKRRAGKLPGDTTSVLKAWWQSHSKWPYPTEEDKARLVQETGLQLKQINNWFINQRKRNWHSNPSSSTVLKNKRKSNAGDNSGRERFA

SEQ ID NO: 1817 - protein, 419 aa, Arabidopsis thaliana
  misc_feature (177)..(232): Pfam Name: KNOX2 Pfam Description: KNOX2 domain
  misc_feature (121)..(165): Pfam Name: KNOX1 Pfam Description: KNOX1 domain
  misc_feature (286)..(307): Pfam Name: ELK Pfam Description: ELK domain
  misc_feature: Public GI ID no. 9795158
  misc_feature: Bit score of 770.6 for HMM based on sequences of Figure 5
  misc_feature: Functional Homolog Of SEQ ID NO. 1797
MAFHNNHFNHFTDQQQHQPPPPPQQQQQQHFQESAPPNWLLRSDNNFLNLHTAASAAATSSDSPSSAAANQWLSRSSSFLQRGNTANNNNNETSGDVIEDVPGGEESMIGEKKEAERWQNARHKAEILSHPLYEQLLSAHVACLRIATPVDQLPRIDAQLAQSQNVVAKYSTLEAAQGLLAGDDKELDHFMTHYVLLLCSFKEQLQQHVRVHAMEAVMACWEIEQSLQSFTGVSPGEGTGATMSEDEDEQVESDAHLFDGSLDGLGFGPLVPTESERSLMERVRQELKHELKQGYKEKIVDIREEILRKRRAGKLPGDTTSVLKSWWQSHSKWPYPTEEDKARLVQETGLQLKQINNWFINQRKRNWHSNPSSSTVSKNKRRRYMESLNLEGFLYEAMQVKTAEETVEIKLACRDPKAL

SEQ ID NO: 1818 - DNA, 1446 bp, Populus balsamifera subsp. trichocarpa
  misc_feature: Ceres Annot ID no. 1508832
  misc_feature: Encodes the peptide sequence at SEQ ID NO. 1819
atggcctttcaccataacttgccatcacaagaccttcctcttcaccacttcacagaccaacaagcaacagaaaacaccacagcaccaccgaattggctgaacactgctctcctccgctctcaacaaccaccacaacaacgaactcaccaccacttcactgataacaacaacaccaacaatttcttaaacctccatagcgctaccccttccaccaccgccaccacttctgactccgcttctcataatccaactcaatggctctcccgttcctcctcctccctacttaaccgcaaccacagtaccgtcatcgacgacgtctccgccgctgccgccggtggagaccaccccatcatcgctagtatgtcgcaagaatcgtcagaattgaagagcatgaataagagcgaaggagaaaccatggtggagagtggcggtggtggaggagaggcggtggtgaattggcaaaatgcgaagtgtaaagcggacatattggcgcatcctttgtatgatcaattgttgtctgcccacgtggcgtgtttaaggattgccacgcctgttgatcagttgccgaggattgatgcccaattggctcagtcacaacaagtagtggctaaatactctgctcttggaagtcatcaaggattggttcctgatgacaaagagcttgatcagtttatgacacattactttctgttactttgttccttcaaagaacaattgcaacaacatgttcgagttcatgcaatggaagcggtgatggcttgctgggagatagagcaatccctacaaagtttaacaggagtttctccaggtgaaggtactggtgcaacaatgtccgatgatgatgaagaccaagttgacagtgaggccaatatgtttgatggaagtttggagggtgtagatacaatggggtttggtcccttggtccctacagagagtgagagatctttgatggagcgtgtgaggcaggaattgaagcatgaattaaaacagggttacaaggagaaaattgttgacattagagaggaaattttgcgcaagagaagagcgggaaagcttcctggtgacacaacctcagtcttaaaagcttggtggcaatcacattccaagtggccatatcctaccgaggaagacaaggcgagattggtacaggaaacaggtttgcaattaaagcagataaataattggttcatcaatcaaaggaagaggaactggcacagtaatccttcaacttcaacagtcttaaaaagcaaacgcaaaaggtattttattgttttattaaagcatgtattctcatctaatttaatacctgatgagcttcgaactaactttaatttgaaaagaagtaatgcagcttgcactccagcaagtacattgaacatactacatagcaatggaactgcaaagggtttgacagtggtctacagaattcgagtaagagaaccatag

SEQ ID NO: 1819 - protein, 481 aa, Populus balsamifera subsp. trichocarpa
  misc_feature (211)..(266): Pfam Name: KNOX2 Pfam Description: KNOX2 domain
  misc_feature (156)..(200): Pfam Name: KNOX1 Pfam Description: KNOX1 domain
  misc_feature (323)..(344): Pfam Name: ELK Pfam Description: ELK domain
  misc_feature: Ceres Annot ID no. 1508832
  misc_feature: Bit score of 890.9 for HMM based on sequences of Figure 5
  misc_feature: Functional Homolog Of SEQ ID NO. 1797
MAFHHNLPSQDLPLHHFTDQQATENTTAPPNWLNTALLRSQQPPQQRTHHHFTDNNNTNNFLNLHSATPSTTATTSDSASHNPTQWLSRSSSSLLNRNHSTVIDDVSAAAAGGDHPIIASMSQESSELKSMNKSEGETMVESGGGGGEAVVNWQNAKCKADILAHPLYDQLLSAHVACLRIATPVDQLPRIDAQLAQSQQVVAKYSALGSHQGLVPDDKELDQFMTHYFLLLCSFKEQLQQHVRVHAMEAVMACWEIEQSLQSLTGVSPGEGTGATMSDDDEDQVDSEANMFDGSLEGVDTMGFGPLVPTESERSLMERVRQELKHELKQGYKEKIVDIREEILRKRRAGKLPGDTTSVLKAWWQSHSKWPYPTEEDKARLVQETGLQLKQINNWFINQRKRNWHSNPSTSTVLKSKRKRYFIVLLKHVFSSNLIPDELRTNFNLKRSNAACTPASTLNILHSNGTAKGLTVVYRIRVREP

SEQ ID NO: 1820 - DNA, 1964 bp, Gossypium hirsutum
  misc_feature: Ceres Clone ID no. 1971046
  misc_feature: Encodes the peptide sequence at SEQ ID NO. 1821
atcctctcttaaagccgtagcctttatttttttgctagacaaagagtgtatcttttaagttaatgagactgtaatttttttttctgaaagctgtctttgtcatcattttcttcgtttttctctctctctctatcagaccatgaattcataatcatcgtcgtcgtcgtctccttcatcgatatatctctttcgaatacgtttagaggaaaaaggaaaaggaaaaagggtacatacatggcgtttcaccatagcagcacccacctttctcaagaccttcctctccatcactttaccgaccagcaacagcaacagcaacaacccaaccaaacccagcaaggcgaccaacttcaggaaaccgccgctcccaattggttaaactccgcccttctccgtccccaacagccgcacccaccgcaaccccacccgcacttctccgaccctaactttcttaaccttcatactactacaactgcttccgactccaccgcggcttcccaagctcctaacccgatgttctcccgttcatcctcgtcgcttcttcatcgaaaccacggcaacgtcatcgacgacgcggctgctgcggcagcagctgcggtaggaggaggtgttatggccgtggaatcgggtgatttgaagaacagcatcagcgagactatgaataacaataagagcgaaggcgtggtggtggagagtggaggaggaggaggcggagatgggattgtgaattttcagaatgcgagatacaaggcagagattctagctcacccattttacgagcaactattgtcagcacacgtggcgtgccttaggatcgccacgccagtggatcagcttccgaggatcgacgctcagctggctcagtcgcagcatgtggtggctaaatactcagctctcggtggagggtcgcagggcttggttagtgatgacaaagaactcgatcagttcatgacgcattatgttctgttgttatgctcgtttaaagaacaattacaacaacatgttcgtgttcatgcgatggaagcagtgatggcttgctgggagattgaacaatccttacaaagcttaacaggtgtttccccaggggaaggaacaggtgctacaatgtctgatgatgatgatgatgaccaagtcgacagtgatgccaacttgtttgatacaagtttggatggtacagattcaatggggtttggacctttgatcccaacagaaagtgaaaggtctttgatggagcgtgtgaggcatgaactcaaacatgaactcaaacagggttacaaggagaagatcgtggacataagggaggaaattttgcgaaaaagaagggccggaaaacttcccggtgatacaacatcggttttaaaagcttggtggcagtcacattccaagtggccttaccctactgaggaagataaggcaaggttggttcaagaaacaggtttacagttaaaacagataaacaattggttcatcaatcaaaggaagaggaactggcatagcaatccatcgacttccaccgtctccaagaccaaacgtaaaaggtgaaaacataaggtgatcggttcgtgttaaaccaaatcaaagattaaacccaacattacttcttacatagatcacaagatatataggcttttagtggaactgcagcagaggcttaaaaggtgaggatcagatttgctgcaacatgagaaaccggctaacacgggcgatgaagctgatattaggccattttgcaggtatgcgagattggaggtattggtagggaagtttaggaaaattataattagtgtaacttttaattggatgaaattgtagttgcgtcagtagattatgatttttggtatgtatgtctctttcatatagatgtgaataaattgggagtgtacagtgtaataagctttatacttggttacggccatggtagatcattgtagcctttttgacattgtaatgcagagtaaaattaggtc

SEQ ID NO: 1821 - protein, 309 aa, Gossypium hirsutum
  misc_feature (99)..(154): Pfam Name: KNOX2 Pfam Description: KNOX2 domain
  misc_feature (43)..(87): Pfam Name: KNOX1 Pfam Description: KNOX1 domain
  misc_feature (212)..(233): Pfam Name: ELK Pfam Description: ELK domain
  misc_feature: Ceres Clone ID no. 1971046
  misc_feature: Bit score of 662.6 for HMM based on sequences of Figure 5
  misc_feature: Functional Homolog Of SEQ ID NO. 1797
MAVESGDLKNSISETMNNNKSEGVVVESGGGGGGDGIVNFQNARYKAEILAHPFYEQLLSAHVACLRIATPVDQLPRIDAQLAQSQHVVAKYSALGGGSQGLVSDDKELDQFMTHYVLLLCSFKEQLQQHVRVHAMEAVMACWEIEQSLQSLTGVSPGEGTGATMSDDDDDDQVDSDANLFDTSLDGTDSMGFGPLIPTESERSLMERVRHELKHELKQGYKEKIVDIREEILRKRRAGKLPGDTTSVLKAWWQSHSKWPYPTEEDKARLVQETGLQLKQINNWFINQRKRNWHSNPSTSTVSKTKRKR

SEQ ID NO: 1822 - protein, 391 aa, Nicotiana tabacum
  misc_feature (182)..(237): Pfam Name: KNOX2 Pfam Description: KNOX2 domain
  misc_feature (128)..(172): Pfam Name: KNOX1 Pfam Description: KNOX1 domain
  misc_feature (294)..(315): Pfam Name: ELK Pfam Description: ELK domain
  misc_feature: Public GI ID no. 163838594
  misc_feature: Bit score of 803.0 for HMM based on sequences of Figure 5
  misc_feature: Functional Homolog Of SEQ ID NO. 1797
MAFQDHFSQEMATLHQQQQNAAVLRSMLPEDHQSPRKSPPTWLNTSLLRQHSSAAAVSAAGGNGNNFLHLQTSNSDSSNSNNQWLSPTAAASAGGGGGGGEEHNDVNTNNNSNSNNNNEEGENSWEREKCKADILNHPLYDQLLSAHVSCLRIATPVDQLPRIDAQLAQSQNVVAKYSVLGQGQPLLDDKDLDQFMTHYVLLLSSFKEQLQQHVRVHAMEAVMACWELEQSLQSLTGVAPGEGTGATMSDDDDDQADSDTNFLEGGFDGSDSMGFGPLVPTESERSLMERVRQELKHELKQGYKEKIVDIREEILRKRRAGKLPGDTTSVLKAWWQSHSKWPYPTEEDKARLVQETGLQLKQINNWFINQRKRNWHSNPSTSTSQKSKRKR

SEQ ID NO: 1823 - protein, 384 aa, Bryophyllum daigremontianum x Bryophyllum delagoense
  misc_feature (168)..(223): Pfam Name: KNOX2 Pfam Description: KNOX2 domain
  misc_feature (116)..(160): Pfam Name: KNOX1 Pfam Description: KNOX1 domain
  misc_feature (280)..(301): Pfam Name: ELK Pfam Description: ELK domain
  misc_feature: Public GI ID no. 168199347
  misc_feature: Bit score of 744.8 for HMM based on sequences of Figure 5
  misc_feature: Functional Homolog Of SEQ ID NO. 1797
MAYQNHPAHQMELQHLADQQLTEGSGGGGGSGGGAMTWLNSGVVQQHDNRYTEGNFLHLQTNSGSSNSPTAANRYMPHSDESDNHKRGGGSRVNDRYGKDEDAGNNEYGAVNWENARCKAEVLSHPLYEQLLSAHVSCLRIATPVDQLPRIDAQLVQSQSVVAKYLAVGPGNLDDKELDQFMTNYVLLLCSFKEQLQQHVRVHAMEAVMACWELEQSLQTLTGVSPGEGNGETMSDDEDNHMDSDTHLFDGSLDSPDSMGFGPLILTDSERSLMERVRQELKHELKNGYKDKIVDIREEILRKRRAGKLPGDTTSHLKAWWKSHSKWPYPTEEDKARLVQETGLQLKQINNWFINQRKRNWHSNSSSSNSSKSKRKSNAGETTS

SEQ ID NO: 1824 - DNA, 1508 bp, Glycine max
  misc_feature: Ceres Clone ID no. 515966
  misc_feature: Encodes the peptide sequence at SEQ ID NO. 1825
gaacaacaaacaaacaaacaccaccaacaacaaccactcctcttctttttcaccctcgaatccacgcttcctttacaccgcgtttggatctccgttaaacaaaaccattaaaatgtagcgagagaaaaacaaaaccgcaaaagaaaatcagttaatttattaattttatttttttatggctttccacgaccatctccagcacgaaatagcgttccagcgtttcacggaggagcaagagttgaccgagaacagagacatgcagcagaggctcccacctccgacatggctcaacaacgttaacgcgcgtcaacagaatttcctcgacaccgagaagagcgtggatcggaacaaccgaagcgagagcaattgcgaatccgaggatttgagggaatacaaagcggacattctaggtcaccctctctacgatcaactgttgtcggcgcacgtctcgtgcctcagaatcgccacgccggtggaccagcttcctaggatcgatgcgcagcttcagcagtcgcagcgcgtggttgaaaagtactctgcacttgcacacaacggggtcgtcgatgagaaggagcttgatcagttcatgacccattatgttctgttgctctgtgcctttaaagaacaactgcagcagcatgtccgtgttcatgccatggaggcagtgatggcttgttgggatctggagcaatctctgcaaagcttgacaggtgtatctcctggtgaaggaacgggtgcaacaatgtcagacgatgaagatgaccaggcagagagcaatgccaacttatacgaaggaagccttgatggcggcgaaactcttggatttggtcctcttgtccccactgaaagtgaaagatctttgatggaaagagtcaggcatgagttgaagcatgaactaaaacagggttacaaggagaagattgtggacataagagaagaaattctaagaaagagacgagcggggaagcttccaggggacaccacatcccttttgaaagcttggtggcaatcacattctaaatggccttaccccactgaggaagacaaggctagattggtgcaggaaacagggttgcaattaaagcagataaataattggttcataaatcaaaggaaaaggaactggcatacaaataacccctcatcctctagcaactccaaaagcaagcgcaagagtagtgcaggagaagccagtaaccagagcttcatgtgaacggtcgcatattttgaacaaaaattattggtattgttctcccttttaatgcatgctcgtgggattcatagatcttacggtccagcgtgaacgtgatggattctggatgaaaaagggaaattcatgatatataaaaccactgtattggttgaattacagaaaattatccctggtattgttgtatatgaggctgctgcatgccgcttgatatctgatattgatgcagtcgcattctattcgatttaatgggtagcatgctgatattattctgcttatttaaaaatattatggatcc

SEQ ID NO: 1825 - protein, 345 aa, Glycine max
  misc_feature (124)..(179): Pfam Name: KNOX2 Pfam Description: KNOX2 domain
  misc_feature (71)..(115): Pfam Name: KNOX1 Pfam Description: KNOX1 domain
  misc_feature (236)..(257): Pfam Name: ELK Pfam Description: ELK domain
  misc_feature: Ceres Clone ID no. 515966
  misc_feature: Bit score of 683.7 for HMM based on sequences of Figure 5
  misc_feature: Functional Homolog Of SEQ ID NO. 1797
MAFHDHLQHEIAFQRFTEEQELTENRDMQQRLPPPTWLNNVNARQQNFLDTEKSVDRNNRSESNCESEDLREYKADILGHPLYDQLLSAHVSCLRIATPVDQLPRIDAQLQQSQRVVEKYSALAHNGVVDEKELDQFMTHYVLLLCAFKEQLQQHVRVHAMEAVMACWDLEQSLQSLTGVSPGEGTGATMSDDEDDQAESNANLYEGSLDGGETLGFGPLVPTESERSLMERVRHELKHELKQGYKEKIVDIREEILRKRRAGKLPGDTTSLLKAWWQSHSKWPYPTEEDKARLVQETGLQLKQINNWFINQRKRNWHTNNPSSSSNSKSKRKSSAGEASNQSFM

SEQ ID NO: 1826 - protein, 375 aa, Oryza sativa subsp. japonica
  misc_feature (159)..(215): Pfam Name: KNOX2 Pfam Description: KNOX2 domain
  misc_feature (106)..(150): Pfam Name: KNOX1 Pfam Description: KNOX1 domain
  misc_feature (270)..(291): Pfam Name: ELK Pfam Description: ELK domain
  misc_feature: Public GI ID no. 1805617
  misc_feature: Bit score of 746.0 for HMM based on sequences of Figure 5
  misc_feature: Functional Homolog Of SEQ ID NO. 1797
MAFHGHLPHEMTMQALGADDAAVAAAAAAGGVGAGGAPAWMRYNDGSFLHLQTTSDSSASPSGAAAAAAAAAAAAAAGVQQWMGGGGGGEDAVAAAMGGGGEADAARCKAEILAHPLYEQLLSAHVACLRIATPVDQLPRIDAQLAQSQGVVAKYSALAAAAAGDDGRELDQFMTHYVLLLCSFKEQLQQHVRVHAMEAVMACWELEQNLQSLTGASPGEGTGATMSDGEDDQADSEANMYDPSLDGADNMGFGLPTESERSLMERVRQELKHELKQGYKEKLIDIREEILRKRRAGKLPGDTTSTLKAWWQSHAKWPYPTEEDKARLVQETGLQLKQINNWFINQRKRNWHSNPSSSTSVKTKRKRAGGIHPKQ

SEQ ID NO: 1827 - protein, 409 aa, Bryophyllum daigremontianum x Bryophyllum delagoense
  misc_feature (188)..(243): Pfam Name: KNOX2 Pfam Description: KNOX2 domain
  misc_feature (134)..(178): Pfam Name: KNOX1 Pfam Description: KNOX1 domain
  misc_feature (300)..(321): Pfam Name: ELK Pfam Description: ELK domain
  misc_feature: Public GI ID no. 167178668
  misc_feature: Bit score of 720.5 for HMM based on sequences of Figure 5
  misc_feature: Functional Homolog Of SEQ ID NO. 1797
MTYQSSGNHIQSEMDQLQQFSEQHRMSGNSVVSHHHHPHVAVAGGGGPTWLKTAVIQHQHNHSHNHYVGAVDNNTNFQLHLQTNSDSSNSPATTGANRWMSPEAKNDISRGGFRKEEEMMIVSEYGGVINWENARFKAEILSHPLYDQLLAAHVSCLRIATPVDQLPRIDAQLAQSQNLAAKYAAAVQGSCADDKDQLDQFMTQYVLLLSSFKDQLQQHVRVHAMEAVMACWDLEQALQNLTGVSPGEGTGATMSDDENDHADGETNMFDSGMDCSDSMGFGPLVPTDSERSLMERVRQELKHELKQGYKDKIVDIREEILRKRRAGKLPGDTTSHLKAWWRSHSKWPYPTEEDKARLVQETGLQLKQINNWFINQRKRNWHSNSSTATTSKSKRKSNAGETSNNERFR

SEQ ID NO: 1828 - protein, 412 aa, Bryophyllum daigremontianum x Bryophyllum delagoense
  misc_feature (190)..(245): Pfam Name: KNOX2 Pfam Description: KNOX2 domain
  misc_feature (137)..(181): Pfam Name: KNOX1 Pfam Description: KNOX1 domain
  misc_feature (302)..(323): Pfam Name: ELK Pfam Description: ELK domain
  misc_feature: Public GI ID no. 168199344
  misc_feature: Bit score of 714.0 for HMM based on sequences of Figure 5
  misc_feature: Functional Homolog Of SEQ ID NO. 1797
MAYQSSRNHMLSEMDQLQQFSERQMSENGSVVHNHPHAVVSGGGGPTWLSTAVIQQHSHHQYAAAADNNNSNNFQLHLQTNSDSSNSPATTGMNRWMSPEAKIGIGGVSGGGGSFRKEEEMAMIVSEYGGVINWEKARFKAEILSHPLYEQLLAAHVSCLRIATPVDKLPQIEAQLAQSHNLVAKYADAVQGSCVDDEELDQFMTQYVLLLNSFKEQLQQHVRVHAMEAVMACWELEQALQNLTGVSPGEGTGATMSDDEDYRAEGELNMFEGGTDCSDNMGFGPLVPTDSERSLMERVRQELKHELKQGYKDKIVDIREEILRKRRAGKLPGDTTSHLKAWWRSHSKWPYPTEEDKARLVQETGLQLKQINNWFINQRKRNWHSNSSTATASKSKRKSNAGTTSSNNEPFR

SEQ ID NO: 1829 - protein, 407 aa, Vitis vinifera
  misc_feature (186)..(241): Pfam Name: KNOX2 Pfam Description: KNOX2 domain
  misc_feature (140)..(179): Pfam Name: KNOX1 Pfam Description: KNOX1 domain
  misc_feature (298)..(319): Pfam Name: ELK Pfam Description: ELK domain
  misc_feature: Public GI ID no. 157339759
  misc_feature: Bit score of 683.2 for HMM based on sequences of Figure 5
  misc_feature: Functional Homolog Of SEQ ID NO. 1797
MAFHNQLSQEMALQHFTEQHLGENASVLRTILPDHLAQSSPEGAGKAPENQQQPVQLGTGPTWLNHAIQLRQQSQYSDNNFLNFLQRNTNDVVAAGDEVSNDSIIATAMSHESADLANNNSNNSNVKVNNSGNAVNWQNARQKAEILAHPLYEQLLSSHRRRWISCRGSMRSLRSRNMLFPSIRLSDMMLGDEKELDQFMTHYVLLLCSFKEQLQQHVRVHAMEAVMACWEIEQSLQSLTGVSPGEGTGATMSDDEEDQIDSDANLFDGSLEGADSMGFGPLVPTESERSLMERVRQELKHELKQGYKEKIVDIREEILRKRRAGKLPGDTTSVLKAWWQSHSKWPYPTEEDKAKLVQETGLQLKQINNWFINQRKRNWHSNPSTSTVLKSKRKSNAGENSSGDRFM

SEQ ID NO: 1830 - DNA, 969 bp, Populus balsamifera subsp. trichocarpa
  misc_feature: Ceres Annot ID no. 1531927
  misc_feature: Encodes the peptide sequence at SEQ ID NO. 1831
atggcttttcagctacaacaccaccacctctcagcctcgtcttccaccggtcccccatggctaagcaacgcggtcctccgtaggaacggcgactttataaccatcgaaaaaaccgaaaacaccaccaacaatggaagtgaagaggagttggtagattctgttagtgataactgggagagagctaaatgcaaagctgagatattagggcatcctttttatgaacaattattggctgcacacgtggcttgtttaaggattgcaacgccagttgaccagttggctaggattgatacacagttggctcggtctcaagatgttattgctaagtattctggtgttggttgtggccatgttgttgacgagaaagaacttgatcagttcatgacacattacgctctacttctctgttccttcaaagaccaattgcagcaacatgtccgtgttcatgctatggaggcagtaatggcttgctgggaacttgaacaatctctacaaagtttgactggcgtatctcctggggaaggcactggtgcaactatgtctgatgacgaagatgaccaagcagaaagtgataccaactttaatgatggaaaccttgatgggttggataccatgggatttggtcctctagtccccactgaaactgagaggtccttgatggagcgtgtaaggcaagaattgaagcacgagttcaaacaggattacaaagagaaaattgtggacattagagaggaaattttacgtaagagaagagcagggaaactgccaggtgataccacttcccacttaaaagcttggtggcaaacacattccaagtggccgtacccatctgaggaagacaaagcaagattggtgcaggaaactgggttgcagttaaagcagataaataattggttcataaaccaaaggaaaaggaactggcacagcagcccttcaggatctacctcgaagagcaaacgaaagaagtaa

SEQ ID NO: 1831 - protein, 322 aa, Populus balsamifera subsp. trichocarpa
  misc_feature (114)..(169): Pfam Name: KNOX2 Pfam Description: KNOX2 domain
  misc_feature (61)..(105): Pfam Name: KNOX1 Pfam Description: KNOX1 domain
  misc_feature (226)..(247): Pfam Name: ELK Pfam Description: ELK domain
  misc_feature: Ceres Annot ID no. 1531927
  misc_feature: Bit score of 633.5 for HMM based on sequences of Figure 5
  misc_feature: Functional Homolog Of SEQ ID NO. 1797
MAFQLQHHHLSASSSTGPPWLSNAVLRRNGDFITIEKTENTTNNGSEEELVDSVSDNWERAKCKAEILGHPFYEQLLAAHVACLRIATPVDQLARIDTQLARSQDVIAKYSGVGCGHVVDEKELDQFMTHYALLLCSFKDQLQQHVRVHAMEAVMACWELEQSLQSLTGVSPGEGTGATMSDDEDDQAESDTNFNDGNLDGLDTMGFGPLVPTETERSLMERVRQELKHEFKQDYKEKIVDIREEILRKRRAGKLPGDTTSHLKAWWQTHSKWPYPSEEDKARLVQETGLQLKQINNWFINQRKRNWHSSPSGSTSKSKRKK

SEQ ID NO: 1832 - DNA, 990 bp, Populus balsamifera subsp. trichocarpa
  misc_feature: Ceres Annot ID no. 1507861
  misc_feature: Encodes the peptide sequence at SEQ ID NO. 1833
atggcttttcaagaccaccaccatacaccacaagaaatgacttttcaactaccacaacaccaccacctctcagcctcaccttccaccggtcccacatggctaagcaacgcagtcctccgtagacacgacgacgttttaacccaaacccgcatcgaaaaaccagaaaacaacaccaataatggaagtgaagaggaattgatagattccgttagtgataattgggagagagctaaatgcaaagctgagatattagggcatcccttatatgaacagttattggctgctcacgtggcttgtttaaggattgccacgccagttgaccagttggctaggattgatacacagttggctcagtctcaagatgttgtggctaagtattctggtgttggtaggagccatgttgttgatgagaaagaacttgatcagttcatgacacattacgttatattgctctgttccttcaaagaccaattgcaacaacatgtccgtgttcatgctatggaggctgtaatggcatgctgggaacttgaacagtctctacaaagtttgacaggtgtatctccaggggaaggcactggtgcaactatgtctgatgatgatgacgaccaagcagatagtgatgccaacttgtatgatggaaatcttgatgggttggataccatgggatttggtcctctagttcccaccgagactgagaggtccttgatggagcgtgtaaggcaagaattgaagcatgagctcaaacaggattacaaggagaagattgtggatattagagaggaaattctacgtaagagaagagctggaaaactgccaggtgatactacgtccctcttaaaagcttggtggcaaacacattccaagtggccatacccaactgaaacaggtttgcaattaaagcagataaataattggttcataaaccaaaggaaaaggaactggcacagcagtccttcaggttctacttcgaagagcaaacgaaagaagtaa

SEQ ID NO: 1833 - protein, 329 aa, Populus balsamifera subsp. trichocarpa
  misc_feature (130)..(185): Pfam Name: KNOX2 Pfam Description: KNOX2 domain
  misc_feature (77)..(121): Pfam Name: KNOX1 Pfam Description: KNOX1 domain
  misc_feature (242)..(263): Pfam Name: ELK Pfam Description: ELK domain
  misc_feature: Ceres Annot ID no. 1507861
  misc_feature: Bit score of 629.6 for HMM based on sequences of Figure 5
  misc_feature: Functional Homolog Of SEQ ID NO. 1797
MAFQDHHHTPQEMTFQLPQHHHLSASPSTGPTWLSNAVLRRHDDVLTQTRIEKPENNTNNGSEEELIDSVSDNWERAKCKAEILGHPLYEQLLAAHVACLRIATPVDQLARIDTQLAQSQDVVAKYSGVGRSHVVDEKELDQFMTHYVILLCSFKDQLQQHVRVHAMEAVMACWELEQSLQSLTGVSPGEGTGATMSDDDDDQADSDANLYDGNLDGLDTMGFGPLVPTETERSLMERVRQELKHELKQDYKEKIVDIREEILRKRRAGKLPGDTTSLLKAWWQTHSKWPYPTETGLQLKQINNWFINQRKRNWHSSPSGSTSKSKRKK

SEQ ID NO: 1834 - protein, 383 aa, Arabidopsis thaliana
  misc_feature (167)..(222): Pfam Name: KNOX2 Pfam Description: KNOX2 domain
  misc_feature (116)..(160): Pfam Name: KNOX1 Pfam Description: KNOX1 domain
  misc_feature (281)..(302): Pfam Name: ELK Pfam Description: ELK domain
  misc_feature: Public GI ID no. 15236649
  misc_feature: Bit score of 632.3 for HMM based on sequences of Figure 5
  misc_feature: Functional Homolog Of SEQ ID NO. 1797
MSFNSSHLLPPQEDLPLRHFTDQSQQPPPQRHFSETPSLVTASFLNLPTTLTTADSDLAPPHRNGDNSVADTNPRWLSFHSEMQNTGEVRSEVIDGVNADGETILGVVGGEDWRSASYKAAILRHPMYEQLLAAHVACLRVATPVDQIPRIDAQLSQLHTVAAKYSTLGVVVDNKELDHFMSHYVVLLCSFKEQLQHHVCVHAMEAITACWEIEQSLQSLTGVSPSESNGKTMSDDEDDNQVESEVNMFDGSLDGSDCLMGFGPLVPTERERSLMERVKKELKHELKQGFKEKIVDIREEIMRKRRAGKLPGDTTSVLKEWWRTHSKWPYPTEEDKAKLVQETGLQLKQINNWFINQRKRNWNSNSSTSSTLTKNKRKRTGKS

SEQ ID NO: 1835 - protein, 436 aa, Ceratopteris richardii
  misc_feature (226)..(282): Pfam Name: KNOX2 Pfam Description: KNOX2 domain
  misc_feature (171)..(215): Pfam Name: KNOX1 Pfam Description: KNOX1 domain
  misc_feature (339)..(360): Pfam Name: ELK Pfam Description: ELK domain
  misc_feature: Public GI ID no. 11463943
  misc_feature: Bit score of 632.3 for HMM based on sequences of Figure 5
  misc_feature: Functional Homolog Of SEQ ID NO. 1797
MEDKSYVESKLGAPTWLSGAVQQQQVRASQQGTTNSAGSSFVNEATQQQQSHDTPRKWCGCEAGGQCVQCSFMHLSGGGAGGGGSSVAGNGIAMTANHNQQHSAAEAAGLLAIARSGGDLAQSGQGGRGNLLDLHSDTANSSDLVEGEHGGGEHGGGGHNQQDSQVLWQNARLKADITMHPLYDQLLAAHVACLRIATPVDQLPRIDAQIAQASQIVAKYAVLGQNNLLVGEEKDELDQFMAHYVLLLCTFKEQLQQHVKVHAMEAVMACWELEQSLLTLTGVSPGEGTGATMSDDDDDPAESDPSIYDPAFDTHDSGAFGPLIPTETERTLMERVRQELKNELKNGYKDRIVDVREEILRKRRAGKLPGDTTSVLKAWWHAHSKWPYPTEDEKARLVQETGLQLKQINNWFINQRKRNWHSNPSSTAAMKTKRKR

SEQ ID NO: 1836 - DNA, 1296 bp, Gossypium hirsutum
  misc_feature: Ceres Clone ID no. 1848387
  misc_feature: Encodes the peptide sequence at SEQ ID NO. 1837
cttcaaaactcttcttcttttatctctctcccccttatcttcttctttgctaaagaccatcgaacccttccctctcttttcagtttcccgatcaacacaacatggctttcgatggttttgtctccgacaataccaaagacatgcaaacccttgctctaaacgaaccaccgccatcagctgctgacatcgatcattgggaaagagctaaatgcaaggccgagataatggggcaccctatgtacgaccagttgctggaagctcatgtcgcctgtctacgtgttgctacgcctgttgaccagctcgctcagatcgatgctcagttagctaggtcccaagatgtgttggctaagtactcctcggccgctgctgccgccggttctgctgaagaagaactcgatcacttcatggcaaattatgttctattgcttggtttcttcaaagaccaattgcaacaacatgttcgtgttcatgcaatggaagcagttatggcttgttgggatcttgagcaatcacttcaaagtttaacaggtgtatctccaggtgaaggcactggtgcaaccatgtctgatgatgaagacgaagttgtagatagtgatgccagcttgtttgatggaagttttgatgggattgacagcatggggtttggccccctcgtcccatccgagactgagagatcactaatggagcgtgttaggcaagaactgaagcacgagctgaaacagggttacaaggagaaaattgtggacattagagaggaaattctacgtaagagacgagctggaaagctaccaggcgatacgacctcgtttttaaaagcttggtggcagtcacattccaaatggccttacccaactgaagaagacaaagcaaaattagtacaagaaacaggattgcagttaaagcagattaacaactggtttataaaccagagaaaaaggaattggcatagtaacccctctacctctctgaagagcaaacgtaagaggtaggctgcatccgtcgtgtttatgttcctcgatcgagatcaacttttctcgaaaaccattggccacttttgtttgggaaagaagtaagacaggttaaacctgcaatgaccacttattgtaaattaaaaaaaaagaaccctttgtagaaactccatgtttcgctgttgacctgttcatggtagtgggaatttgagcttgaatcagttctagtctgagtaatctggtgatagttaatgatatctgtataacaactatgttgctttaaattcttaatttagagtaagtgtgagcttagttggatgtttgctgc

SEQ ID NO: 1837 - protein, 295 aa, Gossypium hirsutum
  misc_feature (88)..(143): Pfam Name: KNOX2 Pfam Description: KNOX2 domain
  misc_feature (35)..(79): Pfam Name: KNOX1 Pfam Description: KNOX1 domain
  misc_feature (200)..(221): Pfam Name: ELK Pfam Description: ELK domain
  misc_feature: Ceres Clone ID no. 1848387
  misc_feature: Bit score of 558.7 for HMM based on sequences of Figure 5
  misc_feature: Functional Homolog Of SEQ ID NO. 1797
MAFDGFVSDNTKDMQTLALNEPPPSAADIDHWERAKCKAEIMGHPMYDQLLEAHVACLRVATPVDQLAQIDAQLARSQDVLAKYSSAAAAAGSAEEELDHFMANYVLLLGFFKDQLQQHVRVHAMEAVMACWDLEQSLQSLTGVSPGEGTGATMSDDEDEVVDSDASLFDGSFDGIDSMGFGPLVPSETERSLMERVRQELKHELKQGYKEKIVDIREEILRKRRAGKLPGDTTSFLKAWWQSHSKWPYPTEEDKAKLVQETGLQLKQINNWFINQRKRNWHSNPSTSLKSKRKR

SEQ ID NO: 1838 - DNA, 1335 bp, Sorghum bicolor
  misc_feature: Ceres Annot ID no. 8671843
  misc_feature: Encodes the peptide sequence at SEQ ID NO. 1839
atgtcgttccactaccccgaccacgggctgtccatggacgctgccgcggcagcggcagcggctgcggcggccgcggcagccgcgtcgtcgccgaaccctagcggcttctcctcccccggcgtcgtcggcggggagagggagaaggcggccatcgcggcgcacccgctgtacgagcgcctcctggaggcgcacgtcgcctgcctccgcgtcgccacccccgtcgaccagctcccccgcatcgacgcgcagatcgccgcgcggcccccgccgctcgccgccgccgctggggccgcggccgcgggagggccgtccggcggcgaggagctcgacctcttcatgacacactatgtgttgctcctttgctcattcaaggaacaactccagcagcatgtacgtgttcatgcaatggaagcagtgatgggttgctgggagcttgaacaatctttgcaaagcctaacaggggcatctcctggtgaaggcactggggcaaccatgtccgatgatgaagataaccaggtggatagcgaagccaacatgtttgatggaaatgatggatcagatggtatgggctttggccccctaatactgacagagggtgaacgatccttagttgagcgtgtacggcaggagctgaagaatgagcttaagcagggttataaagaaaagcttgttgatatcagggaagagattatgcgcaagcgcagagctggtaaacttcctggagatactgcatctgtactgaaagcttggtggcaagctcattccaagtggccatacccaactgaggacgacaaggctcgactggtgcaggaaacgggattgcagctgaagcagatcaacaactggttcattaaccaacgcaaacggaactggcacagcaacccgacatcctcgggtgaaaagactaagaagaaaagatcagatgtgggagcatattttgctcggatatgccctgaggctcctttgcagtggcacccagaagatcaagcatggagacgcatgttttgtggtagtactttcgctggacacaggttgaggttgtccttaaggattactgtctttgaagtcgtcgaaatggcagtgagtgaagctcgtgagcgcaaagaaaacagccgaactgccgaagctggagtgctggaccaggtccgagcaggtggagtccaaaccacgcggcctcttactgggatgaagatcaccaattcaccaagcaagccaaaccatggatcgtattctatcccttccccgttcgtcgttttcggtgaaaaagacgcggccggagcgcagatttcttggtccccgtcccctgccgtctccgtcgcgtcgatatcatcatag

SEQ ID NO: 1839 - protein, 444 aa, Sorghum bicolor
  misc_feature (99)..(154): Pfam Name: KNOX2 Pfam Description: KNOX2 domain
  misc_feature (45)..(89): Pfam Name: KNOX1 Pfam Description: KNOX1 domain
  misc_feature (210)..(231): Pfam Name: ELK Pfam Description: ELK domain
  misc_feature: Ceres Annot ID no. 8671843
  misc_feature: Bit score of 532.2 for HMM based on sequences of Figure 5
  misc_feature: Functional Homolog Of SEQ ID NO. 1797
MSFHYPDHGLSMDAAAAAAAAAAAAAAASSPNPSGFSSPGVVGGEREKAAIAAHPLYERLLEAHVACLRVATPVDQLPRIDAQIAARPPPLAAAAGAAAAGGPSGGEELDLFMTHYVLLLCSFKEQLQQHVRVHAMEAVMGCWELEQSLQSLTGASPGEGTGATMSDDEDNQVDSEANMFDGNDGSDGMGFGPLILTEGERSLVERVRQELKNELKQGYKEKLVDIREEIMRKRRAGKLPGDTASVLKAWWQAHSKWPYPTEDDKARLVQETGLQLKQINNWFINQRKRNWHSNPTSSGEKTKKKRSDVGAYFARICPEAPLQWHPEDQAWRRMFCGSTFAGHRLRLSLRITVFEVVEMAVSEARERKENSRTAEAGVLDQVRAGGVQTTRPLTGMKITNSPSKPNHGSYSIPSPFVVFGEKDAAGAQISWSPSPAVSVASISS

SEQ ID NO: 1840 - DNA, 945 bp, Sorghum bicolor
  misc_feature: Ceres Annot ID no. 8743760
  misc_feature: Encodes the peptide sequence at SEQ ID NO. 1841
atggcgttcaactaccacgaccacgcgctggcgatggaccccgccgcggttggggccgcggccgcgaaccctagctttgtctccgggggtggtggtggtggtggcgtggccggtggggggcccggctgggagagggagaaggcggccatcgcggcgcacccgctgtacgagcgcctgctcgaggcgcacgtcgcctgcctccgcgtcgccacccccgtcgaccagctcccgcgcatcgacgcccagatagcggccaggcccccgcccatggcggccgccgcagcggcggcggcggcgggcggagcgcactcgggaggcgaggagctcgacctcttcatgacgcattatgtgctgctactctgttcattcaaggagcaactccagcagcatgtgcgtgttcatgcgatggaagcagtcatggcttgctgggagcttgaacaaactttacaaagccttacaggggcatctcctggtgagggcactggggcaactatgtctgatgatgaagacaatcaggtagacagtgagagcaacatgtttgatggaaatgaggggtcagatggaatgggatttggaccattaatgttgactgagggtgagagatccttagttgagcgtgtccggcaggagctaaagcatgagcttaagcaggggtacagagacaaacttgtggatattcgggaagagatattgcggaagcgaagagctgggaaactccctggcgacactgcttctaccttaaaagcttggtggcaagctcattctaagtggccatacccaactgaggaagacaaggctcgactggtgcaggaaacagggctacaactgaagcagatcaataactggtttatcaaccagcgtaagcggaactggcacaacaatccggcgtcatcctcgtcggacaaaagcaagagaaaaaggtacgatcacaagaaactagactaa

SEQ ID NO: 1841 - protein, 314 aa, Sorghum bicolor
  misc_feature (99)..(154): Pfam Name: KNOX2 Pfam Description: KNOX2 domain
  misc_feature (44)..(88): Pfam Name: KNOX1 Pfam Description: KNOX1 domain
  misc_feature (210)..(231): Pfam Name: ELK Pfam Description: ELK domain
  misc_feature: Ceres Annot ID no. 8743760
  misc_feature: Bit score of 539.3 for HMM based on sequences of Figure 5
  misc_feature: Functional Homolog Of SEQ ID NO. 1797
MAFNYHDHALAMDPAAVGAAAANPSFVSGGGGGGGVAGGGPGWEREKAAIAAHPLYERLLEAHVACLRVATPVDQLPRIDAQIAARPPPMAAAAAAAAAGGAHSGGEELDLFMTHYVLLLCSFKEQLQQHVRVHAMEAVMACWELEQTLQSLTGASPGEGTGATMSDDEDNQVDSESNMFDGNEGSDGMGFGPLMLTEGERSLVERVRQELKHELKQGYRDKLVDIREEILRKRRAGKLPGDTASTLKAWWQAHSKWPYPTEEDKARLVQETGLQLKQINNWFINQRKRNWHNNPASSSSDKSKRKRYDHKKLD

SEQ ID NO: 1842 - protein, 317 aa, Oryza sativa subsp. japonica
  misc_feature (103)..(158): Pfam Name: KNOX2 Pfam Description: KNOX2 domain
  misc_feature (45)..(89): Pfam Name: KNOX1 Pfam Description: KNOX1 domain
  misc_feature (214)..(235): Pfam Name: ELK Pfam Description: ELK domain
  misc_feature: Public GI ID no. 115469202
  misc_feature: Bit score of 530.1 for HMM based on sequences of Figure 5
  misc_feature: Functional Homolog Of SEQ ID NO. 1797
MAFHYQDHALAMDAAAAAAETGGHHHPGFVGAGGVVGGGGGGGWEREKAAIAAHPLYERLLEAHVACLRVATPVDQLPRIDAQIAARPPPLAAATAAAAAAAAGGAPSGGEELDLFMTHYVLLLCSFKEQLQQHVRVHAMEAVMACWELEQTLQSLTGASPREGSGATMSDDEDNQVDSESNMFDGNDGSDGMGFGPLMLTEGERSLVERVRQELKHELKQGYREKLVDIREEILRKRRAGKLPGDTASTLKAWWQAHSKWPYPTEEDKARLVQETGLQLKQINNWFINQRKRNWHSNPASSSSDKSKRKRYRVVDF

SEQ ID NO: 1843 - DNA, 1402 bp, Panicum virgatum
  misc_feature: Ceres Clone ID no. 1816333
  misc_feature: Encodes the peptide sequence at SEQ ID NO. 1844
gtctcccgtggtcctcctccactccacctccttctccgccttccccctcgagctcgcctcgcctcgaccaggctccgcagccctcgcccgcagctggccggctctctcgcgtccagccgggagccgggctctggggggatggcgttccactacccggaccacgcgctggcgatggaccccgcggccggggtcggcgcggcggtcaaccctagcttcgtgtcccccggcggcggcggggtcgggggaggagggggcgggtgggagcgggagaaggcggccatcgcggcgcacccgctgtacgagcgcctgctcgaggcgcacgtcgcctgcctccgcgtcgccacccccgtcgaccagctcccgcgcatcgacgcgcagatagccgcgaggcccccgcccatggcggcggccgcggccgcggccgctgcggcggcgggcggggcgcagtcgggaggcgaggagctcgacctcttcatgacgcattacgtattgctcctctgttcattcaaggaacaactccagcagcatgtgcgtgttcatgcaatggaagcagtgatggcttgctgggagcttgaacaaactttacaaagccttactggggcatctcctggtgaaggcactcgggctactatgtctgatgatgaagacaatcaggtagacagcgagagcaacatatttgatggaaatgaggggtcagatggaatgggattcggtcccttaatgttgactgagggtgagagatccttagttgagcgtgtgcggcaggagctaaagcatgagcttaagcagggatacagagaaaaacttgtggatattagggaagagataatgcggaagcgaagggctggaaaactccctggggacacagcttctacgttgaaagcctggtggcaagctcattctaaatggccatacccaactgaggaagacaaggctagactggtacaggaaacagggctgcaactaaagcagatcaacaactggttcatcaaccagcgtaagaggaactggcacagcaatccggcatcatcctcatccgacaaaagcaagagaaaaaggtgatggcaatgctgagcaatcctggtagagcgtggtcggagaagaattatatgtaaataacgcgtctactgagaagaatggcaccatatttgttgcgtgggaaacaaccattcgagtgggtgtttcctgagccccatattcatacaaagatatcacacgatgtaataatgttgtaagtagtcatgtaaactaaataatttgtatagcgaatcactagagactagcattcatgtttggtattgtatagttttaattgattgagcgtactgtctctgtataactctacgatttaaatgtatttgactagcactcgatattgtattttgtattagtatgtcatgcg

SEQ ID NO: 1844 - protein, 307 aa, Panicum virgatum
  misc_feature (99)..(154): Pfam Name: KNOX2 Pfam Description: KNOX2 domain
  misc_feature (42)..(86): Pfam Name: KNOX1 Pfam Description: KNOX1 domain
  misc_feature (210)..(231): Pfam Name: ELK Pfam Description: ELK domain
  misc_feature: Ceres Clone ID no. 1816333
  misc_feature: Bit score of 516.6 for HMM based on sequences of Figure 5
  misc_feature: Functional Homolog Of SEQ ID NO. 1797
MAFHYPDHALAMDPAAGVGAAVNPSFVSPGGGGVGGGGGGWEREKAAIAAHPLYERLLEAHVACLRVATPVDQLPRIDAQIAARPPPMAAAAAAAAAAAGGAQSGGEELDLFMTHYVLLLCSFKEQLQQHVRVHAMEAVMACWELEQTLQSLTGASPGEGTRATMSDDEDNQVDSESNIFDGNEGSDGMGFGPLMLTEGERSLVERVRQELKHELKQGYREKLVDIREEIMRKRRAGKLPGDTASTLKAWWQAHSKWPYPTEEDKARLVQETGLQLKQINNWFINQRKRNWHSNPASSSSDKSKRKR

SEQ ID NO: 1845 - protein, 304 aa, Zea mays
  misc_feature (97)..(152): Pfam Name: KNOX2 Pfam Description: KNOX2 domain
  misc_feature (38)..(82): Pfam Name: KNOX1 Pfam Description: KNOX1 domain
  misc_feature (208)..(229): Pfam Name: ELK Pfam Description: ELK domain
  misc_feature: Public GI ID no. 162458143
  misc_feature: Bit score of 502.7 for HMM based on sequences of Figure 5
  misc_feature: Functional Homolog Of SEQ ID NO. 1797
MSFHYHDHGLSMDAAAAAAAAAASSPNPSGFSPGIGGEREKAAIAAHPLYERLLEAHVACLRVATPVDQLPRIDAQIAARPPPLAAAAGAAAAGAAAAGGPSGGEELDLFMTHYVLLLCSFKEQLQQHVRVHAMEAVMGCWELEQSLQSLTGASPGEGTGGTMSDDEDNQVDSEANMFDGNDGSDGMGFGPLILTEGERSLVERVRKELKNELKQGYKEKLVDIREEIMRKRRAGKLPGDTASVLKAWWQAHSKWPYPTEDDKARLVQETGLQLKQINNWFINQRKRNWHSNPTSSAEKTKKKR

SEQ ID NO: 1846 - DNA, 1358 bp, Zea mays
  misc_feature: Ceres Clone ID no. 218346
  misc_feature: Encodes the peptide sequence at SEQ ID NO. 1847
aaaccaacccacgccatcatcatccgtcaatccatccatccatccgcttgtccctaccacctccaccaaccaaaacccccaaccgccgaggtcaccggcgactccgtcctcgccgcgccgcgccgtgaggatgtcgttccactaccacgaccacgggctgtccatggacgccgcggcagcggcggccgccgccgcgtcgtcgccgaaccctagcggcttctcccccggcatcggcggggaaagggagaaggcggccatcgcggcgcacccgctgtacgagcgcctcctggaggcgcacgtcgcctgcctacgcgtcgccacccccgtcgaccagctcccccgcatcgacgcgcagatcgccgcgcgccccccgccgctcgccgcggccgccggggccgcggccgcgggaggcccgtccggcggggaggagctcgacctcttcatgacgcactatgtattgctcctttgctcattcaaggagcagttgcagcagcatgtacgtgttcatgcaatggaagcagtgatgggttgctgggagcttgaacaatctttacaaagcctaacaggggcatctccgggtgaaggcactggaggaaccatgtctgacgatgaagataaccaggtggatagtgaagccaacatgttcgatggaaatgatggatcagacggtatgggctttggccccctaatactgacagagggtgaacggtccttagttgagcgtgtacggaaggagctgaagaacgagcttaagcagggttacaaggaaaagcttgtcgatatcagggaagagatcatgcgcaaacgcagggctgggaaacttcctggagataccgcatctgtactgaaagcttggtggcaagctcattcgaagtggccgtacccaactgaagacgacaaggccagactggtgcaggaaacggggttgcagctaaagcagatcaacaactggttcattaaccaacgcaaacggaactggcacagcaacccaacatcctcggctgaaaagaccaagaagaaaaggtgatgatggcccagagcaatcttggcaaaaagctagacatgtccactatactttattatggcgaagtacattctccctcacttcgtaggcaagagggaaaggtatcttgggtgacttgagtggccacctaatgcgcaagtttgaccacgtgtggggctggggttgggtagtgacctcagcagtatagcattcgctaacgtgatgtgggaatcacgtgttgcagtagaaccggcgagcgggaggggggtaatttatgttgtattgtaattactatatatgaaagacggacacaaacgtcgctcctcgtacgtccacgtcgtcacttttttcagcg

SEQ ID NO: 1847 - protein, 298 aa, Zea mays
  misc_feature (91)..(146): Pfam Name: KNOX2 Pfam Description: KNOX2 domain
  misc_feature (37)..(81): Pfam Name: KNOX1 Pfam Description: KNOX1 domain
  misc_feature (202)..(223): Pfam Name: ELK Pfam Description: ELK domain
  misc_feature: Ceres Clone ID no. 218346
  misc_feature: Bit score of 507.5 for HMM based on sequences of Figure 5
  misc_feature: Functional Homolog Of SEQ ID NO. 1797
MSFHYHDHGLSMDAAAAAAAAASSPNPSGFSPGIGGEREKAAIAAHPLYERLLEAHVACLRVATPVDQLPRIDAQIAARPPPLAAAAGAAAAGGPSGGEELDLFMTHYVLLLCSFKEQLQQHVRVHAMEAVMGCWELEQSLQSLTGASPGEGTGGTMSDDEDNQVDSEANMFDGNDGSDGMGFGPLILTEGERSLVERVRKELKNELKQGYKEKLVDIREEIMRKRRAGKLPGDTASVLKAWWQAHSKWPYPTEDDKARLVQETGLQLKQINNWFINQRKRNWHSNPTSSAEKTKKKR

SEQ ID NO: 1848 - DNA, 1207 bp, Gossypium hirsutum
  misc_feature: Ceres Clone ID no. 1834447
  misc_feature: Encodes the peptide sequence at SEQ ID NO. 1849
tgttttttctctcttcatagctacatctctctctcctttgatcttcttctttaccaaaacttaaacctcttcaaacatggcttttgatggttttgtctcccaccatagtgaacacatgcaaacccttgcttttaaccaaccctcttcacctcccaacttcgacccagctaaatgcaagaccgagataatagggcatcccatgtacccccagttattggaaggccacgtggcttgtctacgtgttgccacgcctgttgaccagctccctaagatctatgctcagttggctaggtcccaatatgtctcggctaagtactcatcatcacctactgctggggctgctcaccatgaactcgatcacttcatggcaaattatgtgctattgcttggtttctttaaagaccaattgcagcaacatgttcgtgttcatgcaatggaagcggttatgtcttgttgggatcttgagcaatcacttcaaagtttaactggtgtatctccaggtgaaggcacaggtgcaacaatgtctgatgatgaagatgaagttgtagataatgatcacggtttgtttgatggaagcttcgatgggatcgacagcatgggatttggccctcttgtcccatcagaaactgagagatccttaatggaacatgttaggcaagaacttaagcacgaattgaaacagggttacaaagagaaaattgtggacgttagagaggaaattctgcgcaagagaagagctggaaagctacctggtgacaccacctcgattttaaaagcatggtggcagtcacattccaaatggccttacccaacagaagaagacaaagcaagattagcacaggaaacaggattacagttgaagcagattaataattggtttataaaccaaagaaaaaggaattggcataataccccctccacttctctgaagagcaaacgtgagaagtaggctgctaatggatgtatgtatatgtgtcttgatgaaaatgagcttttcactagaacatttgtcgattttaatttggaaaagaagtatgcaggttaaaccagtgatgaagccttaatgtaagcaaaagaaaagccctctgcatagcattaatatagctttgctagatggttctgtaatcctttggctcatgctttcctatgtatgtacaagaatgacttcagtaagtcgtgggtttataatgtaattatctacttggtc

SEQ ID NO: 1849 - protein, 290 aa, Gossypium hirsutum
  misc_feature (83)..(138): Pfam Name: KNOX2 Pfam Description: KNOX2 domain
  misc_feature (31)..(75): Pfam Name: KNOX1 Pfam Description: KNOX1 domain
  misc_feature (195)..(216): Pfam Name: ELK Pfam Description: ELK domain
  misc_feature: Ceres Clone ID no. 1834447
  misc_feature: Bit score of 507.7 for HMM based on sequences of Figure 5
  misc_feature: Functional Homolog Of SEQ ID NO. 1797
MAFDGFVSHHSEHMQTLAFNQPSSPPNFDPAKCKTEIIGHPMYPQLLEGHVACLRVATPVDQLPKIYAQLARSQYVSAKYSSSPTAGAAHHELDHFMANYVLLLGFFKDQLQQHVRVHAMEAVMSCWDLEQSLQSLTGVSPGEGTGATMSDDEDEVVDNDHGLFDGSFDGIDSMGFGPLVPSETERSLMEHVRQELKHELKQGYKEKIVDVREEILRKRRAGKLPGDTTSILKAWWQSHSKWPYPTEEDKARLAQETGLQLKQINNWFINQRKRNWHNTPSTSLKSKREK

SEQ ID NO: 1850 - protein, 340 aa, Hordeum vulgare
  misc_feature (92)..(147): Pfam Name: KNOX2 Pfam Description: KNOX2 domain
  misc_feature (43)..(87): Pfam Name: KNOX1 Pfam Description: KNOX1 domain
  misc_feature (201)..(222): Pfam Name: ELK Pfam Description: ELK domain
  misc_feature: Public GI ID no. 33333542
  misc_feature: Bit score of 506.8 for HMM based on sequences of Figure 5
  misc_feature: Functional Homolog Of SEQ ID NO. 1797
  misc_feature (309)..(309): Xaa is any aa, unknown, or other
  misc_feature (312)..(312): Xaa is any aa, unknown, or other
  misc_feature (313)..(313): Xaa is any aa, unknown, or other
MAYQYHHHQDHALGMDAAAAAAAGGNPGGGGFAPGLSAGGAWEGEKAAVEAHPLYERLLEAHVACLRVATPVDQLPRIDAQIAARAPPPMPPASALSGGEELDLFMTHYVLLLCSFKEQLQQHVRVHAMEAVMACWELEQTLQSLTGASPGEGTGATMSDDEDNPVDSESNMFDGNDVSDGMGFGMLTEGERSLVERVRQELKHELKQGYREKLVDIREEILRKRRAGKLPGDTASTLKAWWQAHAKWPYPTEEDKARLVQETGLQLKQINNWFINQRKRNWHSNPTSSSSDKSKRKRYNSRLKTPFSXARXXSLSLSLSPGWISFPLHSQKQNKKEQCR

SEQ ID NO: 1851 - DNA, 1227 bp, Arabidopsis thaliana
  misc_feature: Ceres Clone ID no. 106887
  misc_feature: Encodes the peptide sequence at SEQ ID NO. 1852
ctctctctctctttttttctaatcatacgaacacaatctgcttcaagaattagggttttgatcagacacaaaaaagtatctctctccgtagttttgtgtcaaggttatgcaagaagcggcgctaggtatgatgggagccagcgtaggcggagatggagacgccgcggtcgtggcggagcagaatagacagttgaaaggtgagatagcgacacatccgatgtatgagcaattattagccgcacacgtggcatgtctaagagtagctactccaatagatcaacttccgatcattgaagctcagctttctcaatctcatcatcttctccgttcttacgcttccacggccgttggataccatcatgatcgtcacgagctcgataatttcttggcacaatatgtaatggtgttgtgtagcttcaaagaacagctgcaacagcacgtgagggttcatgccgtcgaagctgttatggcttgccgtgaaattgagaacaaccttcattctcttacaggagcaactttaggagaagggtcgggtgcgactatgtcggaggatgaggatgatcttccgatggatttctcgtcagataattccggcgttgattttagcggcggccacgatatgacgggatttggtccgttgctaccgactgaatcggaaaaatcccttatggaaagagtcagacaagaactcaaactagaactcaaacagggttttaaatcgagaattgaagatgtgagagaagagataatgaggaaaagaagggctgggaagttgccaggagacacaactactgtcttgaaaaattggtggcaacaacattgcaagtggccttaccctacggaagatgacaaggcaaaattggtggaggagacaggattgcagttgaagcaaatcaacaattggttcattaaccagcgcaagaggaattggcacaacaactctcactccctcacttccttgaagtccaagcgcaaacactaatctcttcttactatattagttactacctctacatatattcatactaattacactgcttaagtcatgcatgatacatacgtaattcatgttactgataataacgaggtgtgatcattcattaatatcatgtacttacttagcttattagatccaccgactactatatgatattgtgcgttgcgtgattactgtctgttactagattgtaattcattttgttttgtattgtgcattcaaatttatct

SEQ ID NO: 1852 - protein, 291 aa, Arabidopsis thaliana
  misc_feature (80)..(135): Pfam Name: KNOX2 Pfam Description: KNOX2 domain
  misc_feature (27)..(71): Pfam Name: KNOX1 Pfam Description: KNOX1 domain
  misc_feature (194)..(215): Pfam Name: ELK Pfam Description: ELK domain
  misc_feature: Ceres Clone ID no. 106887
  misc_feature: Bit score of 399.5 for HMM based on sequences of Figure 5
  misc_feature: Functional Homolog Of SEQ ID NO. 1797
MQEAALGMMGASVGGDGDAAVVAEQNRQLKGEIATHPMYEQLLAAHVACLRVATPIDQLPIIEAQLSQSHHLLRSYASTAVGYHHDRHELDNFLAQYVMVLCSFKEQLQQHVRVHAVEAVMACREIENNLHSLTGATLGEGSGATMSEDEDDLPMDFSSDNSGVDFSGGHDMTGFGPLLPTESEKSLMERVRQELKLELKQGFKSRIEDVREEIMRKRRAGKLPGDTTTVLKNWWQQHCKWPYPTEDDKAKLVEETGLQLKQINNWFINQRKRNWHNNSHSLTSLKSKRKH

SEQ ID NO: 1853 - protein, 283 aa, Arabidopsis thaliana
  misc_feature (72)..(127): Pfam Name: KNOX2 Pfam Description: KNOX2 domain
  misc_feature (19)..(63): Pfam Name: KNOX1 Pfam Description: KNOX1 domain
  misc_feature (186)..(207): Pfam Name: ELK Pfam Description: ELK domain
  misc_feature: Public GI ID no. 21618231
  misc_feature: Bit score of 388.7 for HMM based on sequences of Figure 5
  misc_feature: Functional Homolog Of SEQ ID NO. 1797
MGASVGGDGDAAVVAEQNRQLKGEIATHPMYEQLLAAHVACLRVATPIDQLPIIEAQLSQSHHLLRSYASTAVGYHHDRHELDNFLAQYVMVLCSFKEQLQQHVRVHAVEAVMACREIENNLHSLTGATLGEGSGATMSEDEDDLPMDFSSDNSGVDFSGGHDMTGFGPLLPTESEKSLMERVRQELKLELKQGFKSRIEDVREEIMRKRRAGKLPGDTTTVLKNWWQQHCKWPYPTEDDKAKLVEETGLQLKQINNWFINQRKRNWHNNSHSLTSLKSKRKH

SEQ ID NO: 1854 - protein, 292 aa, Medicago truncatula
  misc_feature (80)..(135): Pfam Name: KNOX2 Pfam Description: KNOX2 domain
  misc_feature (25)..(69): Pfam Name: KNOX1 Pfam Description: KNOX1 domain
  misc_feature (195)..(216): Pfam Name: ELK Pfam Description: ELK domain
  misc_feature: Public GI ID no. 132424657
  misc_feature: Bit score of 422.7 for HMM based on sequences of Figure 5
  misc_feature: Functional Homolog Of SEQ ID NO. 1797
MQEPSLGMMQGSGGGYGGDGGGENRQLKAEIATHPLYEQLLSAHVACLRVATPIDQLPLIDAQLSQSHHLLRSYISQQTHSLSPHDRQQLDNFLAQYLIVLCTFKEQLQQHVRVHAVEAVMACRDIENTLQALTGVSLGEGSGATMSDDEDEQLQMDYGLDNQSSGGGGDHDMMGLGPLLPTESERSLMERVRQELKIELKQGFKSRIEDVREEILRKRRAGKLPGDTTSVLKNWWQQHAKWPYPTEDDKAKLVEETGLQLKQINNWFINQRKRNWHSNSQSVTSLKSKRKR

SEQ ID NO: 1855 - protein, 284 aa, Arabidopsis thaliana
  misc_feature (73)..(128): Pfam Name: KNOX2 Pfam Description: KNOX2 domain
  misc_feature (20)..(64): Pfam Name: KNOX1 Pfam Description: KNOX1 domain
  misc_feature (187)..(208): Pfam Name: ELK Pfam Description: ELK domain
  misc_feature: Public GI ID no. 26451690
  misc_feature: Bit score of 393.7 for HMM based on sequences of Figure 5
  misc_feature: Functional Homolog Of SEQ ID NO. 1797
MMGATVGGDGDTAVVAEQNRQLKGEIATHPMYEQLLAAHVACLRVATPIDQLPIIEAQLSQSHHLLRSYASTAVGYHHDRHELDNFLAQYVMVLCSFKEQLQQHVRVHAVEAVMACREIENNLHSLTGATLGEGSGATMSEDEDDLPMDFSSDNSGVDFSGGHDMTGFGPLLPTESERSLMERVRQELKLELKQGFKSRIEDVREEIMRKRRAGKLPGDTTTVLKNWWQQHCKWPYPTEDDKAKLVEETGLQLKQINNWFINQRKRNWHNNSHSLTSLKSKRKH

SEQ ID NO: 1856 - protein, 283 aa, Arabidopsis thaliana
  misc_feature (72)..(127): Pfam Name: KNOX2 Pfam Description: KNOX2 domain
  misc_feature (19)..(63): Pfam Name: KNOX1 Pfam Description: KNOX1 domain
  misc_feature (186)..(207): Pfam Name: ELK Pfam Description: ELK domain
  misc_feature: Public GI ID no. 8493589
  misc_feature: Bit score of 391.9 for HMM based on sequences of Figure 5
  misc_feature: Functional Homolog Of SEQ ID NO. 1797
MGATVGGDGDTAVVAEQNRQLKGEIATHPMYEQLLAAHVACLRVATPIDQLPIIEAQLSQSHHLLRSYASTAVGYHHDRHELDNFLAQYVMVLCSFKEQLQQHVRVHAVEAVMACREIENNLHSLTGATLGEGSGATMSEDEDDLPMDFSSDNSGVDFSGGHDMTGFGPLLPTESERSLMERVRQELKLELKQGFKSRIEDVREEIMRKRRAGKLPGDTTTVLKNWWQQHCKWPYPTEDDKAKLVEETGLQLKQINNWFINQRKRNWHNNSHSLTSLKSKRKH

SEQ ID NO: 1857 - protein, 291 aa, Arabidopsis thaliana
  misc_feature (80)..(135): Pfam Name: KNOX2 Pfam Description: KNOX2 domain
  misc_feature (27)..(71): Pfam Name: KNOX1 Pfam Description: KNOX1 domain
  misc_feature (194)..(215): Pfam Name: ELK Pfam Description: ELK domain
  misc_feature: Public GI ID no. 18407708
  misc_feature: Bit score of 402.1 for HMM based on sequences of Figure 5
  misc_feature: Functional Homolog Of SEQ ID NO. 1797
MQEAALGMMGATVGGDGDTAVVAEQNRQLKGEIATHPMYEQLLAAHVACLRVATPIDQLPIIEAQLSQSHHLLRSYASTAVGYHHDRHELDNFLAQYVMVLCSFKEQLQQHVRVHAVEAVMACREIENNLHSLTGATLGEGSGATMSEDEDDLPMDFSSDNSGVDFSGGHDMTGFGPLLPTESERSLMERVRQELKLELKQGFKSRIEDVREEIMRKRRAGKLPGDTTTVLKNWWQQHCKWPYPTEDDKAKLVEETGLQLKQINNWFINQRKRNWHNNSHSLTSLKSKRKH

SEQ ID NO: 1858 - protein, 363 aa, Selaginella kraussiana
  misc_feature (156)..(211): Pfam Name: KNOX2 Pfam Description: KNOX2 domain
  misc_feature (100)..(144): Pfam Name: KNOX1 Pfam Description: KNOX1 domain
  misc_feature (264)..(285): Pfam Name: ELK Pfam Description: ELK domain
  misc_feature: Public GI ID no. 58011289
  misc_feature: Bit score of 522.0 for HMM based on sequences of Figure 5
  misc_feature: Functional Homolog Of SEQ ID NO. 1797
  misc_feature (282)..(282): Xaa is any aa, unknown, or other
MGGDQEQQARQHNNDDREAAAKQMPTWLLSSRQQPPPSAQCDEEAWSSHHHHQQQQASSSSYENPRTTTQGLLQDDDKAEHGLGVGSGDMVEECARMQSAKLKADIVTHPLYEQLLEAHVSCLRIATPVDQLGKIDGQIAQCHQLIAKYYILANHQLLCGNSKDELDQFMAHYVMLLRSFKDQLQHHVRVHAKEAVMACWELEQSLLGLTGVSPGEGSGATMSDDETTEQEQQCESDLWQDNLGFGPLIPTETERTLMERVRQELKHELKHGYRARIVDVRXEILRKRRAGKLPGDTTSVLKAWWHAHSKWPYPTEDEKARLVQETGLELKQINNWFINQRKRNWHHHPSSSASTTSKLKCKS

SEQ ID NO: 1859 - protein, 533 aa, Physcomitrella patens subsp. patens
  misc_feature (267)..(311): Pfam Name: KNOX1 Pfam Description: KNOX1 domain
  misc_feature (322)..(379): Pfam Name: KNOX2 Pfam Description: KNOX2 domain
  misc_feature (435)..(456): Pfam Name: ELK Pfam Description: ELK domain
  misc_feature: Public GI ID no. 168040482
  misc_feature: Bit score of 525.2 for HMM based on sequences of Figure 5
  misc_feature: Functional Homolog Of SEQ ID NO. 1797
MMAFNNLSHDVSLQQFPELWESSRFSQRHDTLDADQHTQGFDDTQFPKEPLEPNTNLHQVAMEIQPNATIIGDESSRGRNPVVNESDDREDDNHLLGTEDGIVKNGRTWLNSALLREQNQASEDRSGYGDHNAAERWCPVCSASGSQSCMCGMPMHAGDSSTISFPNQSTYTHWLSMQGANMLASQHRTGGEVDAKAAGFTVSPQSTKMATELNLSPAGHGRDNHALFTDPRHSVAQGGSRYAEDYERTEHQTDWEGATQKMEWEQARDKFLIVAHPLYPDLLNAHASCLRVGTPVDQLPHIEAQLTQARHVTSKYSVLHPDHLEITEDEKTELDQFMAQYIMLLCSFKDHLQQHVYYDVTEAMMSCWELEQALHNLTGVSAGESTGATMSEEDEDYDSDYGAYDAHMDPQDSGGFGPLVPTESERTLMERVRQELKYELKQGYRARIVDVREEILRKRRAGKLPEGTTTVLKAWWQAHSKWPYPTEDEKERLIQETGLELKQVNNWFINQRKRNWHSNPLSSSSELKSKRKK

SEQ ID NO: 1860 - DNA, 1299 bp, Gossypium hirsutum
  misc_feature: Ceres Clone ID no. 1923949
  misc_feature: Encodes the peptide sequence at SEQ ID NO. 1861
actctcaagcacaaagagttctttctttctttccttctttctttcccttgtggtcgtttatatatatatatatcaaaaaacctttctttttctcaatagaaaaaaaacccactttttttgttgttgttgttgggtaaaagccaaaaaaaaaaaaatgcaagaaccaggtgggttaggtatgatgagtagtggtggtggaagtgaaacgattggagggttaagtagcggtgaagtgtcagttaccggtgaccagaactgtcatctcaaggcggagatagctacacatccactttatgaacaacttttagcagctcatgtgtcttgtcttcgtgttgctacaccgattgatcagttgtctttgattgatgcacagttagcggagtcgcataacattttgagatcctatgcttcacaacaacaaggtcactctttatcaccacatgaaagacaagagcttgataacttcttggcacaatatttgatagtgttgtgtactttcaaagaacagcttcaacaacatgtcagagtccatgccgttgaagctgtcatggcttgccgtgaaattgaaaataacttacaagcgctcactggagtaaccttgggtgaaggcacaggtgcaacaatgtcagacgatgaggatgaacttcaaatggacttctccatggatcaatctgggcccgaaggccatgatttaatgggttttggtcccttacttcccacagaatctgaaagatctttaatggagagggttcgtcaagagctcaagattgaactcaaacagggtttcaaatcaagaattgaggatgtgagggaggaaatattacgcaaaagaagggctggaaaattaccaggtgacaccactacagtgctcaagaactggtggcaacagcactcaaagtggccatacccaactgaagatgacaaggccaaacttgtggaggaaactggattgcaactaaagcaaatcaacaactggttcatcaaccaaaggaagcgcaattggcacagcaattctcagtcggtcacctccttgaagtccaagcggaaaaggtagacatcaagttccaacgtgttgatggtggtacagcttatcatgtaagctgcggggggggggggggaaataattatgggctaacattttgtgaaggggctgaaaagaatttgggaagtatgatgttttttctttaaaaaaaaaaaccaagtatatagggtgtgatgggaatgagttttatgttgcttactcctataagtgttttgattgaagtttctaacgaaataaacttgcattctttctatcag

SEQ ID NO: 1861 - protein, 299 aa, Gossypium hirsutum
  misc_feature (91)..(146): Pfam Name: KNOX2 Pfam Description: KNOX2 domain
  misc_feature (35)..(79): Pfam Name: KNOX1 Pfam Description: KNOX1 domain
  misc_feature (202)..(223): Pfam Name: ELK Pfam Description: ELK domain
  misc_feature: Ceres Clone ID no. 1923949
  misc_feature: Bit score of 435.2 for HMM based on sequences of Figure 5
  misc_feature: Functional Homolog Of SEQ ID NO. 1797
MQEPGGLGMMSSGGGSETIGGLSSGEVSVTGDQNCHLKAEIATHPLYEQLLAAHVSCLRVATPIDQLSLIDAQLAESHNILRSYASQQQGHSLSPHERQELDNFLAQYLIVLCTFKEQLQQHVRVHAVEAVMACREIENNLQALTGVTLGEGTGATMSDDEDELQMDFSMDQSGPEGHDLMGFGPLLPTESERSLMERVRQELKIELKQGFKSRIEDVREEILRKRRAGKLPGDTTTVLKNWWQQHSKWPYPTEDDKAKLVEETGLQLKQINNWFINQRKRNWHSNSQSVTSLKSKRKR

SEQ ID NO: 1862 - DNA, 924 bp, Populus balsamifera subsp. trichocarpa
  misc_feature: Ceres Annot ID no. 1478433
  misc_feature: Encodes the peptide sequence at SEQ ID NO. 1863
atggcttttcagctacaacaccaccacctctcagcctcgtcttccaccggtcccccatggctaagcaacgcggtcctccgtaggaacggcgactttataaccatcgaaaaaaccgaaaacaccaccaacaatggaagtgaagaggagttggtagattctgttagtgataactgggagagagctaaatgcaaagctgagatattagggcatcctttttatgaacaattattggctgcacacgtggcttgtttaaggattgcaacgccagttgaccagttggctaggattgatacacagttggctcggtctcaagatgttattgctaagtattctggtgttggttgtggccatgttgttgacgagaaagaacttgatcagttcatgacacattacgctctacttctctgttccttcaaagaccaattgcagcaacatgtccgtgttcatgctatggaggcagtaatggcttgctgggaacttgaacaatctctacaaagtttgactggcgtatctcctggggaaggcactggtgcaactatgtctgatgacgaagatgaccaagcagaaagtgataccaactttaatgatggaaaccttgatgggttggataccatgggatttggtcctctagtccccactgaaactgagaggtccttgatggagcgtgtaaggcaagaattgaagcacgagttcaaacaggattacaaagagaaaattgtggacattagagaggaaattttacgtaagagaagagcagggaaactgccaggtgataccacttcccacttaaaagcttggtggcaaacacattccaagtggccgtacccatctatcctcaaactgtttgctccaaattacttttcaggaggaagacaaagcaagattggtgcaggaaactgggttgcagttaaagcagataaataa

SEQ ID NO: 1863 - protein, 307 aa, Populus balsamifera subsp. trichocarpa
  misc_feature (114)..(169): Pfam Name: KNOX2 Pfam Description: KNOX2 domain
  misc_feature (61)..(105): Pfam Name: KNOX1 Pfam Description: KNOX1 domain
  misc_feature (226)..(247): Pfam Name: ELK Pfam Description: ELK domain
  misc_feature: Ceres Annot ID no. 1478433
  misc_feature: Bit score of 481.3 for HMM based on sequences of Figure 5
  misc_feature: Functional Homolog Of SEQ ID NO. 1797
MAFQLQHHHLSASSSTGPPWLSNAVLRRNGDFITIEKTENTTNNGSEEELVDSVSDNWERAKCKAEILGHPFYEQLLAAHVACLRIATPVDQLARIDTQLARSQDVIAKYSGVGCGHVVDEKELDQFMTHYALLLCSFKDQLQQHVRVHAMEAVMACWELEQSLQSLTGVSPGEGTGATMSDDEDDQAESDTNFNDGNLDGLDTMGFGPLVPTETERSLMERVRQELKHEFKQDYKEKIVDIREEILRKRRAGKLPGDTTSHLKAWWQTHSKWPYPSILKLFAPNYFSGGRQSKIGAGNWVAVKADK

SEQ ID NO: 1864 - DNA, 1682 bp, Gossypium hirsutum
  misc_feature: Ceres Clone ID no. 1920037
  misc_feature: Encodes the peptide sequence at SEQ ID NO. 1865
tcttccaaacagcctttcatagtaatgattccatggccttctccctcccttcatctttttctctgataaaaaatcttcttccaaaaactttgaaaactccccccacatatatattagtacatgctgctttgattattttcatgcttttgcttctttggctttctctgtgtatgtaaaagtaaaaaaacaccctgcaacatatatagcagtggagggtgcagaaaatcttgtctcagatcccgatatactcacaccattaacctcatataaacattatttctctttcttccaataagaacacacacacacactccacaatataggctctgatcaccttacttcactctcaactttcaaccacaagggtctttctttgtggtccttaactacttgattgatgatcatttctatatacatatatcaataccacctttttttcctttctttactccctttttcagttttcctctaatacgttatttatatatagggggggttgtggttccgagaaatgcaagaaccagggttaggtatgatgagtagtggtggtgggagtggtggaattggagggttaagcagcggagaagtgtcggtttccggtgagcagaaccgacagctgaaggctgagatagctgttcatccgctatatgagcagctattagcagctcatgtttcttgtctccgtgtggcaacgccaatcgaccagttgcctttgattgacgcacagttagcacaatctcataaccttcttagatcttatgcttcacagcatcatcaacatggtcattccctatcaccccatgaaagacaggagctcgacaacttcttggcacaatatttgatagttctgtgtactttcaaagaacagcttcaacaacatgtcagagtccatgccattgaagctgtcatggcttgccgtgaaatcgaaaataacttgcaagctcttactggagtcacattgggtgaaggaacaggtgcaacaatgtcagatgatgaggatgatatgcagatggacttctctttggatcaatccggcaccgatgggcacgatttaatgggttttggtcccttgattcctactgaatccgaaagatctttaatggagagggttcgccaggagctcaagattgaattgaaacagggttttaaatctagaatcgaagatgtgagggaggaaattttacggaaaagaagggctgggaaattaccaggtgacacaactacggtgctaaagaactggtggcaacaacactcaaagtggccatacccaactgaagatgataaggccaaacttgtggaggaaacaggattgcagctaaagcaaatcaacaactggttcatcaaccagaggaagcgtaactggcatagcaactctcaatctgtcacctctttaaagtcgaagcgaaaacggtagaggtgaataaattcaatgagaaatggagaagaagaaagtttgagcatgttgatgtcaacttcttgcggtaaatagctgtgggctaacattttgtgaaggtaaagtgggaagtgaggtggtttcaagaaacctaagtacatagattgagttttatatggcttacatgttgtttagtgtgtagagtggattcgagtttctaacaaagtaaacatactatcagacctcattattgtgatgtatgtctctaatttctaatattcgcttacgg

SEQ ID NO: 1865 - protein, 300 aa, Gossypium hirsutum
  misc_feature (92)..(147): Pfam Name: KNOX2 Pfam Description: KNOX2 domain
  misc_feature (34)..(78): Pfam Name: KNOX1 Pfam Description: KNOX1 domain
  misc_feature (203)..(224): Pfam Name: ELK Pfam Description: ELK domain
  misc_feature: Ceres Clone ID no. 1920037
  misc_feature: Bit score of 440.6 for HMM based on sequences of Figure 5
  misc_feature: Functional Homolog Of SEQ ID NO. 1797
MQEPGLGMMSSGGGSGGIGGLSSGEVSVSGEQNRQLKAEIAVHPLYEQLLAAHVSCLRVATPIDQLPLIDAQLAQSHNLLRSYASQHHQHGHSLSPHERQELDNFLAQYLIVLCTFKEQLQQHVRVHAIEAVMACREIENNLQALTGVTLGEGTGATMSDDEDDMQMDFSLDQSGTDGHDLMGFGPLIPTESERSLMERVRQELKIELKQGFKSRIEDVREEILRKRRAGKLPGDTTTVLKNWWQQHSKWPYPTEDDKAKLVEETGLQLKQINNWFINQRKRNWHSNSQSVTSLKSKRKR

SEQ ID NO: 1866 - protein, 291 aa, Vitis vinifera
  misc_feature (83)..(138): Pfam Name: KNOX2 Pfam Description: KNOX2 domain
  misc_feature (25)..(69): Pfam Name: KNOX1 Pfam Description: KNOX1 domain
  misc_feature (194)..(215): Pfam Name: ELK Pfam Description: ELK domain
  misc_feature: Public GI ID no. 225426739
  misc_feature: Bit score of 423.3 for HMM based on sequences of Figure 5
  misc_feature: Functional Homolog Of SEQ ID NO. 1797
MQEPGLGMMGGGGIGGLSDGDQQQRQLKGEIVTHPLYEQLLAAHVACLRVATPIDQLPLIDAQLTQSHHLLRSYASQQHHHGNSLSPHERQELDNFLSQYLLVLCTFKEQLQQHVRVHAVEAVMACREIEQTLQALTGVSLGEGSGATMSDDEEEMQMDFSLDQGGGDGHDMMGFGPLLPTESERTLMERVRQELKIELKQGFKSRIEDVREEILRKRRAGKLPGDTTSVLKNWWQQHSKWPYPTEDDKAKLVEETGLQLKQINNWFINQRKRNWHSNSQSVTALKSKRKR

SEQ ID NO: 1867 - protein, 533 aa, Physcomitrella patens
  misc_feature (267)..(311): Pfam Name: KNOX1 Pfam Description: KNOX1 domain
  misc_feature (322)..(379): Pfam Name: KNOX2 Pfam Description: KNOX2 domain
  misc_feature (435)..(456): Pfam Name: ELK Pfam Description: ELK domain
  misc_feature: Public GI ID no. 14348597
  misc_feature: Bit score of 520.7 for HMM based on sequences of Figure 5
  misc_feature: Functional Homolog Of SEQ ID NO. 1797
MMAFNNLSHDVSLQQFPELWESSRFSQRHDTLDADQHTQGFDDTQFPKEPLEPNTNLHQVAMEIQPNATIIGDESSRGRNPVVNESDDREDDNHLLGTEDGIVKNGRTWLNSALLREQNQASEDRSGYGDHNAAERWCPVCSASGSQSCMCGMPMHAGDSSTISFPNQSTYTHWLSMQGANMLASQHRTGGEVDAKAAGFTVSPQSTKMATELNLSPAGHGRDNHALFTDPRHSVAQGGSRYAEDYERTEHQTDWEGATQKMEWEQARDKFLIVAHPLYPDLLNAHASCLRVGTPVDQLPHIEAQLTQARHVTSKYSVLHPDHLEITEDEKTELDQFMAQYIMLLCSFKDHLQQHVYYDVTEAMMSCWELEQALHNLTGVSAGESTGATMSEEDEDYDSDYGAYDAHMDPQDSGGFGPLVPTESERTLMERVRQELKYELKQGYRARIVDVREEILRKRRAGKLPEGTTTVLKAWWQAHSKWPYPTEDEKERRIQETGLELKQVNNWFINQRKRNWHSNPLSSSSELKSKRKK

SEQ ID NO: 1868 - DNA, 1261 bp, Glycine max
  misc_feature: Ceres Clone ID no. 528991
  misc_feature: Encodes the peptide sequence at SEQ ID NO. 1869
gaagtgtcagctcttccatcctacttcaccctctcacaataaaatcattgcaatagagaagtcccttaaataaatctgaatttccctgctttgcttcaccaccccccttgcttgcgtgggtagaaatgcaagaagcagggctgggaatgggaatgggaatgatgagcggagaagtatccgccgccggggaccaccaccgtcaagtgaaggcggagatagccaaccacccactctatgaacagcttctatctgcacacgtgtcatgcctccgcgtcgccacacctatcgatcagttgccgctcatcgacggacagttatcgcagtcccaccatctcctccgctcttatgcctcacaccattcccattccctctcgccccatgaccgacaagaactcgacaacttcatggcacaatatttgattgtgttatgtacgttcaaagagcagcttcagcaacatgtgagggtgcatgccgtggaggctgtgatggcctgccgtgatattgaaagtaccttgcaagctctgacaggagtcagtttgggagaaggaacaggtgcaacaatgtcagatgatgaagatgatttgcagatggatggctctttagatcagtctagcgctgacgggcatgacatgatgggatttggtccattgcttcctacagaatctgaaaggtccctgatggaaagagttcgtcaggagcttaagattgagctcaagcagggttttaagtcaagaattgaagatgttagggaggaaatattaaggaagcggagagctgggaaattaccaggtgacacaacatcggttttaaaggcctggtggcagcaacatgctaagtggccctacccaactgaagatgacaaggcaaaacttgtggaggagacagggttgcagctgaagcaaatcaataattggttcatcaatcaaaggaaacgcaactggcacagcaactctcaatcggttaactctctgaagtccaagcgcaagagagagtatgcccactaaggattccagtctggtgcagaagataacaggtgatgcactacaacataagatggcttacaatagtgatggttgtaaattcttggaatacataacggatacaaactattcttgttgtgcacggtcgcctccatttctttcaagtgtttttttatttgtaaatttgtttgctatgatttgactggctgaagaagtatttttagcagctgaaagcctgaaagtgtttcctatacttgatatgtttgcatgtactattatgt

SEQ ID NO: 1869 - protein, 283 aa, Glycine max
  misc_feature (71)..(126): Pfam Name: KNOX2 Pfam Description: KNOX2 domain
  misc_feature (16)..(60): Pfam Name: KNOX1 Pfam Description: KNOX1 domain
  misc_feature (182)..(203): Pfam Name: ELK Pfam Description: ELK domain
  misc_feature: Ceres Clone ID no. 528991
  misc_feature: Bit score of 426.9 for HMM based on sequences of Figure 5
  misc_feature: Functional Homolog Of SEQ ID NO. 1797
MGMMSGEVSAAGDHHRQVKAEIANHPLYEQLLSAHVSCLRVATPIDQLPLIDGQLSQSHHLLRSYASHHSHSLSPHDRQELDNFMAQYLIVLCTFKEQLQQHVRVHAVEAVMACRDIESTLQALTGVSLGEGTGATMSDDEDDLQMDGSLDQSSADGHDMMGFGPLLPTESERSLMERVRQELKIELKQGFKSRIEDVREEILRKRRAGKLPGDTTSVLKAWWQQHAKWPYPTEDDKAKLVEETGLQLKQINNWFINQRKRNWHSNSQSVNSLKSKRKREYAH

SEQ ID NO: 1870 - DNA, 999 bp, Populus balsamifera subsp. trichocarpa
  misc_feature: Ceres Annot ID no. 1491629
  misc_feature: Encodes the peptide sequence at SEQ ID NO. 1871
atgcaagaaccaaacttgggcatgatgggaagtggaagtgggggtgcacttggtggtttaagcagtggagagatgtctgtgtctttatcaggtgatcagtctcgccaactcaaggcagaaatagctacacaccctttatatgagcagctattatcagctcacgtgtcttgccttcgtgtagctacaccaattgatcaattacctcttatagatgctcagttatcacaatctcatcatcttcttaggtcttatgcttcacagcacaaccaacatggtcattctctttctccccatgaaaggcaagacctagacaacttcctggcacagtatttgataatattgtgtactttcaaagaccagcttcaacaacatgtcagagtgcacgccgttgaagctgttatggcctgccgtgaaattgagaccaccttacaggctctcactggtgtgactctaggagaaggtacgggtgcaaccatgtctgacgatgaggatgacctgcaaatggatttctctttagatcaatcaagtgctgatgggcatgacatgatgggatttggccctctgcttcctacagaatctgaaaggtctttgatggagagagttcggcaggaactgaagattgaattaaagcagggcttcaaatcaagaattgaagatgtcagggaggagatattgagaaaaagaagggctggaaaactaccgggtgacactacttcagtgctgaagaattggtggcagcaacactccaagtggccttacccaactgaagatgacaaagcaaaacttgtggaggagacagggttacagctaaagcagattaacaattggttcatcaaccaaaggaagaggaactggcacagcaactctcaatcggtgacatccttgaagtccaagcgcaaaagtactttctacttgctaacaaccagttgggaagtaaagaggctgagaccaagagctgccaacgttgaagaagttgcctttggcggtctcgtactttaa

SEQ ID NO: 1871 - protein, 332 aa, Populus balsamifera subsp. trichocarpa
  misc_feature (93)..(148): Pfam Name: KNOX2 Pfam Description: KNOX2 domain
  misc_feature (35)..(79): Pfam Name: KNOX1 Pfam Description: KNOX1 domain
  misc_feature (204)..(225): Pfam Name: ELK Pfam Description: ELK domain
  misc_feature: Ceres Annot ID no. 1491629
  misc_feature: Bit score of 448.9 for HMM based on sequences of Figure 5
  misc_feature: Functional Homolog Of SEQ ID NO. 1797
MQEPNLGMMGSGSGGALGGLSSGEMSVSLSGDQSRQLKAEIATHPLYEQLLSAHVSCLRVATPIDQLPLIDAQLSQSHHLLRSYASQHNQHGHSLSPHERQDLDNFLAQYLIILCTFKDQLQQHVRVHAVEAVMACREIETTLQALTGVTLGEGTGATMSDDEDDLQMDFSLDQSSADGHDMMGFGPLLPTESERSLMERVRQELKIELKQGFKSRIEDVREEILRKRRAGKLPGDTTSVLKNWWQQHSKWPYPTEDDKAKLVEETGLQLKQINNWFINQRKRNWHSNSQSVTSLKSKRKSTFYLLTTSWEVKRLRPRAANVEEVAFGGLVL

SEQ ID NO: 1872 - protein, 301 aa, Populus balsamifera subsp. trichocarpa
  misc_feature (93)..(148): Pfam Name: KNOX2 Pfam Description: KNOX2 domain
  misc_feature (35)..(79): Pfam Name: KNOX1 Pfam Description: KNOX1 domain
  misc_feature (204)..(225): Pfam Name: ELK Pfam Description: ELK domain
  misc_feature: Public GI ID no. 118481200
  misc_feature: Bit score of 438.9 for HMM based on sequences of Figure 5
  misc_feature: Functional Homolog Of SEQ ID NO. 1797
MQEPNLGMMGSGSGGALGGLSSGEMSVSLSGDQSRQLKAEIATHPLYEQLLSAHVSCLRVATPIDQLPLIDAQLSQSHHLLRSYASQHNQHGHSLSPHERQDLDNFLAQYLIILCTFKDQLQQHVRVHAVEAVMACREIETTLQALTGVTLGEGTGATMSDDEDDLQMDFSLDQSSADGHDMMGFGPLLPTESERSLMERVRQELKIELKQGFKSRIEDVREEILRKRRAGKLPGDTTSVLKNWWQQHSKWPYPTEDDKAKLVEETGLQLKQINNWFINQRKRNWHSNSQSVTSLKSKRKR

SEQ ID NO: 1873 - DNA, 1785 bp, Zea mays
  misc_feature: Ceres Clone ID no. 298091
  misc_feature: Encodes the peptide sequence at SEQ ID NO. 1874
ctctctctctctcattcatctcgcctttctttcttaccggccggccggccggcggctgggctctgcaattcacccaacttttctctgttttcactacgatctcagggctccggcgaccgtgcggcctcatcatcagctacaacctaccagctgctaccgtctcggtcgccgcctagctctccgcagcggctagctcatccggccggccgccccttttctcttgccgttgcgcagttgcgcccccttccccgcggcttaggaaccatcgaaaagacgcctcaccatctcctttgtgtccttgctaactaactcccccattaaatcctctccttcctcccgcgctggccgtgtggtctctcagccctccgagttgatccataagctagcgccatcatcgatcgccatatatacatagccaaggacgcacgcgcgcgcgcgcgcaaaccagcgggagcgaaacaccaaccggccggaccaattaagaagcaggctagcaagtcgaagaggaaagaagagaagtgggggtaccgggggtaccggccggtcatcgatcgagcttggcgaagcagcgaccgccgggtcgtcgtcgtcggtacatgcatgcagcgcggcggtgatcaagcaggagcgagcctgggcatggagatgggggtggggtacgccggcggcggcggcggcggcgagtgctcgtcgtcctcggcggctgccgcggccgcggccgcggcggagggggaggagcggcagctgctcaagggggagatcgcggtgcacccgctgtgcgagcagctagtggcggcgcacgtggggtgcctgcgcgtggccacgcccatcgaccacctccccctcatcgacgcccagctcgcgcagtccagcggcctcctccactcctacgccgcccaccaccgccccttcctctccccgcacgacaagcacgacctcgactcgttcctcgcgcagtacctgatgctgctgtgctcgttccgggagcagctgcagcagcacgtccgggtgcacgccgtggaggccgtcatggcgtgccgcgagatcgagcagtccctgcaggacctaaccggggcgacacttgaggaagggacgggggcgaccatgtcagaggacgaggacgaggcgccgatgctggaggtgggcctggatatgggctccgacgggcacgacatgatgggcttcggcccgctcatgcccaccgactcggagcgctcgctcatggagagggtcaggcaggagctcaagatggagctcaagcagggtttcaagtcgagaatagaggatgtgcgggaggagatcctgaggaaaaggagggccgggaagctgcctggggacaccaccagcatcctcaagcaatggtggcaggagcactccaagtggccataccccacggaagacgataaggctaagctcgtcgaagagaccggcctgcagctgaagcaaatcaacaactggttcatcaaccagaggaagaggaactggcacaacaactcccagacgtcaaccctcaaatcgaagcgtaaaaggtgatggaggagagctagctgcaccgtatataccgtgtatgtaacgcacacctgctgacacacatgtacacatgtataccataccaacacgctaatcaaacggagctctgcatggcgactgtactcacggaaataaagaggaccatatcgaccggttcaactgtatatctagccattagtctgaccactggcatatttgtttgctgcggctgatactttgagctgatgatgtgtggctcacagcatactttattcc

SEQ ID NO: 1874 - protein, 310 aa, Zea mays
  misc_feature (103)..(158): Pfam Name: KNOX2 Pfam Description: KNOX2 domain
  misc_feature (48)..(92): Pfam Name: KNOX1 Pfam Description: KNOX1 domain
  misc_feature (214)..(235): Pfam Name: ELK Pfam Description: ELK domain
  misc_feature: Ceres Clone ID no. 298091
  misc_feature: Bit score of 424.0 for HMM based on sequences of Figure 5
  misc_feature: Functional Homolog Of SEQ ID NO. 1797
MQRGGDQAGASLGMEMGVGYAGGGGGGECSSSSAAAAAAAAAEGEERQLLKGEIAVHPLCEQLVAAHVGCLRVATPIDHLPLIDAQLAQSSGLLHSYAAHHRPFLSPHDKHDLDSFLAQYLMLLCSFREQLQQHVRVHAVEAVMACREIEQSLQDLTGATLEEGTGATMSEDEDEAPMLEVGLDMGSDGHDMMGFGPLMPTDSERSLMERVRQELKMELKQGFKSRIEDVREEILRKRRAGKLPGDTTSILKQWWQEHSKWPYPTEDDKAKLVEETGLQLKQINNWFINQRKRNWHNNSQTSTLKSKRKR

SEQ ID NO: 1875 - DNA, 1508 bp, Glycine max
  misc_feature: Ceres Clone ID no. 558121
  misc_feature: Encodes the peptide sequence at SEQ ID NO. 1876
gattccgcagcttgttactctcttctctctcaaaacaaaacttgaatccatccatactctacataccccttgcccttgctttgcttctttctttctcacaagcaccagcagcactcaaatcaatcaatcgtttttaatgcccttgcttctccctctttccgtgtgtatgtaaaatctttgtttttatcagaggtggtgcagaaagttgtatctcagatccctatatacaccgaaaacgatacaactgtgtgctgtgtacactgtgcactgtgcttctccctctctctctctctctctcacaaaatcataatcattttacatattacacctattaccgaatagagtggtcctcaacctcaacctaaaagcctcactttttttgttttccccgataaccctattcaacccaatcctcctttcccttttcctttgacaaaaggaaaggaagaaatgcaagaaccaagcttgggattgatgggtgaggtctccggcgatcaccaccgtcagctgaaggcggagataacgactcatccgctgtacgagcagcttctggcagcacacgtggcatgcctccgtgtggccaccccgatcgaccagcttccactcatcgatgctcagttatctcagtctcaccatcttctacgctcttatgtctcacacaacactcattctctctcccctcatcaccgccaagaacttgacaacttcctggcacaatatttgatagttctgtgtactttcaaagaacagcttcagcaacatgtaagagtccacgccgtcgaggctgtcatggcctgccgtgatatcgaaaatgccttacaagctctaactggagtgagtttgggagaaggaactggtgcaacaatgtcagatgatgaagatgatttacaaatggatatttctttagatcaatctagcgcggaagggcatgacatgatgggatttggtccattacttcctacagaatctgaaaggtcattgatggaaagagttcgccaggaactaaagattgagctgaaacagggtttcaagtcaagaattgaagatgtcagggaagaaatattaaggaaacgtagagctgggaaattaccaggtgacacaacttctgtgttaaagaactggtggcagcaacatgcaaagtggccttacccaactgaagatgacaaggcaaaacttgtggaggagacagggttgcagctgaagcaaattaataattggttcatcaaccaaaggaaacgcaactggcacagtaactctcaatcggttacctctttgaagtcgaagcgcaagaggtagacatattattttgtccctaactatgtggaacagctagcaagcaacacaactatatataaggacatgcttaatattgctgatagagtgtagtcccactaaggatgcaaaagatggtagatgcatgtgggttactgtaatattgtaagatagctgaaacaaattatagactggctgtaaatttgtggaatttaacgtatgcaaacttttctttt

SEQ ID NO: 1876 - protein, 281 aa, Glycine max
  misc_feature (73)..(128): Pfam Name: KNOX2 Pfam Description: KNOX2 domain
  misc_feature (18)..(62): Pfam Name: KNOX1 Pfam Description: KNOX1 domain
  misc_feature (184)..(205): Pfam Name: ELK Pfam Description: ELK domain
  misc_feature: Ceres Clone ID no. 558121
  misc_feature: Bit score of 414.9 for HMM based on sequences of Figure 5
  misc_feature: Functional Homolog Of SEQ ID NO. 1797
MQEPSLGLMGEVSGDHHRQLKAEITTHPLYEQLLAAHVACLRVATPIDQLPLIDAQLSQSHHLLRSYVSHNTHSLSPHHRQELDNFLAQYLIVLCTFKEQLQQHVRVHAVEAVMACRDIENALQALTGVSLGEGTGATMSDDEDDLQMDISLDQSSAEGHDMMGFGPLLPTESERSLMERVRQELKIELKQGFKSRIEDVREEILRKRRAGKLPGDTTSVLKNWWQQHAKWPYPTEDDKAKLVEETGLQLKQINNWFINQRKRNWHSNSQSVTSLKSKRKR

SEQ ID NO: 1877 - protein, 314 aa, Oryza sativa subsp. japonica
  misc_feature (106)..(161): Pfam Name: KNOX2 Pfam Description: KNOX2 domain
  misc_feature (51)..(95): Pfam Name: KNOX1 Pfam Description: KNOX1 domain
  misc_feature (218)..(239): Pfam Name: ELK Pfam Description: ELK domain
  misc_feature: Public GI ID no. 75306683
  misc_feature: Bit score of 433.3 for HMM based on sequences of Figure 5
  misc_feature: Functional Homolog Of SEQ ID NO. 1797
MQGGDHGGMEMGVGSFTGGGGGGECSSSSATAAAAAAAAAAAAAAEAEERQLLKGEIAVHPLCEQLVAAHVGCLRVATPIDHLPLIDAQLAQSSGLLHSYAAHHRPFLSPHDKQELDSFLAQYMMLLCSFREQLQQHVRVHAVEAVMACREIEQSLQDLTGATLEEGTGATMSEDEDETAPMLEGPMDMGSDGHDLMGFGPLMPTDSERSLMERVRQELKIELKQGFKSRIEDVREEILRKRRAGKLPGDTTTILKQWWQQHSKWPYPTEDDKAKLVEETGLQLKQINNWFINQRKRNWHNNSQTSTLKSKRKR

SEQ ID NO: 1878 - DNA, 972 bp, Sorghum bicolor
  misc_feature: Ceres Annot ID no. 8643472
  misc_feature: Encodes the peptide sequence at SEQ ID NO. 1879
atgcagggcggcggcggcggcggtgatcaagcaggagggagcctaggcatggacatgggcgtggggtacgccgccggcagcggcggcgccgagtgctcgtcgtcgacttcggcggcggctgcagcagcggctgccgcggccgccgcagccgccgcggcggcggccgaggcggaggagcggcagctgctcaagggggagatcgcggtgcacccgctgtgcgagcagctggtggcggcgcacgtggggtgcctgcgcgtggcgacgcccatcgaccacctcccgctcatcgacgcgcagctggcccagtccagcggcctcctccactcctacgccgcccaccaccgccccttcctctccccgcacgacaagcacgacctcgactccttcctcgcgcagtatctgatgctgctgtgctcgttccgggagcagctgcagcagcacgtccgggtgcacgccgtggaggccgtcatggcgtgccgcgagatcgagcagtcgctccaggacctcaccggagcgacgctagaggaagggacgggggcgaccatgtcggaggacgaggacgagccccccatgctagagggggccctggacatgggctccgatgggcacgacatgatgggcttcggcccgctcctgcccaccgactcggagcgctcactcatggagagggtcaggcaggagcttaagatcgagctcaagcagggtttcaagtcaagaatagaggatgtgagggaggaaattctgaggaaaaggagggccgggaagctgcctggggacaccaccagcatcctcaagcaatggtggcagcagcactccaagtggccataccccacggaagacgataaggcaaagcttgttgaagagactggcctgcagctgaaacaaatcaacaactggttcatcaaccagaggaagcgaaactggcacaacaactcccagacgtcaaccctcaaatcaaagcgtaaaaggtga

SEQ ID NO: 1879 - protein, 323 aa, Sorghum bicolor
  misc_feature (116)..(171): Pfam Name: KNOX2 Pfam Description: KNOX2 domain
  misc_feature (61)..(105): Pfam Name: KNOX1 Pfam Description: KNOX1 domain
  misc_feature (227)..(248): Pfam Name: ELK Pfam Description: ELK domain
  misc_feature: Ceres Annot ID no. 8643472
  misc_feature: Bit score of 436.0 for HMM based on sequences of Figure 5
  misc_feature: Functional Homolog Of SEQ ID NO. 1797
MQGGGGGGDQAGGSLGMDMGVGYAAGSGGAECSSSTSAAAAAAAAAAAAAAAAAAEAEERQLLKGEIAVHPLCEQLVAAHVGCLRVATPIDHLPLIDAQLAQSSGLLHSYAAHHRPFLSPHDKHDLDSFLAQYLMLLCSFREQLQQHVRVHAVEAVMACREIEQSLQDLTGATLEEGTGATMSEDEDEPPMLEGALDMGSDGHDMMGFGPLLPTDSERSLMERVRQELKIELKQGFKSRIEDVREEILRKRRAGKLPGDTTSILKQWWQQHSKWPYPTEDDKAKLVEETGLQLKQINNWFINQRKRNWHNNSQTSTLKSKRKR

SEQ ID NO: 1880 - DNA, 1861 bp, Panicum virgatum
  misc_feature: Ceres Clone ID no. 1824153
  misc_feature: Encodes the peptide sequence at SEQ ID NO. 1881
atccatcaccacttcttgtctctcatctttcttaccgcccgccgcccgccggccggctttgcaattcattcaacctcccttttcttttcacccggccagagagcttgcgttgtattcttctccgatccagcgtcatcagctcagcctgcagcaggtcccgtcccgggcggccgccttagctttttgccttgccgtttccccccggcttaggaaccctcgaaaagacgcctcaccatctccttggtgtccttgctaactaactccccattaaattcttcttcctcccgccgggagctagctgcccgcccgctcctcccaattgcttcataagctagctagctagctggtcatcagctgcctgctgcccacacgtacccaacgtccccacgccgcgcacgcaaaccggccggcgggagcaccaaccgggccagcagcaggccgggaaagctagcgccacgaccgaccgagcaagctagcttgctagctctattaggtgcccgccgcccgcgcgcgcaattaaaggaggcggctgcaagggaggagaagatcgtcgccgtcgatcgagctgatcggcaaattattagtcttcacggtggtggtgtatccatccatcgacatatatatgcagggcggtggtgatcaaggagggagcctgggcatggacgtgggcttcgccggcggagcccagtgctcgtcgtcctcggcgacggcggcggcggccgccgcagccgcggcggaggcggaggagcggcagctgctcaagggggagatcgcggtgcacccgctgtgcgagcagctggtgacggcgcacgtggggtgcctgcgcgtggcgacgcccatcgaccacctccccctcatcgacgcgcagctggcgcagtccagcggcctcctccactcctacgccgcccaccaccgccccttcctctctccgcacgacaagcacgacctcgactccttcctcgcgcagtacctgatgctgctgtgctcgttccgggagcaactgcagcagcacgtccgggtgcacgccgtggaggccgtcatggcgtgccgcgagatcgagcagtcactgcaggacctgaccggcgcgatgctagaggaaggctcaggggcgaccatgtcggaggatgaggacgaaccaccgatgctggagggggcactggacatgggctcggatgggcacgacatgatgggcttcggcccgctcctgcccaccgactccgagcgctccctcatggagagggtcaggcaggagctcaagatcgagctcaagcagggtttcaagtcaagaatagaggatgtgagggaagaaatccttcggaaaaggagggccgggaagctgcctggggacaccaccagcatcctcaagcaatggtggcagcagcactccaagtggccataccccacggaagacgataaggcgaagcttgttgaagagactggcctgcagctgaaacaaatcaacaactggttcatcaaccagaggaagaggaattggcacaactcccagacgtcaaccctcaaatcaaagcataaaaggtgatggatcggagatcgagctgcacaatgtatacctgacacatataccaacaacgctaatcaaacggagctggaccatggtgactcactaaaaataaaagaggatcgaccgattcaactgtatatctagtcattagtcagaggtgacagtttcatgacacacacacactagttctgaccactggcatatttgtttgctgtgatttttatttgagctcgtatgctcatgcacattattcttgttaattactgtatagatataaagtgtccccactgtacgtatataatctgaggattaattcattccctgtgcaaattaaatacc

SEQ ID NO: 1881 - protein, 305 aa, Panicum virgatum
  misc_feature (99)..(154): Pfam Name: KNOX2 Pfam Description: KNOX2 domain
  misc_feature (44)..(88): Pfam Name: KNOX1 Pfam Description: KNOX1 domain
  misc_feature (210)..(231): Pfam Name: ELK Pfam Description: ELK domain
  misc_feature: Ceres Clone ID no. 1824153
  misc_feature: Bit score of 405.3 for HMM based on sequences of Figure 5
  misc_feature: Functional Homolog Of SEQ ID NO. 1797
MQGGGDQGGSLGMDVGFAGGAQCSSSSATAAAAAAAAAEAEERQLLKGEIAVHPLCEQLVTAHVGCLRVATPIDHLPLIDAQLAQSSGLLHSYAAHHRPFLSPHDKHDLDSFLAQYLMLLCSFREQLQQHVRVHAVEAVMACREIEQSLQDLTGAMLEEGSGATMSEDEDEPPMLEGALDMGSDGHDMMGFGPLLPTDSERSLMERVRQELKIELKQGFKSRIEDVREEILRKRRAGKLPGDTTSILKQWWQQHSKWPYPTEDDKAKLVEETGLQLKQINNWFINQRKRNWHNSQTSTLKSKHKR

SEQ ID NO: 1882 - protein, 518 aa, Physcomitrella patens subsp. patens
  misc_feature (248)..(292): Pfam Name: KNOX1 Pfam Description: KNOX1 domain
  misc_feature (302)..(359): Pfam Name: KNOX2 Pfam Description: KNOX2 domain
  misc_feature (419)..(440): Pfam Name: ELK Pfam Description: ELK domain
  misc_feature: Public GI ID no. 168026109
  misc_feature: Bit score of 494.1 for HMM based on sequences of Figure 5
  misc_feature: Functional Homolog Of SEQ ID NO. 1797
MTFDNDLSQDGSLQQFSELWGSSRFTQRQSSLGGDHAEHYLDPRNLRNQLDGAPLPKIEDEARKGKDHLRDSEDEDHHRHLLENEGSDTRACGPPTWLSSALLRQQADQSLDGTENCQSESEKWCPVCSANGRQSCVCNTRMHAGDGNATSFLNQNTYTHWLSMQGTGMHGPGHEHRPGPELDGKDNDFGVDRPQFRMATELNLSAAHGRDGQRFLELHPSLGGARYAGDYGRTDWDGARHKAEWEEIRNRALIVNHPLYPEMLMNHAACLRVGTPVDQLPSIEAQLAQAPNIIEKYRALHDQVDITEDEKVELDRFMTEYTALLGDFKDVLQHHVYTDVAEAMIGCWELEQALHALTGVSPGEGSGATMSDVDDDQDYDSDYAGTAYDQSMDYHDSGGYGPLVPTETERSLMERVRQELKHELKQGYRSKIEDVREEILRKRRAGKLPEGTTTVLKAWWQAHSKWPYPTEDEKEQLIQETGLELKQVNNWFINQRKRNWHSNPLVSSSDMKNKVRKR

SEQ ID NO: 1883 - protein, 310 aa, Solanum lycopersicum
  misc_feature (102)..(157): Pfam Name: KNOX2 Pfam Description: KNOX2 domain
  misc_feature (43)..(87): Pfam Name: KNOX1 Pfam Description: KNOX1 domain
  misc_feature (213)..(234): Pfam Name: ELK Pfam Description: ELK domain
  misc_feature: Public GI ID no. 4098246
  misc_feature: Bit score of 420.6 for HMM based on sequences of Figure 5
  misc_feature: Functional Homolog Of SEQ ID NO. 1797
MQQEEGGLGLMGSSNTSGLGGGDISSMMISSEDHHNRNLNHYNQLKSEIATHPLYEQLLSAHVACLRVRTPIDQLPLIDAQLTQSHNLLRSYASSQQQQQQHSLSHHERQELDNFLAQYLLVLCSFKEQLQQHVRVHAVEAVMACREIEQNLQLLTGATLGEGTGATMSDDEDELQMDFSLDVSGGDAHDLMGMGFGLPTESERSLMERVRQELKIELKQGFRSRIEDVREEILRKRRAGKLPGDTTTVLKNWWQQHSKWPYPTEDDKAKLVEETGLQLKQINNWFINQRKRNWHSNSQSVTSLKSKRKR

SEQ ID NO: 1884 - DNA, 1588 bp, Zea mays
  misc_feature: Ceres Clone ID no. 336323
  misc_feature: Encodes the peptide sequence at SEQ ID NO. 1885
cccggcttaggaaccctcgaaaagacgcctcaccatctcctttgtgtccttgctaactaactccccattagatccggccttcttcctccccgtctccgtcctttgtgtccagttgcttcataagctacccatcgccaattcgccatatacgcacatacccaacgacgacgcacgcgcgtgcgcaaaccaccaaccggagcgagtaccaaccggccggcccgcccaacaagcaggcggctagccatcgacgaccgagcacatcgagctgcccccggccggtcatatatatatgcagggcggcggcggtgatcaagcaggagggagcctgggcatgggcatgggcgtggggtacgccggcggcggaggcgccgagtgctcgtcgtcctcggtggcggccgcggctgccgccgccgcggcggcggcggaggcggaggagcggcagctgctcaagggggagatcgcggtgcacccgctgtgcgagcagctggtggcggcgcacgtggggtgcctgcgcgtggccacgcccatcgaccacctccccctcatcgacgcccagctcgcgcagtccagcggcctcctccactcctacgccgcccaccacagccccttcctctycccgcacgacaagcacgacctcgactccttcctcgcgcagtacctgatgctgctgtgctcgttccgggagcagctgcagcagcacgtccgggtgcacgccgtggaggccgtcatggcatgccgcgagatcgagcagtccctgcaagacctaactggggtgacgctggaggaagggacgggagcgaccatgtcggaggaggacgaggacgaggcgccgatgctggaggtgggtctggtggacatgggctccgacgggcacgacatgatgggcttcggcccgctcctgcccaccgactccgagcgctcgctcatggatagggtccgacaggagcttaagatcgagctcaagcagggtttcaagtcaagaatagaggatgtgagggaggagattctgaggaaaaggagggccgggaagctgcctggggacaccaccagcatcctcaagcaatggtggcagcagcactccaagtggccataccccacggaggacgataaggcgaggctcgttgaagagaccggcctgcagctgaaacaaatcaacaactggttcatcaaccagaggaagaggaactggcacaacaactcccagacgtcaaccctcaaatcaaagcgtaaaaggtgatggagagctgcgccaccatgtactgcacacctgacacgtataccaattaccaacacgctaatcagacgacgtacggccatgcatggcgactcacaagaaataaagaggatcgatcgattcaactgtatatttctagtcattagtcagagaggtgacaggttcatgacacacacaaacacacgtacactagtctgaccactggcatatttgcttgctgtgattaatattttgagccgatcatttgctcggagcatactttattcttgttattattgtacagccatagtttgtcctcccagcgtacgtacataatctttgaggttgcattcatatatacagtgatctgatctg

SEQ ID NO: 1885 - protein, 315 aa, Zea mays
  misc_feature (106)..(161): Pfam Name: KNOX2 Pfam Description: KNOX2 domain
  misc_feature (51)..(95): Pfam Name: KNOX1 Pfam Description: KNOX1 domain
  misc_feature (219)..(240): Pfam Name: ELK Pfam Description: ELK domain
  misc_feature: Ceres Clone ID no. 336323
  misc_feature: Bit score of 429.9 for HMM based on sequences of Figure 5
  misc_feature: Functional Homolog Of SEQ ID NO. 1797
  misc_feature (109)..(109): Xaa is any aa, unknown, or other
MQGGGGDQAGGSLGMGMGVGYAGGGGAECSSSSVAAAAAAAAAAAEAEERQLLKGEIAVHPLCEQLVAAHVGCLRVATPIDHLPLIDAQLAQSSGLLHSYAAHHSPFLXPHDKHDLDSFLAQYLMLLCSFREQLQQHVRVHAVEAVMACREIEQSLQDLTGVTLEEGTGATMSEEDEDEAPMLEVGLVDMGSDGHDMMGFGPLLPTDSERSLMDRVRQELKIELKQGFKSRIEDVREEILRKRRAGKLPGDTTSILKQWWQQHSKWPYPTEDDKARLVEETGLQLKQINNWFINQRKRNWHNNSQTSTLKSKRKR

SEQ ID NO: 1886 - DNA, 970 bp, Panicum virgatum
  misc_feature: Ceres Clone ID no. 1724782
  misc_feature: Encodes the peptide sequence at SEQ ID NO. 1887
aaaaacagccgcccgcggacgccgacggggcaggcgcagctccgtccatagcgcgacagcctgcggcatggccgaaacgcgcagaaaaatggacgcggctgctggctagtcaccaataaatgaagccccgcgccgcgccgcgctctactgctgctactagcacagcgctgaaacccgcggcggcgagctagagagaaagagagagagctccccgtcaggtgatggcaactctggtgttcgtgctgctcttgctggccatggcgttcagaggatcaggcggctcgtggtgcgtgtgccggccggacgcgacggacgcggcgctgcagaggacgctggactacgcgtgcgggcacggcgcggactgcgccgccgtgctcccgacgggcccgtgctacagccccccctcggtgcgcgcgcactgctcctacgccgccaacagctacttccagcggaacagacaggccaacggcgccatctgcgacttcggcggcacggccaacctcaccgacacggacccgagctccggaacctgcaagtaccctgcgactccgagcgaggcggggacaagcggcaacgcaaccggcacgggcgcgtcgtcgtctccaggctccgcgagcaacccggcgacgacgcccagcacgggagggagcttcacgacaccggtatccgcgttcggccccgtgcccagcaccgtcagcgccgccgccgcggcggcgttcgctggccgccacgttctcctcctcgccgtcgtctccgtcctggcgttcttggctcgctaagttaacagacttgctggatgacaacacaaggcagccgagcggcgttcttgttccggcgcgcacgaggggctttggtgtcagagtgggggcttttcgctattgttcttgttcgttcttctctttaccatgtttctcgcggttttcttctgcttttggatatgaatatgaaccgaatttgattgcttcactcg

SEQ ID NO: 1887 - protein, 185 aa, Panicum virgatum
  misc_feature (21)..(106): Pfam Name: X8 Pfam Description: X8 domain
  misc_feature: Ceres Clone ID no. 1724782
  misc_feature: Bit score of 402.3 for HMM based on sequences of Figure 10
  misc_feature: Functional Homolog Of SEQ ID NO. 1887
  misc_feature: in Figure 10
MATLVFVLLLLAMAFRGSGGSWCVCRPDATDAALQRTLDYACGHGADCAAVLPTGPCYSPPSVRAHCSYAANSYFQRNRQANGAICDFGGTANLTDTDPSSGTCKYPATPSEAGTSGNATGTGASSSPGSASNPATTPSTGGSFTTPVSAFGPVPSTVSAAAAAAFAGRHVLLLAVVSVLAFLAR

SEQ ID NO: 1888 - DNA, 567 bp, Sorghum bicolor
  misc_feature: Ceres Annot ID no. 8668824
  misc_feature: Encodes the peptide sequence at SEQ ID NO. 1889
atggaactcttggtgttcgtgctgctcttgctggccgtgccactcagaggatcagacggcgcgtggtgcgtgtgccgcccggacgtggccgacgcggcgctgcagaagacgctggactacgcgtgcggccacggcgcggactgcgccgccgtgctcccgaccgggccgtgctacagccccacctcggtgcgcgcgcactgctcctacgccgccaacagctacttccagcggaacagcggccaggccaacggcgccacctgcgacttcggcggcacggccaacctcaccgacacagacccgagctctggaacttgcaaataccctgcaactccaagcgaagcagggacaagcggcaacgcaaccggcacgggcacgtcgtcgccaggctctgcgagtaacccggctacgacgcccagcacgggagggagcttcacgacacctgtcggcgcatttggccccacgccgagcaccgtcagcgcgggcaccaccaccaccgccgcgttttttggtcgccatgccctcctcgtcgccgtcgtctccgtcgccctgtgtttcttggtgcgctaa

SEQ ID NO: 1889 - protein, 188 aa, Sorghum bicolor
  misc_feature (21)..(107): Pfam Name: X8 Pfam Description: X8 domain
  misc_feature: Ceres Annot ID no. 8668824
  misc_feature: Bit score of 406.4 for HMM based on sequences of Figure 10
  misc_feature: Functional Homolog Of SEQ ID NO. 1887
  misc_feature: in Figure 10
MELLVFVLLLLAVPLRGSDGAWCVCRPDVADAALQKTLDYACGHGADCAAVLPTGPCYSPTSVRAHCSYAANSYFQRNSGQANGATCDFGGTANLTDTDPSSGTCKYPATPSEAGTSGNATGTGTSSPGSASNPATTPSTGGSFTTPVGAFGPTPSTVSAGTTTTAAFFGRHALLVAVVSVALCFLVR

SEQ ID NO: 1890 - DNA, 842 bp, Zea mays
  misc_feature: Ceres Clone ID no. 326588
  misc_feature: Encodes the peptide sequence at SEQ ID NO. 1891
aagcacaaggttgaaaccagcgttgccgagcgagagaaacagagcgccccctgtccaagtggtcaggtccaggacaccctccacgcacgcactgatggaacccctggtgttcgtgctgctcttggtggccatgccactcagaggatcagatggcgcgtggtgcgtgtgccgcccggacgtgtccgatgcggcgctgcagaagacgctggactacgcgtgcgggcacggcgcggactgcgccgccgtgctcccgaccgggccgtgctacagccccaccactgtgcgcgcgcactgctcctacgccgccaacagctacttccagcagaacagccaggccaacggcggcgccacctgcgatttcggcggcacggccaacctcaccgacacagacccgagctctggaacttgcaaataccctgcaacaccaagcgaagcagggacaagcggcaacgccaccggcacgggcacggcaccgccaggctcgacgagtaacccagctacgacgcccagcatgggagggagcgtcacgacgacacctgtcggcgcgtttggtcccgcgcctagcaccttcagcgcggccaccgccactgccgccgcgtttggtggtcgccgtgccctcctcctcgccgtcgtctccgtcctgtctttcttggcgcgctaacttgctcgatcagaagaaatccgtagcatcgtcaccctatgtgtaattggcggccgcacaggacagggctttttttttggtgtcatgccgtcatcgtgaatatttcacaattgttcgttcttctctctcatgtttctcgcggttttcattacttccgctcatgaaaaatggatcgagtttc

SEQ ID NO: 1891 - protein, 188 aa, Zea mays
  misc_feature (21)..(107): Pfam Name: X8 Pfam Description: X8 domain
  misc_feature: Ceres Clone ID no. 326588
  misc_feature: Bit score of 404.9 for HMM based on sequences of Figure 10
  misc_feature: Functional Homolog Of SEQ ID NO. 1887
  misc_feature: in Figure 10
MEPLVFVLLLVAMPLRGSDGAWCVCRPDVSDAALQKTLDYACGHGADCAAVLPTGPCYSPTTVRAHCSYAANSYFQQNSQANGGATCDFGGTANLTDTDPSSGTCKYPATPSEAGTSGNATGTGTAPPGSTSNPATTPSMGGSVTTTPVGAFGPAPSTFSAATATAAAFGGRRALLLAVVSVLSFLAR

SEQ ID NO: 1892 - DNA, 920 bp, Triticum aestivum
  misc_feature: Ceres Clone ID no. 575778
  misc_feature: Encodes the peptide sequence at SEQ ID NO. 1893
acacaccagcagctatcgtcgtcgaacactggagccagccagcagaagagagcgcgcactagctccaacctccacgaacacttcgccgatcgttatgatggcgagtccggcgttcttgctgctgctcttgctggccgtgtcgatcaggggatcagaggcggagtggtgcgtgtgcaggtcggacgcgaacgagacggcgctgcaggagacgctggactacgcgtgcgggcagggcgcggactgcgcgccggtggccacgggagggagctgccacagccccgactcggtggtggcgcactgctcctacgcggtcaacagctactaccagaggagcagccagaccaagggcgccacctgcgacttcggcggcaccgccaccctctcctccgccgaccccagctcgggaacctgcaagtaccctgcaaccgcaagtgcggctgggacgagcaccgggaacggcacagggacaggctccggcgccggcaccaactcgtcttccccgggctcgacgaacccagctacgcccggcatgggagggagcttcaccacgccgatcggcagcgcgtccggccctacggcgagcatcataggccccgagagcagcggtgtcgctgccgctgcggccgctttcgctggcgtccgtggcctcgtcggcgtcgccgtggcctccgtcctcgctttctaggtgcggtgttgatcatgaagcagcgagaaacgtagtgcattctttttaatcatctccaattcctagtgcgttgttgctttggtggagacgtgctgtcgttctgctttagtgtttgtctgtgtacgcctttaatgctcttttagtccatgtatatggagtttaatttctttgcctcatgtcgatgtcgtatttgtgtcccgtgaaacaatttgcatcatggatgtgatgttactac

SEQ ID NO: 1893 - protein, 195 aa, Triticum aestivum
  misc_feature (22)..(107): Pfam Name: X8 Pfam Description: X8 domain
  misc_feature: Ceres Clone ID no. 575778
  misc_feature: Bit score of 393.4 for HMM based on sequences of Figure 10
  misc_feature: Functional Homolog Of SEQ ID NO. 1887
  misc_feature: in Figure 10
MASPAFLLLLLLAVSIRGSEAEWCVCRSDANETALQETLDYACGQGADCAPVATGGSCHSPDSVVAHCSYAVNSYYQRSSQTKGATCDFGGTATLSSADPSSGTCKYPATASAAGTSTGNGTGTGSGAGTNSSSPGSTNPATPGMGGSFTTPIGSASGPTASIIGPESSGVAAAAAAFAGVRGLVGVAVASVLAF

SEQ ID NO: 1894 - protein, 207 aa, Oryza sativa subsp. japonica
  misc_feature (23)..(108): Pfam Name: X8 Pfam Description: X8 domain
  misc_feature: Public GI ID no. 115440117
  misc_feature: Bit score of 407.1 for HMM based on sequences of Figure 10
  misc_feature: Functional Homolog Of SEQ ID NO. 1887
  misc_feature: in Figure 10
MATRLLLLLLLLLGMSLKGSEGAWCVCRPDVAEAALQKALDYACGHGADCAPVTPSGSCYSPNNVAAHCSYAANSYFQRNSQAKGATCDFGGAATLSSTDPSSGTCKYPATASAAGTSTGTGTAGAGTGTGTSTSTSTSTSSPGSSTAATGTPIMGGTFATPIGGGASGPTTSALNPDSSEAPSPSLGRHLLLTCIASMLLSNFLLA

SEQ ID NO: 1895 - protein, 207 aa, Vitis vinifera
  misc_feature (20)..(104): Pfam Name: X8 Pfam Description: X8 domain
  misc_feature: Public GI ID no. 225457225
  misc_feature: Bit score of 455.2 for HMM based on sequences of Figure 10
  misc_feature: Functional Homolog Of SEQ ID NO. 1887
  misc_feature: in Figure 10
MAALVYMVLILAMAGHSSANWCVCKDGLSDAVLQKTLDYACGAGADCGPIHQNGGCYNPNTVRAHCSYAVNSYFQKKGQAQGTCDFAGTASVATSDPSASGCVYPSSISSAGTSTTPSTTTPSTTPSTTTPSTTPSTTTPSTTTPSTTSPYTGTPSTGVYGGINSGVGPSGAGINTDISHGGFMLQNTCMFSFFITLWFSGLMLLWG

SEQ ID NO: 1896 - DNA, 1008 bp, Gossypium hirsutum
  misc_feature: Ceres Clone ID no. 1894933
  misc_feature: Encodes the peptide sequence at SEQ ID NO. 1897
gtgctatctcacacttttccccttacgcataaacttgtctaactcagacacctccattgttacctcaacctcagcttctagctttagtttctgccttagttaccctaatttgttcttatcaaccatggctgctactttagtgtttgcactgctcattcttgccatcactgcaggccactcaagtggtgcgacgggcaaatggtgtgcttgcaaagatggtgtgggtgatggaaacttgcagaagacattggactatgcttgtggaaacggtgctgactgtaaccctatccgttcaaatggaccttgttacaaccccaacactgttaaagcacattgcaattatgctgttaacagctatttccaaaaaaaaggccaaggtcaaggctcctgtgaatttgctggcacggcagccatcactacaactgaccctagctctgctggctgttcttacccctccagtgccagtggcggaggcacgaccttaacaccaacaacaccgggcacgacaacaactccatcatcatcaacaaccaccacgccctccatcatgaccccaggcaccaacaccccaacaagcactaccccctacagttcaacaacacccaccggagtgttaggaggagtcggcaccggcttaggcccatccggaaccacctccaccaacactgattacagccacggaggattccggctccaacccatttcttccttcacaaccctcctgttttcaggcttcatgctgatttggggttgaatactacaaaccaacaatgagcctatatgtaatattcagatgttttatctaaggacatgttaaagctaagggttttttttggggggggggttattttcttccatggaaacgggactttattcctttctaaagcatggtttgtggtgaatgatggatatgcagtgttatctttcttatttaatgttttgatgtaaatctagtctagaatagtagaattcaagtaatttattaatttaaacagattttctcacccg

SEQ ID NO: 1897 - protein, 209 aa, Gossypium hirsutum
  misc_feature (25)..(109): Pfam Name: X8 Pfam Description: X8 domain
  misc_feature: Ceres Clone ID no. 1894933
  misc_feature: Bit score of 419.4 for HMM based on sequences of Figure 10
  misc_feature: Functional Homolog Of SEQ ID NO. 1887
  misc_feature: in Figure 10
MAATLVFALLILAITAGHSSGATGKWCACKDGVGDGNLQKTLDYACGNGADCNPIRSNGPCYNPNTVKAHCNYAVNSYFQKKGQGQGSCEFAGTAAITTTDPSSAGCSYPSSASGGGTTLTPTTPGTTTTPSSSTTTTPSIMTPGTNTPTSTTPYSSTTPTGVLGGVGTGLGPSGTTSTNTDYSHGGFRLQPISSFTTLLFSGFMLIWG

SEQ ID NO: 1898 - protein, 184 aa, Arabidopsis thaliana
  misc_feature (20)..(104): Pfam Name: X8 Pfam Description: X8 domain
  misc_feature: Public GI ID no. 18394637
  misc_feature: Bit score of 393.1 for HMM based on sequences of Figure 10
  misc_feature: Functional Homolog Of SEQ ID NO. 1887
  misc_feature: in Figure 10
MAVFVLVMILLAMAGHSSGTWCVCKEGLSEAMLQKTLDYACGAGADCGPIHQTGPCFNPNTVKSHCSYAVNSFFQKKGQSLGTCDFAGTATFSASDPSYTTCPFPASASGSGTTTPVTTTPSTRVPTTTNTRPYTITPSTGGGLGIPSGINPDYTDPSFGFKLQSPRFGFIVLFTLFLPFYLFS

SEQ ID NO: 1899 - DNA, 1016 bp, Glycine max
  misc_feature: Ceres Clone ID no. 517837
  misc_feature: Encodes the peptide sequence at SEQ ID NO. 1900
acgcacccacaccattctacactcccctctctcactcactcacactctcttctgtcatagctgtaccacgtttttcttctccatctcagcctctgtcccaacaccattctcatggctgctctagctctagcactgcttcttctggctttcactggcacttcaagtgctacatggtgcgtttgcaaggatggaagcgacgcgatcctgcagaaaaccttggactatgcttgtggagctggtgctgactgtaatcctctccaccaaaacgggccttgtttccagcccaacaccgttagggcccactgtaactacgccgtgaacagctacttccaaaggaagggtcaagctcaagggtcctgcgactttgcgggaacagccattgttactgcatctgaccccagctctggcggtacttgtgtctacccttctagtgtcagcgctgcaggcactggtacaactccagtgactaccacaccaaccatgggcaccactcctacaactggaactccatcaacaagcaccggcacgggcaccggcaccggcacaggcaccactccatacagcacaacacctggagtattaggaggcattggcagtggcatgggaccttcaggatccggcatgaatgacgaaagtcacggtggcattggacttgtacacagcagtagtttcttctcgatggcgctcttctctgccttcatgatgatgctctgctggggttgagaatgaaaataaatggggcttggcctgggtatatggtgcaaaatgccgtatgtcactgtattaatgtgaatgttattttctaggtgctgaacttgggacgttagtttttggggttcttataatctttttctccaccttccactagctattgggtttttgattaattaattggaattcggttacaatttggctccaacttgttcttaatcttaagctcctactctgtacaaagaagtgcataacgctgtcaattagatggatggacctggtgacaccaatgctatgtatttttc

SEQ ID NO: 1900 - protein, 203 aa, Glycine max
  misc_feature (20)..(104): Pfam Name: X8 Pfam Description: X8 domain
  misc_feature: Ceres Clone ID no. 517837
  misc_feature: Bit score of 401.1 for HMM based on sequences of Figure 10
  misc_feature: Functional Homolog Of SEQ ID NO. 1887
  misc_feature: in Figure 10
MAALALALLLLAFTGTSSATWCVCKDGSDAILQKTLDYACGAGADCNPLHQNGPCFQPNTVRAHCNYAVNSYFQRKGQAQGSCDFAGTAIVTASDPSSGGTCVYPSSVSAAGTGTTPVTTTPTMGTTPTTGTPSTSTGTGTGTGTGTTPYSTTPGVLGGIGSGMGPSGSGMNDESHGGIGLVHSSSFFSMALFSAFMMMLCWG

SEQ ID NO: 1901 - DNA, 512 bp, Triticum aestivum
  misc_feature: Ceres Clone ID no. 914288
  misc_feature: Encodes the peptide sequence at SEQ ID NO. 1902
acacaccagcagctatcgtcgtcgaacactcgactcagagccagccagcggaggagagcgcgcgcgcacgagctctagctcggacctccaccaacacttcgccgatcgttacgatggcgagtccggcgttcctgctgctgctcttgctggccgtgtcgatcacgggatcagacgcggagtggtgcgtgtgcaggtcggacgcgaacgagacggcgctgcaggagacgctggactacgcgtgcgggcagggcgcggactgcgcgccggtggccacgggagggagctgccacagccccgactccgtggtggcgcactgttcctacgcggtcaacagctactaccagaggagcagccagaccaagggcgccacctgcgacttcggcggcaccgccaccctctcctccgccgatcccagctcgggaacctgcaagtaccctgcaaccgcaagtgctgcagggacgagcaccgggaacggcacggcgacaggcacaggcaccggcaccaactcttct

SEQ ID NO: 1902 - protein, 133 aa, Triticum aestivum
  misc_feature (22)..(107): Pfam Name: X8 Pfam Description: X8 domain
  misc_feature: Ceres Clone ID no. 914288
  misc_feature: Bit score of 209.2 for HMM based on sequences of Figure 10
  misc_feature: Functional Homolog Of SEQ ID NO. 1887
MASPAFLLLLLLAVSITGSDAEWCVCRSDANETALQETLDYACGQGADCAPVATGGSCHSPDSVVAHCSYAVNSYYQRSSQTKGATCDFGGTATLSSADPSSGTCKYPATASAAGTSTGNGTATGTGTGTNSS

SEQ ID NO: 1903 - protein, 233 aa, Oryza sativa subsp. indica
  misc_feature (20)..(104): Pfam Name: X8 Pfam Description: X8 domain
  misc_feature: Public GI ID no. 125552963
  misc_feature: Bit score of 213.0 for HMM based on sequences of Figure 10
  misc_feature: Functional Homolog Of SEQ ID NO. 1887
MAIPLLLLLLLAMSTGSDGAFCVCKPDQSPAAMQKAIDYACWRGADCTQIMQSGACYQPSTIVAHCSYATNSYFQKNSPIGATCDFGGVATLTNTDPSSGTCKYPATASGVGTGMGTGTSTGTGTGVGTGGTGTGVGTGTGGAGVGAGTGTGVGTGTGTGAGMGTGAGAGTGITTPGSTTGTQGGALSPPFGGAYGPSAGAMNPDYNEAAPARSQLAATAVLLAAAPFLFHLI

SEQ ID NO: 1904 - protein, 228 aa, Oryza sativa subsp. japonica
  misc_feature (20)..(104): Pfam Name: X8 Pfam Description: X8 domain
  misc_feature: Public GI ID no. 115464847
  misc_feature: Bit score of 215.3 for HMM based on sequences of Figure 10
  misc_feature: Functional Homolog Of SEQ ID NO. 1887
MAIPLLLLLLLAMSTGSDGAFCVCKPDQSPAAMQKAIDYACWRGADCTQIMQSGACYQPSTIVAHCSYATNSYFQKNSPIGATCDFGGVATLTNTDPSSGTCKYPATASGVGTGMGTGTSTGTGTGVGTGGTGTGGAGVGAGTGTGVGTGTGTGAGMGTGAGAGTGITTPGSTTGTQGGALSPPFGGAYGPSAGAMNPDYNEAAPARSQLAAATSVLLAAAPFLFHLI

SEQ ID NO: 1905 - DNA, 885 bp, Zea mays
  misc_feature: Ceres Clone ID no. 222404
  misc_feature: Encodes the peptide sequence at SEQ ID NO. 1906
gaatctctctgcctcattctctctccaccggcgacggcgagtccgaccgcactgctcctctccgtgcggagatctctcgcgtgctggcaggcgcgtcctggtgactgggacacgggagaagagaccttggtgggtggcagcggcaggccatggaggcgctgctggtgacggtgcttcttctcctcctctcctctaccctcgccgcagcacaatggtgcgtgtgcaggcaggacgcgtcgcaggccgcgctgcagaagaccatcgactacgcgtgcggctccggggcggactgcaactccatccatgagaccggggcgtgctacaaccccaacaccgtcccggcgcactgctcctgggccgccaacagctactaccagaacaacaaggccaagggcgccacctgcgacttcgccggcaccgccaccctcaccaccagcgacccgagctcttcgggctgctcttaccccaccaccagtgcaagcgccgcgggaaccgtgaccccgaccaccggcggcacaatgggaggagcgggaggcccagggaccttgacgcccgccgggacaggcgcaggcacagccggcactaccggcatggggactgcaggcactacgggtaccgggttcggcggcctaggaccagcaggcatggacacagcggcggcggcggcggggggcttgctcctcctcccagaggctgggctgtgcgctgccctcgtcgcgctcctcctctccgccatcgtgctcgcgtgacgccttcacatgacctcggaaacaacaacctactgcctgcatgctagtagtagtagaaagcgctgcccttttgggaggtgtatgtagttcaggagtactctgattatctatggagaaagggtgggaattattgggc

SEQ ID NO: 1906 - protein, 199 aa, Zea mays
  misc_feature (21)..(105): Pfam Name: X8 Pfam Description: X8 domain
  misc_feature: Ceres Clone ID no. 222404
  misc_feature: Bit score of 233.3 for HMM based on sequences of Figure 10
  misc_feature: Functional Homolog Of SEQ ID NO. 1887
MEALLVTVLLLLLSSTLAAAQWCVCRQDASQAALQKTIDYACGSGADCNSIHETGACYNPNTVPAHCSWAANSYYQNNKAKGATCDFAGTATLTTSDPSSSGCSYPTTSASAAGTVTPTTGGTMGGAGGPGTLTPAGTGAGTAGTTGMGTAGTTGTGFGGLGPAGMDTAAAAAGGLLLLPEAGLCAALVALLLSAIVLA

SEQ ID NO: 1907 - DNA, 585 bp, Sorghum bicolor
  misc_feature: Ceres Annot ID no. 8656587
  misc_feature: Encodes the peptide sequence at SEQ ID NO. 1908
atgaaggcgctggtggtgacagtgcttctcctgctctcctccaccctcgccgtgtcacagtggtgcgtgtgcaggcaggacgcgacgcaggcggcgctgcagaagaccatagactacgcctgcggctccggggcggactgcaactccatccatgagaacggggcgtgctacaaccccaacaccgtcccggcgcactgctcctgggcggccaacagctactaccagaacaacaaggccaagggcgccacctgcgacttcaccggcaccgccaccctcaccaccagcgacccaagttcttctggctgctcttaccctaccagtgcaagcgccgctggaacgatgaccccgaccactggaggcacaatgggaggaaccccagggaccttcacgcccgggacaggcacaggcacaactggcactggcatggggacaggcactgccaccggaaccaccgggttcggcggcctaggaccaggcacaaacgctggcatggacacagcggcagcagcgggcttgctcctcccaacggctgggctggccactgccctcgctgcgctcctcttctcagccatcgtgctcgcatga

SEQ ID NO: 1908 - protein, 194 aa, Sorghum bicolor
  misc_feature (20)..(104): Pfam Name: X8 Pfam Description: X8 domain
  misc_feature: Ceres Annot ID no. 8656587
  misc_feature: Bit score of 231.7 for HMM based on sequences of Figure 10
  misc_feature: Functional Homolog Of SEQ ID NO. 1887
MKALVVTVLLLLSSTLAVSQWCVCRQDATQAALQKTIDYACGSGADCNSIHENGACYNPNTVPAHCSWAANSYYQNNKAKGATCDFTGTATLTTSDPSSSGCSYPTSASAAGTMTPTTGGTMGGTPGTFTPGTGTGTTGTGMGTGTATGTTGFGGLGPGTNAGMDTAAAAGLLLPTAGLATALAALLFSAIVLA

SEQ ID NO: 1909 - DNA, 1195 bp, Zea mays
  misc_feature: Ceres Clone ID no. 100818855
  misc_feature: Encodes the peptide sequence at SEQ ID NO. 1910
tctcccacacttgccagcccgctgcactgcactgcacacacgccctctcactcgctccccgctctagcctcgtcccaactcccagtcccgcatcgtctccgaaatctcttcatctaccggcggcgcaagcccgaccgcgctgcctctctctctctctctctccctcttcccactctccgtgcggagttctcttctctcgcgtgctcgcatatagtcgcatcgttagggcgcgtcctgggagagggaggccttcgctacctccgtggcagcgacagacgaccatgaaggcgctgctggtgacggtgcttctcctcctctcttccaccctcgccgcgtcacagtggtgcgtgtgcaggcaggacgcgtctcaggccgcgctgcagaagacgatcgactacgcgtgcgggtcgggggcggactgcaactccatccacgagacgggggcgtgctacaaccccaacaccgtcgcggcgcactgctcctgggcggccaacagctactaccagaacaacaaggccaagggcgccacctgcgacttcaccggcaccgccgccctcaccaccagcgacccaagttcttcaggctgctcttaccctaccggtgcaagcgccgttggaaccatgaccccgaccactgcaggcaccatgggaggaggaaccgcagggacctccacaggcacaggcacaggcacagccggcgctggcatggggacaggcactgccgccggaactgcgggtaccgggttcggcggcctaggaccaggcacggacgctagcatggacaccgcggcggcggcgggcttgctccttcccccaagagctggtgggctggccgccgccctcgccgcgcttttcctttccgccatggtgctcgcgtgacgcttttagtatggcctcggaaacatggcctgcctgttgctagtagaaagctagcactgcccttttggtaagggcgtttcaggagcactgtgctggactatatagagagatgctcctctgtgactgtgaccccctcccgttctgcgtactctgtaatttggtaggatgcctgtctctatcatgattcatgaaggacgattggtctgtcttttttttatcgtgctatttattaatcgtgtaaatgtactagcgaagggaaggcactggtagctaggttagctcgagtccggatggaatgataatgctactaatacaaa

SEQ ID NO: 1910 - protein, 198 aa, Zea mays
  misc_feature (20)..(104): Pfam Name: X8 Pfam Description: X8 domain
  misc_feature: Ceres Clone ID no. 100818855
  misc_feature: Bit score of 222.0 for HMM based on sequences of Figure 10
  misc_feature: Functional Homolog Of SEQ ID NO. 1887
MKALLVTVLLLLSSTLAASQWCVCRQDASQAALQKTIDYACGSGADCNSIHETGACYNPNTVAAHCSWAANSYYQNNKAKGATCDFTGTAALTTSDPSSSGCSYPTGASAVGTMTPTTAGTMGGGTAGTSTGTGTGTAGAGMGTGTAAGTAGTGFGGLGPGTDASMDTAAAAGLLLPPRAGGLAAALAALFLSAMVLA

SEQ ID NO: 1911 - DNA, 872 bp, Zea mays
  misc_feature: Ceres Clone ID no. 100920796
  misc_feature: Encodes the peptide sequence at SEQ ID NO. 1912
tctcgcgtgctcgcatatagtcgcatcgttagggcgcgtcctgggagagggaggccttcgctacctccgtggcagcgacagacgaccatgaaggcgctgctggtgacggtgcttctcctcctctcttccaccctcgccgcgtcacagtggtgcgtgtgcaggcaggacgcgtctcaggccgcgctgcagaagacgatcgactacgcgtgcgggtcgggggcggactgcaactccatccacgagacgggggcgtgctacaaccccaacaccgtcgcggcgcactgctcctgggcggccaacagctactaccagaacaacaaggccaagggcgccacctgcgacttcaccggcaccgccgccctcaccaccagcgacccaagttcttcaggctgctcttaccctaccggtgcaagcgccgttggaaccatgaccccgaccactgcaggcaccatgggaggaggaaccgcagggacctccacaggcacaggcacaggcacagccggcgctggcatggggacaggcactgccgccggaactgcgggtaccgggttcggcggcctaggaccaggcacggacgctagcatggacaccgcggcggcggcgggcttgctccttcccccaagagctggtgggctggccgccgccctcgccgcgcttctcctctccgccatggkgctcgsgkgacgcttttagtatggcctcggaaacatggccyscctgttgytagtaraaarctascmctscccttttggtaagggggtttcgggggccctgggctgggctatatagagagaggttcctttggggctgggcccccccccccttttgggttttttgtaatttggtgggaggccggtttttttcatgattca

SEQ ID NO: 1912 - protein, 201 aa, Zea mays
  misc_feature (20)..(104): Pfam Name: X8 Pfam Description: X8 domain
  misc_feature: Ceres Clone ID no. 100920796
  misc_feature: Bit score of 219.0 for HMM based on sequences of Figure 10
  misc_feature: Functional Homolog Of SEQ ID NO. 1887
  misc_feature (196)..(196): Xaa is any aa, unknown, or other
  misc_feature (198)..(198): Xaa is any aa, unknown, or other
  misc_feature (199)..(199): Xaa is any aa, unknown, or other
MKALLVTVLLLLSSTLAASQWCVCRQDASQAALQKTIDYACGSGADCNSIHETGACYNPNTVAAHCSWAANSYYQNNKAKGATCDFTGTAALTTSDPSSSGCSYPTGASAVGTMTPTTAGTMGGGTAGTSTGTGTGTAGAGMGTGTAAGTAGTGFGGLGPGTDASMDTAAAAGLLLPPRAGGLAAALAALLLSAMXLXXRF

SEQ ID NO: 1913 - protein, 198 aa, Zea mays
  misc_feature (20)..(104): Pfam Name: X8 Pfam Description: X8 domain
  misc_feature: Public GI ID no. 194698424
  misc_feature: Bit score of 220.9 for HMM based on sequences of Figure 10
  misc_feature: Functional Homolog Of SEQ ID NO. 1887
MKALLVTVLLLLSSTLAASQWCVCRQDASQAALQKTIDYACGSGADCNSIHETGACYNPNTVAAHCSWAANSYYQNNKAKGATCDFTGTAALTTSDPSSSGCSYPTGASAVGTMTPTTAGTMGGGTAGTSTGTGTGTAGAGMGTGTAAGTAGTGFGGLGPGTDASMDTAAAAGLLLPPRAGGLAAALAALLLSAMVLA

SEQ ID NO: 1914 - DNA, 1108 bp, Panicum virgatum
  misc_feature: Ceres Clone ID no. 1790958
  misc_feature: Encodes the peptide sequence at SEQ ID NO. 1915
cagctgaggtgagccgaagccgagcgcagctgccccatctctatccctccctccctggaggtctctcgcgtgctcacagggacaggggcgttcctcggccgggcgagcttcggtagcggcggaccatgaaggcgctggtggtggcggtgctgcttctgctctcctccaccctcgccgcgtcacaatggtgcgtgtgcaggcaggatgcgccgcaggccgcgctgcagaagaccatcgactacgcctgcggcgcgggggcggactgcaactccatccatgagaacgggccgtgctacaaccccaacaacgtccccgcgcactgctcctgggcggccaacagctactaccagaacaacaaggccaagggcgccacctgcgacttcaccggcaccgccactctcaccaccagcgacccaagttcttctggctgctctttcccaacaagtgcaagcgctgttggaacaatgaccccgactactggaggcacaatgggaggaaccccaggaacaggaaccttcacgcccggtgccggcaccaccggcaccaccggcactggcatgggaaccggcagtactactggaaccactggcactgggttcggtttaggaccagcaggcaccggcgccggtatggacactgcagcggcgggcttgctcccaagggctggtctggtcgccgtcctcaccatgctcttccccgccatcgcattcgcatgacatttgatccctagagacaagtccctactcctactagcagctagtagaaagtacaccacccttttggtaagcttgcttcaggaatgctctgatgatccatggagaaaggaagagaaacctaatgcatcctgtccgaaactccactagcggctgctaggtgtttggtgccgatggggattcatgggtggggtgtcgttttgtttctgtgtgaccacaccatgttcttctgcgtgctctgtaatttggtgggatggctgtctctgtcatgcaaggacgattgtctaccttttatttctgttattaatcatgtaaatgtagggaagccagtaggttagctagaggctggttgcaagagaatgctgctgggacaatgccatggtgtgcttttcatc

SEQ ID NO: 1915 - protein, 196 aa, Panicum virgatum
  misc_feature (20)..(104): Pfam Name: X8 Pfam Description: X8 domain
  misc_feature: Ceres Clone ID no. 1790958
  misc_feature: Bit score of 235.4 for HMM based on sequences of Figure 10
  misc_feature: Functional Homolog Of SEQ ID NO. 1887
MKALVVAVLLLLSSTLAASQWCVCRQDAPQAALQKTIDYACGAGADCNSIHENGPCYNPNNVPAHCSWAANSYYQNNKAKGATCDFTGTATLTTSDPSSSGCSFPTSASAVGTMTPTTGGTMGGTPGTGTFTPGAGTTGTTGTGMGTGSTTGTTGTGFGLGPAGTGAGMDTAAAGLLPRAGLVAVLTMLFPAIAFA

SEQ ID NO: 1916 - DNA, 997 bp, Zea mays
  misc_feature: Ceres Clone ID no. 445555
  misc_feature: Encodes the peptide sequence at SEQ ID NO. 1917
ctccgaaatctctccatctaccggcggcgcaagcccgaccgcgctgcctctctttatctctccctctccccagtctccgcgcgaagttctcttctctcgcgtgctcgcatagtcgcatcgttagggcgcgtcctgggagagggaggccttcgctacctccgtggcaacgacagacaaccatgaaggcgctgctggtgacggtgcttctcctcctctcttccaccctcgccgcgtcacagtggtgcgtgtgcaggcaggacgcgtctcaggccgcgctgcagaagacgatcgactacgcctgcgggtcgggggcggactgcaactccatccacgagacgggggcgtgctacaaccccaacaccgtcgcggcgcactgctcctgggcggccaacagctactaccagaacaacaaggccaagggcgccacctgcgacttcaccggcaccgccgccctcaccaccagcgacccaagttcttcaggctgctcttaccctaccggtgcaagcgccgttggaaccatgaccccgaccactgcaggcaccatgggaggaggaaccccagggacctccacaggcacaggcacaggcacaggcacagccggcgctggcatggggacaggcactgccaccggaactgcgggtactgggttcggcggcctaggaccaggcacggacgctagcatggacaccgcggcggcggcgggcttgctcgtccccccaagagctggtgggctggccgccgccctcgtcgcgcttctcctctccgccatggtgctcgcgtgacgcttggtatggcctcggaaacaaggcctgccttgttgctagtagaaagcactgcccttttggtaagggcgtttcaggagtactgtggtggactattgagagaaaggctcctcctctgtgactgtgactgtgaccacctcacgttctgcgtactctgtaatctggtaggatgcctgtctctatcatgattcatgaaggacgattggtctgtcttc

SEQ ID NO: 1917 - protein, 200 aa, Zea mays
  misc_feature (20)..(104): Pfam Name: X8 Pfam Description: X8 domain
  misc_feature: Ceres Clone ID no. 445555
  misc_feature: Bit score of 221.8 for HMM based on sequences of Figure 10
  misc_feature: Functional Homolog Of SEQ ID NO. 1887
MKALLVTVLLLLSSTLAASQWCVCRQDASQAALQKTIDYACGSGADCNSIHETGACYNPNTVAAHCSWAANSYYQNNKAKGATCDFTGTAALTTSDPSSSGCSYPTGASAVGTMTPTTAGTMGGGTPGTSTGTGTGTGTAGAGMGTGTATGTAGTGFGGLGPGTDASMDTAAAAGLLVPPRAGGLAAALVALLLSAMVLA

SEQ ID NO: 1918 - protein, 191 aa, Oryza sativa subsp. indica
  misc_feature (18)..(102): Pfam Name: X8 Pfam Description: X8 domain
  misc_feature: Public GI ID no. 125559073
  misc_feature: Bit score of 224.0 for HMM based on sequences of Figure 10
  misc_feature: Functional Homolog Of SEQ ID NO. 1887
MVVVALVLLMSSSLVASDWCVCRSDQPQAALQKTIDYACGAGADCNSIHEQGQCFNPNTVVAHCSWAANSYFQRNRAMGATCDFTGTATLTTSDPSVSGCSFPASASAAGTSTTPTMGGTTGTMTPGTFTPGTGMGTTTGTGMGTGTTTGTGLGGLGPTGTSSMDTAAAGLHLRAGLATFCAVLLLLVAIA

SEQ ID NO: 1919 - protein, 193 aa, Vitis vinifera
  misc_feature (21)..(106): Pfam Name: X8 Pfam Description: X8 domain
  misc_feature: Public GI ID no. 147767697
  misc_feature: Bit score of 283.1 for HMM based on sequences of Figure 10
  misc_feature: Functional Homolog Of SEQ ID NO. 1887
MAVLVYFVLFLAMTGHSSAAVYCVCKDGLSDQALQKTLDYACGAGADCSPVLQNGACYNPNTVKDHCSYAVNSYFQKKGQASGSCDFAGTATQSQTNPSSVSTCVYPTSASSTGSSTTPSTTTPSTTTPSTTTPSTTTPSSTTSPSVFGLGPSGSGGITSTDSSAAVAPLHCTDLFFSAALTLWLSGLVLLWG

SEQ ID NO: 1920 - protein, 194 aa, Oryza sativa subsp. japonica
  misc_feature (21)..(105): Pfam Name: X8 Pfam Description: X8 domain
  misc_feature: Public GI ID no. 115473199
  misc_feature: Bit score of 229.1 for HMM based on sequences of Figure 10
  misc_feature: Functional Homolog Of SEQ ID NO. 1887
MEAVVVAALVLLMSSSLVASDWCVCRSDQPQAALQKTIDYACGAGADCNSIHEQGQCFNPNTVVAHCSWAANSYFQRNRAMGATCDFTGTATLTTSDPSVSGCSFPASASGAGTSTTPTMGGTTGTMTPGTFTPGTGMGTTTGTGMGTGTTTGTGLGGLGPTGTSSMDTAAAGLHLRAGLATFCTVLLSFVAIA

SEQ ID NO: 1921 - DNA, 1217 bp, Zea mays
  misc_feature: Ceres Clone ID no. 212540
  misc_feature: Encodes the peptide sequence at SEQ ID NO. 1922
acaaggaagcacgcactcccccacacttgccagcccgctgcactgcacgtctgcagactgcacacagtcacacacgccctcccacatcgtctccaactctccatctaccggcggggcaaacggcaagcccgaccgctctctccctctccccagtctccgtgcggagttctcttctctcgcgtgctcgcatagtcgcatcgttagggcacgtcctgggagagggaggccttcgctacctccgtggcagcgacagacgaccatgaaggcgctggtggtgacggtgcttctcctcctctcttccaccctcgccgcggcacagtggtgcgtgtgcaggcaggacgcgtcacaggccgcgctgcagaagacgatcgactacgcctgcgggtcgggggcggactgcaactccatccacgagacgggggcgtgctacaaccccaacaccgtcgcggcgcactgctcctgggcggccaacagctactaccagaacaacaaggccaagggcgccacctgcgacttcaccggcaccgccgccctcaccaccagcgacccaagttcttcaggctgctcttaccctaccggtgcaagcgccgttggaaccatgaccccgaccactgcaggcaccatgggaggaggaaccccagggacctccacaggcacaggcacaggcacaggcacagccggcgctggcatggggacaggcactgccaccggaactgcgggtactgggttcggcggcctaggaccaggcacggacgctagcatggacaccgcggcggcggcgggcttgctcgtccccccaagagctggtgggctggccgccgccctcgtcgcgcttctcctctccgccatggtgctcgcgtgacgcttggtatggcctcggaaacaaggcctgccttgttgctagtagaaagcactgcccttttggtaagggcgtttcaggagtactgtggtggactattgagagaaaggctcctcctctgtgactgtgactgtgaccacctcacgttctgcgtactctgtaatctggtaggatgcctgtctctatcatgattcatgaaggacgattggtctgtctttattttgtcgtgttatttattaaccgtgtaaatgtactagcgaagggaaaggcactggtagctaggttagctcgagtccggatggaatgagaatgctactaatacaaacaatgccgtggtgtggtgtgtgtgtgtttttat

SEQ ID NO: 1922 - protein, 200 aa, Zea mays
  misc_feature (20)..(104): Pfam Name: X8 Pfam Description: X8 domain
  misc_feature: Ceres Clone ID no. 212540
  misc_feature: Bit score of 226.7 for HMM based on sequences of Figure 10
  misc_feature: Functional Homolog Of SEQ ID NO. 1887
MKALVVTVLLLLSSTLAAAQWCVCRQDASQAALQKTIDYACGSGADCNSIHETGACYNPNTVAAHCSWAANSYYQNNKAKGATCDFTGTAALTTSDPSSSGCSYPTGASAVGTMTPTTAGTMGGGTPGTSTGTGTGTGTAGAGMGTGTATGTAGTGFGGLGPGTDASMDTAAAAGLLVPPRAGGLAAALVALLLSAMVLA

SEQ ID NO: 1923 - DNA, 922 bp, Gossypium hirsutum
  misc_feature: Ceres Clone ID no. 1919739
  misc_feature: Encodes the peptide sequence at SEQ ID NO. 1924
aaactctctctctctctctctctctctctctctctctctctttcatttcttttctttttctctcccacaagttgcagttgcagagcttcgccattgttgtcttccttcaagctttttcagtttcttattcactcttcttcaacacccttttgatttttgctcttcaaccatggctgctttagtgcttccgctgctcatcctggctgccattactggccgctcaagtggcaactggtgtatatgcaaagatggtgtaagtgatacagtattgcagaagacactggactatgcatgtggtgcaggcgccgactgtaaccctatccacttgaagggatcctgttttaaccccgacactgttaaggctcattgcagttacgccgttaacagttacttccaaagaaaaggccaagctcaaggctcttgtgatttttccggcactgccaccgttactaccgctgaccccagctatactggttgtgctttcccatctagtgccagtaccgcaggcaccaccacaacaccaacaactacaccgtcatccaccacaccctcgtccgtgaacccaatcaacaacaccccaacaagcacaacaccattcggttcgacaacacctactggaatattgggaggagttggcaacggcttaggcccgtccggaactgggatcaacacagattacagtactgatggaggatttaggctgcaatactgcttctcttcctatgcaaccctcttgatttcaggattgatgctattgtggggttaaaagaagttacaagggaacatgttttctggtcattcagtcttgttctcttctagtgtatggtgttgttgatctaagaacatgtttgctaagggttttttttttttttttttggttatggattttaatcattttaaaagcatgacttttatgggtatg

SEQ ID NO: 1924 - protein, 198 aa, Gossypium hirsutum
  misc_feature (21)..(105): Pfam Name: X8 Pfam Description: X8 domain
  misc_feature: Ceres Clone ID no. 1919739
  misc_feature: Bit score of 360.7 for HMM based on sequences of Figure 10
  misc_feature: Functional Homolog Of SEQ ID NO. 1887
MAALVLPLLILAAITGRSSGNWCICKDGVSDTVLQKTLDYACGAGADCNPIHLKGSCFNPDTVKAHCSYAVNSYFQRKGQAQGSCDFSGTATVTTADPSYTGCAFPSSASTAGTTTTPTTTPSSTTPSSVNPINNTPTSTTPFGSTTPTGILGGVGNGLGPSGTGINTDYSTDGGFRLQYCFSSYATLLISGLMLLWG

SEQ ID NO: 1925 - DNA, 1114 bp, Triticum aestivum
  misc_feature: Ceres Clone ID no. 700212
  misc_feature: Encodes the peptide sequence at SEQ ID NO. 1926
aaaaaacccacgcgcacccgcacatcgcacacccaagcacactccctctggccgctgctcttgccccgtagccactctctcttcactcctctccttctcgaggcggccccttcttccgccggagctctccaccgcgctctgctcccgcctcgtcatggaggcgccgctgctggtggccgcgctgctgctcctgtcctcgaccctcgtcgtctccgagttctgcgtgtgcaggtcggagcagccgcaggcggcgctgcagaagaccatcgactacgcgtgcggggcgggggcggactgcaactcgatccacgagcaggggccgtgctacaaccccaacaacgtcgtctcgcactgctcctgggcggccaacagctacttccagaagaagagggccatgggcgccacctgcgacttcggcggcaccgccctcgtcgtctccaccgacccaagttcttcaggctgctcctacccctcaagtgcaagtgctgctggaacatcaacgaccccgaccgggactgggactgggatcggaggcacaacagggggaaccccaggcaccttcacgcccggtgccggcactagcaccggtggcatgggaggaaccggcacggggacggacaccaccaccgggttcggcggcctgggtccaacaggcacgagcaacatggacacggcagcggcggggttgcatccaaggtccggagcgcctgccttcctcgccgtgctcctctccttcctggcattcgcgtgaagttcgatcactcgctcacattcgccctgggtagaagaaagaaaccgctttggtaagcttgttgcagggctagcctgatccaaggacaaaggaagaaaaacctgatatatctgacggtgtgtcaatggcatgcacatggtttggtgccttttgtgtcccttgatctcttgctccgtaatttggtaagatggccgtcgctttcatgcatggacccttgtcttccttcctctcctctcctctgttcctcttgtaattctaggggagtagtagtagattagttgttcaaggttggtcggacgtcggaatgagaatgttgttggaacaagggcatgctagtatcaacttatgatcaggttcactccc

SEQ ID NO: 1926 - protein, 198 aa, Triticum aestivum
  misc_feature (21)..(105): Pfam Name: X8 Pfam Description: X8 domain
  misc_feature: Ceres Clone ID no. 700212
  misc_feature: Bit score of 240.9 for HMM based on sequences of Figure 10
  misc_feature: Functional Homolog Of SEQ ID NO. 1887
MEAPLLVAALLLLSSTLVVSEFCVCRSEQPQAALQKTIDYACGAGADCNSIHEQGPCYNPNNVVSHCSWAANSYFQKKRAMGATCDFGGTALVVSTDPSSSGCSYPSSASAAGTSTTPTGTGTGIGGTTGGTPGTFTPGAGTSTGGMGGTGTGTDTTTGFGGLGPTGTSNMDTAAAGLHPRSGAPAFLAVLLSFLAFA

SEQ ID NO: 1927 - DNA, 778 bp, Arabidopsis thaliana
  misc_feature: Ceres Clone ID no. 32195
  misc_feature: Encodes the peptide sequence at SEQ ID NO. 1928
aattcacacctcttgttaccttcaaaaccttctctcaatctcctccattatccttctctttttctctctccctgcaactggctccatcccaaagtgcttcgttctggtacagcgaccatggcagtttttgttcttgtgatgattttgttggccatggctggtcactcaagtgggacatggtgtgtatgcaaagaagggttaagcgaggsaatgctgcagaagacattggactacgcatgtggtgcaggagctgattgtggacccattcaccagaccgggccttgctttaaccctaacaccgtcaagtctcactgctcctacgccgtcaacagcttctttcagaagaaaggtcagtctctgggcacttgtgactttgctggcacagccaccttctcagcctctgatcccagctacactacttgtcctttccctgcaagtgccagtggaagtgggacaacgactccagtgacgacaacaccttcgacaagagtccctacaacaactaatacaagaccctacacaatcacaccatcaacaggaggaggtttgggaataccgtctggtattaacccggattacacagatccatcctttggattcaaactccaaagcccaagatttggattcatagtcttgttcactctcttcctacccttttacttgtttagctaactaagtgatcatgtgagtagtgtgtgtgggtctcaatctaatgtaatgatggaatctatggagatagagacatttttttgttccatctttgtctgtttttccagcc

SEQ ID NO: 1928 - protein, 184 aa, Arabidopsis thaliana
  misc_feature (20)..(104): Pfam Name: X8 Pfam Description: X8 domain
  misc_feature: Ceres Clone ID no. 32195
  misc_feature: Bit score of 389.5 for HMM based on sequences of Figure 10
  misc_feature: Functional Homolog Of SEQ ID NO. 1887
  misc_feature (31)..(31): Xaa is any aa, unknown, or other
MAVFVLVMILLAMAGHSSGTWCVCKEGLSEXMLQKTLDYACGAGADCGPIHQTGPCFNPNTVKSHCSYAVNSFFQKKGQSLGTCDFAGTATFSASDPSYTTCPFPASASGSGTTTPVTTTPSTRVPTTTNTRPYTITPSTGGGLGIPSGINPDYTDPSFGFKLQSPRFGFIVLFTLFLPFYLFS

SEQ ID NO: 1929 - protein, 211 aa, Populus balsamifera subsp. trichocarpa
  misc_feature (20)..(103): Pfam Name: X8 Pfam Description: X8 domain
  misc_feature: Public GI ID no. 118483133
  misc_feature: Bit score of 353.5 for HMM based on sequences of Figure 10
  misc_feature: Functional Homolog Of SEQ ID NO. 1887
MALLVLAMLMLAMTGRASCTWCVCKEMSDSVLQQTLDYACGAGADCGPVHQNGACFQPNTVRAHCNYAVNSYFQRKGQAQGTCDFKGTATVSASDPSINGCSYPSSVSAAGTSTTPTPVTATPTPVTTNPSTTTPSTTTPSTTTPSTTTPSSTTPTTPYSATPNGVLGGIGNGLGPSGAGINTDIPDAGLRLENTGLFSFFIILVVSSLML

SEQ ID NO: 1930 - DNA, 712 bp, Panicum virgatum
  misc_feature: Ceres Clone ID no. 1988594
  misc_feature: Encodes the peptide sequence at SEQ ID NO. 1931
cttttccttcgcttgtgacttgtgaggaggagccaaacaaggaaaacttcctggcgcctgctcgcctgccgttgcatttaaaaccccctcatcgcttcgaggattgagagttgcaccagggaagggacgccatcctgtcgaggttgctcaccgtcgccgccgtctgcaaacctcgcagccgccgcagcacagcgtgctccatggcggacgcggctcgcctcttcctgctggtggcggcggccgccgcgctcgccggccgctcagacggcgcctggtgcgtgtgccgctcggacctgggggacagcgcgctgcagaagacgctcgactacgcgtgcggcgccggcgccgactgcaagcccatcctgcagaacgcgccctgcttcgccccggacaccgtcagggcgcactgctcctacgccgtcaacagcttctaccagcgcaacaaccagaacgcgcaggcatgcgtcttctccggcaccgccgtgctttccaacaccgacccgagcggcaatggctgcacttaccctgcaaccccaagcgccgccgctacaagcaatggtggttcgcccggcgtttacagccccccgacgatggggccgtcagccctcaacgacaacagcggcgtgggtgttctcccggtggctggagttgctgctcggctggtgatcctagcctcctcgctcatggctctctacctgagcgcgtgatcacg

SEQ ID NO: 1931 - protein, 168 aa, Panicum virgatum
  misc_feature (24)..(108): Pfam Name: X8 Pfam Description: X8 domain
  misc_feature: Ceres Clone ID no. 1988594
  misc_feature: Bit score of 190.7 for HMM based on sequences of Figure 10
  misc_feature: Functional Homolog Of SEQ ID NO. 1887
MADAARLFLLVAAAAALAGRSDGAWCVCRSDLGDSALQKTLDYACGAGADCKPILQNAPCFAPDTVRAHCSYAVNSFYQRNNQNAQACVFSGTAVLSNTDPSGNGCTYPATPSAAATSNGGSPGVYSPPTMGPSALNDNSGVGVLPVAGVAARLVILASSLMALYLSA

SEQ ID NO: 1932 - DNA, 1130 bp, Triticum aestivum
  misc_feature: Ceres Clone ID no. 570432
  misc_feature: Encodes the peptide sequence at SEQ ID NO. 1933
actgcacactaccacactccccactctcccacgccacgccgactagcttcctccattaccctcctcctttgcttgcccagacctcggcgaggctccggcgagagagcgagagcgaaagctcccttccgctgctgcaatggcggttcctctggtgctcatgctcttggtcgccatgttcaccggctcagatgcgatgtactgcgtgtgcaagtcggacgcgaacccggtggcgatgcagaaggccatcgactacgcgtgcggcaagggcgccgactgcacccagatcacctccagcgggccctgcttccagccctcctccgtcgtcgcccactgctcctacgcctgcaacagctactaccagaagaacgccggcatgggcgccacctgcgatttcatgggcgtcgccaccctcaccggcgccgaccccagcgccggatcctgcaagtaccccgccagcgctagcggcgtcggcactggagcaggcaccggcaccggcggcatgggaaccggcggcacagggacaggcaccggaggcatgggaaccggcaccggaaccagcaccggaacgggcacgggcgtcggcaccggcaccagcaccggcggcatggggagcatgaccccgccgggcgcgaccagcaccgggatgccggggagccccttcggcggcggcgcgtacggcccgtctggcatgaaccaggactacagcgcagccgtggtcggtcgccgcgtggccgtcgcggggctcctcgtggcggcagccgcgccgctcctcctccacttcatctgatgcggtggtgaccactggttggccggcggaaaggcgcgtcggcaatgctggcgggtgcgacgccggattcggtgggcacgccccgccgcttttgtgtccggctcgctctctcgcctgcctttccggcgtctgcgtcgttttgatggttcgatcggacgtactagtagcgtagtgtctgtctgtctgtccatgagtgctagtactcttattaagctgaccaccccatgtggtgtttgtaccggtgcgggtcgtggtagagttgatgagatctggtaggggattctttcttccttctcgtagcggtgacggtgttccgagacatataattatgtgttgtcgttcc

SEQ ID NO: 1933 - protein, 216 aa, Triticum aestivum
  misc_feature (20)..(104): Pfam Name: X8 Pfam Description: X8 domain
  misc_feature: Ceres Clone ID no. 570432
  misc_feature: Bit score of 198.9 for HMM based on sequences of Figure 10
  misc_feature: Functional Homolog Of SEQ ID NO. 1887
MAVPLVLMLLVAMFTGSDAMYCVCKSDANPVAMQKAIDYACGKGADCTQITSSGPCFQPSSVVAHCSYACNSYYQKNAGMGATCDFMGVATLTGADPSAGSCKYPASASGVGTGAGTGTGGMGTGGTGTGTGGMGTGTGTSTGTGTGVGTGTSTGGMGSMTPPGATSTGMPGSPFGGGAYGPSGMNQDYSAAVVGRRVAVAGLLVAAAAPLLLHFI

SEQ ID NO: 1934 - DNA, 889 bp, Zea mays
  misc_feature: Ceres Clone ID no. 1444098
  misc_feature: Encodes the peptide sequence at SEQ ID NO. 1935
aataaaccccccttgtcgtcgcttcggttcaagcgaggaagagagagagagcgagagttgttagttgtacaaggggcgccggcggccgcattgtagagtacgttgagcttgttcactgccgtcgcggcctcaaagcaagccacatcatcgatggcggacgcagctcacctcttcctgctggtagcggtggccgccgcgctcgccggccgctcagacggcgcgtggtgcgtgtgccgcccggagctggcggacagcgcgctgcagaaggcgctggactacgcgtgcggcgccggcgccgactgcaagcccatcctgcagagcggcgcctgcttcgccccggacaccgtcaaggcccactgctcctacgccgtcaacagcttctaccagcgcaacagccagaacccgcaggcctgcgtcttctccggcaccgccacgctcagcaacagcgacccgagcggcaatggctgcacgtaccctgcgaccccaagtgctgctgcgacgacaagcaatagttcgcccggcgtgtacagccctcccacgatgggtccgacagccctcaacgacaacagcgctgctgccagcgtcctcccggtggctggactcaccaccgtgcggctgctgatcctggcctcctgctcgctcgtcgctctctgcatcggcgcgtgactcatgaggacgagacgcccctcggctgctgctgttttgggtgtgtcttgtttgttccttgccccttttcttctagtggcaggcagatggaaccttccggtggtggagcgcgagaaccccgaggcctcacaaatgccattctcgttgctgcgacttccgttcactttctcttatgtctgggcatgaggctatccgcaaccgttatccctaaatttttctcccc

SEQ ID NO: 1935 - protein, 171 aa, Zea mays
  misc_feature (24)..(108): Pfam Name: X8 Pfam Description: X8 domain
  misc_feature: Ceres Clone ID no. 1444098
  misc_feature: Bit score of 193.5 for HMM based on sequences of Figure 10
  misc_feature: Functional Homolog Of SEQ ID NO. 1887
MADAAHLFLLVAVAAALAGRSDGAWCVCRPELADSALQKALDYACGAGADCKPILQSGACFAPDTVKAHCSYAVNSFYQRNSQNPQACVFSGTATLSNSDPSGNGCTYPATPSAAATTSNSSPGVYSPPTMGPTALNDNSAAASVLPVAGLTTVRLLILASCSLVALCIGA

SEQ ID NO: 1936 - protein, 175 aa, Oryza sativa subsp. japonica
  misc_feature (25)..(109): Pfam Name: X8 Pfam Description: X8 domain
  misc_feature: Public GI ID no. 115455431
  misc_feature: Bit score of 205.1 for HMM based on sequences of Figure 10
  misc_feature: Functional Homolog Of SEQ ID NO. 1887
MAATAPRLLLMALMAATLAGRSEGAWCICRQDMPDSTLQKTLDYACGDGADCKPIQQSGACFSPDTVKAHCSYAVNSFYQRNNQNSQACVFSGTATLVTTDPSSNGCMYPASASAAGTGTPTSGTGGSTGVDGPPGMGLGPSSFNDNSGASLLPEVGTAMWILILACSIMVLNFS

SEQ ID NO: 1937 - DNA, 965 bp, Brassica napus
  misc_feature: Ceres Clone ID no. 949721
  misc_feature: Encodes the peptide sequence at SEQ ID NO. 1938
  misc_feature (477)..(477): n is a, c, t, g, unknown, or other
aaaagggttttgagaagagacaaagagggtacacactacatcactctcttcacaaaagaagtagccaacactctctctcttgtgttttctccactttctcttctcctttgctyttagagatctcttctatctctatcttcacactgtgacattttctctgaacgcatccatggctgctctggttctctcacttctcctactagccatggctggccattctagtgccgcatggtgtgtgtgcaagacagggctgagtgatgatgtgttacagaagaccatagactatgcttgtggaaatggagcagactgtaaccccactcacccaaaagcaccttgctttaaccctgacaatgttaggtctcactgcaactatgcggtcaacagcttcttccaaaagaagcgtcaagcttcaggcacttgtgatttcagtggcactgccactccaactaactctgatccaagttattcaggatgtancttccctactagtgcaagcggctctggaggcagcactaytggtacaaccaatccaaaaggcaactcaaccagcaccacacttcctggtggcaacagtccttactcaggaacctcaaccaatggagtttttggaaacaacagcacaggagccactgggacaggggtcaaccctgactacactacagaaagcagtgcctttgctytcaagaactcaagcaaactgctcacctgccttytcttgatcgcttcgagtgggttctgttctttcttgatgctctaaggatgttaatgttccctggtttttgttggtgcacttattgtcgtaaggacattggtctagcttaggggtaatctccgtcctgtgtgttctgagtctttatgtgcttgttgtaagaagatttcagctcttgcttgtgctcttgccacgtgatggtttctggtagacttaatcgtagtttaaaaacttatatataaatgatattttatct

SEQ ID NO: 1938 - protein, 195 aa, Brassica napus
  misc_feature (20)..(104): Pfam Name: X8 Pfam Description: X8 domain
  misc_feature: Ceres Clone ID no. 949721
  misc_feature: Bit score of 271.5 for HMM based on sequences of Figure 10
  misc_feature: Functional Homolog Of SEQ ID NO. 1887
  misc_feature (103)..(103): Xaa is any aa, unknown, or other
  misc_feature (116)..(116): Xaa is any aa, unknown, or other
  misc_feature (171)..(171): Xaa is any aa, unknown, or other
  misc_feature (182)..(182): Xaa is any aa, unknown, or other
MAALVLSLLLLAMAGHSSAAWCVCKTGLSDDVLQKTIDYACGNGADCNPTHPKAPCFNPDNVRSHCNYAVNSFFQKKRQASGTCDFSGTATPTNSDPSYSGCXFPTSASGSGGSTXGTTNPKGNSTSTTLPGGNSPYSGTSTNGVFGNNSTGATGTGVNPDYTTESSAFAXKNSSKLLTCLXLIASSGFCSFLML

SEQ ID NO: 1939 - DNA, 726 bp, Glycine max
  misc_feature: Ceres Clone ID no. 1341109
  misc_feature: Encodes the peptide sequence at SEQ ID NO. 1940
gcacccaccattctactacactcctctctctcactctcactctctgctccgtgatagctgtaccacgtttttctctccatctcgaaacaccatctctgcctcagtcccaacccatcaccattctcatggctgctctagctctagcacttcttcttctggctttcaccggcacttcaagtgctacatggtgcgtttgcaaggatggaagcgacgcgatcctgcagaagacgttagactatgcttgtggagctggtgctgactgtaaccctcttcacctaaacgggccttgttttcagcccaacaccgtcagggcccactgtaactacgccgtgaacagctacttccaaaagaagggtcaagctcaagggtcatgcgagtttgcgggaacagccactgttactgcatctgaccccagctctagcggttgtgtctacccttctagcgtcagcgctgcaggcactggtacaactcctgtgactactacaccaacaatgggcactactcctacaactggaactccatcaacaagcaccggcaccggcactggcaccggcaccaccactggtaccactccatacagcacaacacctggagtattaggaggcattggcagtggcatgggaccttcaggatccggcatgaacgatgaaagtcacggtggcattagatttgttcacagcagtagtttcttctcgatcgcgatcgccctcatctctgccttcatga

SEQ ID NO: 1940 - protein, 200 aa, Glycine max
  misc_feature (20)..(103): Pfam Name: X8 Pfam Description: X8 domain
  misc_feature: Ceres Clone ID no. 1341109
  misc_feature: Bit score of 368.8 for HMM based on sequences of Figure 10
  misc_feature: Functional Homolog Of SEQ ID NO. 1887
MAALALALLLLAFTGTSSATWCVCKDGSDAILQKTLDYACGAGADCNPLHLNGPCFQPNTVRAHCNYAVNSYFQKKGQAQGSCEFAGTATVTASDPSSSGCVYPSSVSAAGTGTTPVTTTPTMGTTPTTGTPSTSTGTGTGTGTTTGTTPYSTTPGVLGGIGSGMGPSGSGMNDESHGGIRFVHSSSFFSIAIALISAFM

SEQ ID NO: 1941 - DNA, 633 bp, Populus balsamifera subsp. trichocarpa
  misc_feature: Ceres Annot ID no. 1542841
  misc_feature: Encodes the peptide sequence at SEQ ID NO. 1942
atggctgttttagtgcttgcaatactcatgatggccatggctggtcgagcaagctgcacatggtgcgtttgcaaggaaatgggcaccccagtcctccagcagactctagactatgcttgtggagctggggctgactgtgttcctatccatcaaaatggtccttgtttcctacctaacactgtcagagctcattgcaattatgctgtcaacagctacttccaaaaaaagggtcaggctcaaggcgcttgtgatttcaaaggcgctgctatggtttctgcatctgatcctagcattaacggctgctcttacccttccagtgtcagcgctgcgggcaccggcacaactccaactccagtcggcacaactccaactccagtcggcacaactccaactactccggtcaccacaactccaactaacaccacaccctcgaccgcaaccccatctaccaccaccactccgtacactgcaacacctactggagtgctaggagggattggcactggtgtaggtccatcaggagccggaataaacacagacatcactgatgctggattcagacttgaaaacactggcttgttctcattctttataaccgttgtggtgtccagcttgatgttttggtgcggttga

SEQ ID NO: 1942 - protein, 210 aa, Populus balsamifera subsp. trichocarpa
  misc_feature (20)..(103): Pfam Name: X8 Pfam Description: X8 domain
  misc_feature: Ceres Annot ID no. 1542841
  misc_feature: Bit score of 335.3 for HMM based on sequences of Figure 10
  misc_feature: Functional Homolog Of SEQ ID NO. 1887
MAVLVLAILMMAMAGRASCTWCVCKEMGTPVLQQTLDYACGAGADCVPIHQNGPCFLPNTVRAHCNYAVNSYFQKKGQAQGACDFKGAAMVSASDPSINGCSYPSSVSAAGTGTTPTPVGTTPTPVGTTPTTPVTTTPTNTTPSTATPSTTTTPYTATPTGVLGGIGTGVGPSGAGINTDITDAGFRLENTGLFSFFITVVVSSLMFWCG

SEQ ID NO: 1943 - DNA, 832 bp, Arabidopsis thaliana
  misc_feature: Ceres Clone ID no. 33347
  misc_feature: Encodes the peptide sequence at SEQ ID NO. 1944
ctaaaagttatcagaatagaaatctctctctctcaacaagtctaacagtgccatttgtatctctgaactcaaaccatggctgctctggttctctaccttctcactctcctcatggctggccattccagtgcctcatggtgtgtgtgcaaaacagggctgagtgactcagtgctacaaaagacattagactatgcttgtggaaatggagctgactgtaacccaactcacccaaaaggctcttgcttcaatcctgacaatgttagggctcattgcaactatgcagtcaatagcttcttccaaaagaaaggtcaagcttctgagtcttgtaacttcactggtactgccactcttaccaccaccgatcccagctatacaggatgtgcattcccttctagtgctagtggttctagtggaagcggtagcaccaccgtgacgccaggcaaaaacagtccaaaaggaagcaacagcatcaccacatttcccggcggaaacagtccatacactggcacaccatccaccggattattaggaggcaatatcactgatgcaactggaaccgggttgaacccggattactcaaccgaaagcagtggatttgcgctctattactccaacaaccttctgttaaccggcttttgttctctcgtgatgatgctctgaagaagaatcaccgtcttcttttagtttatgcttagtcaaaaaaatatgttatttatatgttcttgttgttttagagataatttaatctggatttcggttcttttttactttccggttttaagaaaacaattatcaatgtaaaaccaaatctactatcgatcggtttggtacg

SEQ ID NO: 1944 - protein, 194 aa, Arabidopsis thaliana
  misc_feature (20)..(104): Pfam Name: X8 Pfam Description: X8 domain
  misc_feature: Ceres Clone ID no. 33347
  misc_feature: Bit score of 255.1 for HMM based on sequences of Figure 10
  misc_feature: Functional Homolog Of SEQ ID NO. 1887
MAALVLYLLTLLMAGHSSASWCVCKTGLSDSVLQKTLDYACGNGADCNPTHPKGSCFNPDNVRAHCNYAVNSFFQKKGQASESCNFTGTATLTTTDPSYTGCAFPSSASGSSGSGSTTVTPGKNSPKGSNSITTFPGGNSPYTGTPSTGLLGGNITDATGTGLNPDYSTESSGFALYYSNNLLLTGFCSLVMML

SEQ ID NO: 1945 - DNA, 1720 bp, Panicum virgatum
  misc_feature: Ceres Clone ID no. 1788006
  misc_feature: Encodes the peptide sequence at SEQ ID NO. 1946
actactccaacccagatatccaccaagacctctgcactagtgagcaataatggctgctcctgtccagagcaggaagctgcgcatcctcctcatgcccttcttcgcctctagccacatcggcccattcaccaacctcgccgtccacctcgcggctgcgcggtcggacatcgtcgaggccaccgtcgccgtcagcacggcgaacgccgcggtcgtgcggtcagctcttgcacggcagctgagccccggcagcgcgacggcggtgaggatagcgacgtacccgttcccggtggtggatggcctcccgccgggggtggagaacctctcgaccgtcaaggccgaggacgcgtggaggatctccgtcgccactttcgacgagaccgtgatgcggcccggccaggaagccctcatcagggagcactcgccggacgccatcatcagcgatgggcacttcttctggaacaccgacatcgccgccaatctcggcgtgccatgcatctctttccaagtcatcggaaccttcgcggcgacggccatcacacacctcagggatgccgacatccatggcatcgctgaaggaggtgtggtggctctgcctcgagctgaaggcggcggcgacatactgatcccgcacacggagctgcctgagttcgtgaggagccaggaaatcttggacggccccgtcatggatcggatcacctcgagcatcaaaaggtgcgccggccgggccgtgaacaccttctacgacctggagcaagggtactgcgacattttcgcgagcagtataaagacactgccctcctacttcgttgggcctctcgcgctgcagccggcggcggaggcgccggcagaaacaacaacaggagacagtgcaggagcagggcactcgccgccgtgcatcgaatggctggacagaatgccatctcgatcagttgtgttcctatgtttcggcagcttgacccatgtctccgatgcccagctcgtggagctagctctcgggcttgaagcctcggggaagccgttcctttgggccatcaggaaggatacatggtcgccgccggacgggtggatggatcgtgttggggagcggggcatgctcgtcaggggctgggcgccgcagacgcagatcctggaacaccaggcggtgggggcgttcgtgacccactgcggctggaactccgtgctagagacggtgagcgccggcgtgccggcgctgacgtggccgatggacttcgagcagttcatcatcgagcggctgctgaccgaagtcctggagatcggggagcggctgttcccggagggtgccggggtgcggagcaccaggcctcaggagcacgacctggtcacggccgaggtcgtggcgcaggcggtgaccaagttcatggagcccggaggcaggggagatgcggcgaggagacgggtgaaggagctctccgcccgggctcatgctgccgtggcggaaggcggctcctctcaccgcgacctgcaccgcctgatacacgacctcgtgcaagcaagaacagagccgcagcaaactaatagcagcaccctcgaaaagactattccgcacagcctctctgctgtggctagaagttgaacgactagctggtgctattctgaagcttcggaggtggaactggaagcatcgatgatgtattttgtatggctacacgtcggccaacacgaacaaagtagttttattgcaataaacttaggattcatt

SEQ ID NO: 1946 - protein, 514 aa, Panicum virgatum
  misc_feature (24)..(465): Pfam Name: UDPGT Pfam Description: UDP-glucoronosyl and UDP-glucosyl transferas
  misc_feature: Ceres Clone ID no. 1788006
  misc_feature: Bit score of 1346.7 for HMM based on sequences of Figure 25
  misc_feature: Functional Homolog Of SEQ ID NO. 1946
  misc_feature: in Figure 25
MAAPVQSRKLRILLMPFFASSHIGPFTNLAVHLAAARSDIVEATVAVSTANAAVVRSALARQLSPGSATAVRIATYPFPVVDGLPPGVENLSTVKAEDAWRISVATFDETVMRPGQEALIREHSPDAIISDGHFFWNTDIAANLGVPCISFQVIGTFAATAITHLRDADIHGIAEGGVVALPRAEGGGDILIPHTELPEFVRSQEILDGPVMDRITSSIKRCAGRAVNTFYDLEQGYCDIFASSIKTLPSYFVGPLALQPAAEAPAETTTGDSAGAGHSPPCIEWLDRMPSRSVVFLCFGSLTHVSDAQLVELALGLEASGKPFLWAIRKDTWSPPDGWMDRVGERGMLVRGWAPQTQILEHQAVGAFVTHCGWNSVLETVSAGVPALTWPMDFEQFIIERLLTEVLEIGERLFPEGAGVRSTRPQEHDLVTAEVVAQAVTKFMEPGGRGDAARRRVKELSARAHAAVAEGGSSHRDLHRLIHDLVQARTEPQQTNSSTLEKTIPHSLSAVARS

SEQ ID NO: 1947 - DNA, 1775 bp, Panicum virgatum
  misc_feature: Ceres Clone ID no. 1910014
  misc_feature: Encodes the peptide sequence at SEQ ID NO. 1948
acactacaccacagatatccaccaagacaactgcattagtgagccatggcttctcctgtcaagagcaggaagctgcgcatcctcctcatgcccttcttcgccactagccacatcggcccattcaccaacttcgccgtccacctcacggctgcgcggccggacatcatcgaggccaccatcgccatcagcacggcgaacgccgcggtcgtacagtcagctcttgcacggcagcagagccccggcagcgtgacagcggtgagggtggcgacgtacccgttcccggtgatggatggcctcccaccgggggtggagaacctctcgaccgtcaaggccgcggatgggtggcggatcgccgtcgccgctttcgacgagaccctgatgaggcccggacaggaaggcctcatcagggagcactcgccggacgtcatcatcaccgacgcgcacttcttctggaacaccgacgtcgccgccgatctcggcgtgccatgcgtcgctttccaagtcatcggaaccttcgcggcgacggccatgacgcacctcagggatattggcatccatggcatcgctgaaggtgtggtggctctgcctcgagctgaaggcggcggcgacatactgatcccgcacacggagctgcctgagttcgtgaggagccagaaaatcatggatggccccgtcatggatcgggtcagctcaagcatggtaaggtgtgccggccgggccgtgaacaccttcttcgacctggagcaagggtactgcgagattttcgcgagcggtataaagacgaagccctcctactttgttgggcccgtctcgttgccgccgccggcggcggcaccggcagtgacagcaggagacagcgcaggagcaggggactcgccgccgtgcatcgaatggctcgacagaatgccacctcgatcggttgtgttcctgtgtttcggcagcttgacccatgtctccgacgcccagctcgtggagctggctctcgggctcgaagcctcggggaagccgttcctgtgggtgatcaggagggatgcgtggtcgccgcccgatgagtggatggatcgcgttggggagaggggcatgctcgtcacgggctgggcgccgcagacgcggatcctggaacaccaggcggtgggggcgttcgtgacccactgcgggtggaactccgtcatggaaacggtgaccgccggcgtgccggcgctgacgtggccgatggacttcgagcagttcatcatcgagcggctgctgaccgaggtcctggcgatcggggagcggctgttcccggagggtgccggggtgcggagcaccaggcctgaagagcacgacgtggtcccggccgaggtcgtggcgcggtcggtggccaagttcatggagcccggaggcggggcagacgcggcgaggagacgggtgaaggagctctccgcccgggctcgtgctgccgtggcggaaggcggctcctctcaccgcgatctgcagcggctgatcgacgacctcgtgcaagcaagaacagagcagcagcaaagtaatagcagcacccaccaaaagactattcctcacagcctctctgctgtggcttgaagttgaagcgagtaagcgactagctggtgccattctgaagcttccgaggttgaagcatgccaacaccagcaaagtactagtttttattgcaataaacttaggattgagtatcttttctggaaaacttattgattactcgttggggttaataatctgaaacccacgtatgctcgtgggtttgaagtttgttgtgttcc

SEQ ID NO: 1948 - protein, 510 aa, Panicum virgatum
  misc_feature (24)..(463): Pfam Name: UDPGT Pfam Description: UDP-glucoronosyl and UDP-glucosyl transferas
  misc_feature: Ceres Clone ID no. 1910014
  misc_feature: Bit score of 1230.1 for HMM based on sequences of Figure 25
  misc_feature: Functional Homolog Of SEQ ID NO. 1946
MASPVKSRKLRILLMPFFATSHIGPFTNFAVHLTAARPDIIEATIAISTANAAVVQSALARQQSPGSVTAVRVATYPFPVMDGLPPGVENLSTVKAADGWRIAVAAFDETLMRPGQEGLIREHSPDVIITDAHFFWNTDVAADLGVPCVAFQVIGTFAATAMTHLRDIGIHGIAEGVVALPRAEGGGDILIPHTELPEFVRSQKIMDGPVMDRVSSSMVRCAGRAVNTFFDLEQGYCEIFASGIKTKPSYFVGPVSLPPPAAAPAVTAGDSAGAGDSPPCIEWLDRMPPRSVVFLCFGSLTHVSDAQLVELALGLEASGKPFLWVIRRDAWSPPDEWMDRVGERGMLVTGWAPQTRILEHQAVGAFVTHCGWNSVMETVTAGVPALTWPMDFEQFIIERLLTEVLAIGERLFPEGAGVRSTRPEEHDVVPAEVVARSVAKFMEPGGGADAARRRVKELSARARAAVAEGGSSHRDLQRLIDDLVQARTEQQQSNSSTHQKTIPHSLSAVA

SEQ ID NO: 1949 - protein, 497 aa, Zea mays
  misc_feature (12)..(486): Pfam Name: UDPGT Pfam Description: UDP-glucoronosyl and UDP-glucosyl transferas
  misc_feature: Public GI ID no. 194697480
  misc_feature: Bit score of 1323.4 for HMM based on sequences of Figure 25
  misc_feature: Functional Homolog Of SEQ ID NO. 1946
  misc_feature: in Figure 25
MATETAMPRKKMRILLMPFFATSHIAPFTDLAFHLVAARPDDVEATVAVTPANALVVQSALARRGASHLATVKVATYPFPSVDGLPPGVENHSKVKAAADAWRIDAVATDEKLMRPGQESLIREHAPDLVITDIHFWWNVDIATDIGAPCVTFHAMGTFPTLAMFNLSRAAGAVDAAGGVVTLPGFPPPEIQVPTTELPEMLRRQETADDRATGNAVHAAHRRCFGLAVNTFFDLEHGHCETFVGNGYVKRAYFVGPLSLSPSPSSPVAAGGGAYGSRCIDWLDKKPPQSVVYLCFGSLTHVSEAQLRELALGLEASEKPFLWVVRSETWAPPEGWEERVGDRGMVVTGWAPQTAILAHHAVGAFVTHCGWNSVLETVVAGVPVLTWPMVFEQFIAERFVTQVLAIGERLWPAGAGVRSTRSEEHELVPAGAVAQAVARFVEPGGPGDAARKRVKELSVKARAAMAEGGSSHHDLRAMIDDIMEEAGTAAAGPVLSG

SEQ ID NO: 1950 - DNA, 1581 bp, Miscanthus x giganteus
  misc_feature: Ceres Clone ID no. 2056605
  misc_feature: Encodes the peptide sequence at SEQ ID NO. 1951
tgcaaaagagatggcttccgctaggcagagcaacaagttccgcatcctcctgatgcccttcttcgccactagccatatcatcccccacaccgacctcgccttccacctcgtcgcggccaggcctcacgacgtcgaggccgccgttgcagtcactccggcaaacgccttggtcgtcgagtcagctctcgcccggggtggcgccagtcatcaggccacggtcaaggtggccacctacccgttcccatccgtggacggccttccaccgggagtggagaaccactccacggtcaaggccaccgacgcctggcgcatcgattccgtcgccatggatgagaagctgatgcggccagggcaagagagtctcatcagggagcactcgccggacctcgtcatcaccgacatacacttctggtggaacgtcgatgtcgccactgacatcggcgtgccatgcgtcacgttccacgccatcgggaccttcccaacgctggccatgtttaacttgtctgctgccggtgccatcgacgccggcggcggcgtggtgactcttccggggtttccaccgccagaaattcaggtcccaaccaccgagctacccgagatgcttaggaggcaacaaatgaccgatggtcgtgccacaggcaacccactaagctcagcgcacaagcggtgcttcggacgtgttgttaacacgttctttgatttggagcacaggcactgtggtatggtcgtaggcaatggttatgtgaagcgatcctacttcgtcgggcccctatcattgccgtcgccgcaggcggcaactggcgcctacgactcacagtgcatcgactggctggacaagaaaccaccccaatctgtggtgtacttgtgctttggcagcttgactcacgtctccgaggctcagctccgagagctagctcttgggttagaggcctctgggaagctattcctgtgggtggtcaggtccgagacatgggtgccaccggaggggtggaaggagcgtgttggggacaaggggatggtcgtcactggctgggctccgcagaccgtgatactgtctcaccgtgcagtgggtgcgtttgtgacacattgcgggtggaactcggtcctggaaacggtggtggctggcgtcccggtgctgacatggcctatggtgtttgagcaattcatcaccgagaggttcgtgacgaaagtgctggcaatcggagagcggttgtggccagagggtgctggggtgagaagcaccaggtccgaagaacatgagctgatccctgctgacgcagtggcactagcgctagccaggtttatggagcccggaggggctagggatgcaatgaggagtagagtcatggagctctccgcgaaggcccgtgcagccatggcggaaggtggctcttccaaccgtgatctgcgccgcatgattgatgatctcatggaagcaagaacggctgttgcagggccagttctttccatttgatttaagctcttgtggtgtcctgttgtatctgttttcaggtttcaaatgttacgcaattattttcgtcccgtggatggcaataatgttgaacgtattttgtttggttt

SEQ ID NO: 1951 - protein, 487 aa, Miscanthus x giganteus
  misc_feature (11)..(477): Pfam Name: UDPGT Pfam Description: UDP-glucoronosyl and UDP-glucosyl transferas
  misc_feature: Ceres Clone ID no. 2056605
  misc_feature: Bit score of 1236.0 for HMM based on sequences of Figure 25
  misc_feature: Functional Homolog Of SEQ ID NO. 1946
MASARQSNKFRILLMPFFATSHIIPHTDLAFHLVAARPHDVEAAVAVTPANALVVESALARGGASHQATVKVATYPFPSVDGLPPGVENHSTVKATDAWRIDSVAMDEKLMRPGQESLIREHSPDLVITDIHFWWNVDVATDIGVPCVTFHAIGTFPTLAMFNLSAAGAIDAGGGVVTLPGFPPPEIQVPTTELPEMLRRQQMTDGRATGNPLSSAHKRCFGRVVNTFFDLEHRHCGMVVGNGYVKRSYFVGPLSLPSPQAATGAYDSQCIDWLDKKPPQSVVYLCFGSLTHVSEAQLRELALGLEASGKLFLWVVRSETWVPPEGWKERVGDKGMVVTGWAPQTVILSHRAVGAFVTHCGWNSVLETVVAGVPVLTWPMVFEQFITERFVTKVLAIGERLWPEGAGVRSTRSEEHELIPADAVALALARFMEPGGARDAMRSRVMELSAKARAAMAEGGSSNRDLRRMIDDLMEARTAVAGPVLSI

SEQ ID NO: 1952 - DNA, 1674 bp, Panicum virgatum
  misc_feature: Ceres Clone ID no. 1914331
  misc_feature: Encodes the peptide sequence at SEQ ID NO. 1953
gatgctctacaccggctgccccagccagcccagccaccggctgaagattgcaaggaaccatgcccatggcctcccctccgccgcagagagagaagctgcgcgtccttctcatccccttcttcgccaccagccacatcggccccttcgcggacctcgccttccacctcgccgcggcccggccgggtgtcgtcgaggccaccgtcgccgtcaccccagcgaacgtcccggtcctccggtcggcgctcgcccggcgcggtcccagccgccacgccgccgcggtccagatcgcgacgtacgcgttcccggccgtggacggcctcccaccaggggtcgagaaccactccgccgtcaaggctgcggacgcgtggcgcatcgacgccgtcggcagcgacgagcagctaatgcggccagggcacgagggcctcgtcaaggacctctcgcccgacgcgatcgtctccgacatactcttccactggaacaccgacatcgccgccagtgtcggcgtgccgtgcgtcacgctccacgccatgggggcgttcccgatgctggccctgtcctgtttgacaggtgccgaggccacaggcggggcggtggctcttcccgggtttctaccaccggacgtacggatcccagtcaccgagctgcctgaggggttgaggagccagagtcaagacggcgtccgcgccagccgagaccaattaacttcagcgcacagtagctgtttcggactcatcgtgaacactttcttcgatctggaggacaggtattgcgaaatgtacatgcggcacatgaaacacgcctacttcgtcgggcccttgtcactgccgccgccaccgcagctggccgccggcgacgacggctcacggtgcatcgactggctggacaggaagccagcccagtcggtcgtgtacttgtgcttcggcaccttgtctcacacatctgaggctcagccccgcgagctcgccctcgggttagaagcctccgggaagccgttcctgtgggtggtcaggctggaggaatgggtgctgccggaggggtggaaggagcgcgtcggggacagagggatggtcgtcacagggtgggccccgcagacggcgatccttgcacacccggcggtgggggcgttcgtgacgcactgcgggtggaactcggtccaggagaccgtcgcggccggcatgccggtgctgacgtggccgaaggtgttcgagcagttcatcactgagaggttcgtgacggaggtgctcaagattggcgaacgcctgtggccggagggtgccggggtgaggagcacgaggtacgaagagcacgagctggtcccgagcgaggcagtggcacgagcggtggccaagttcatggagcccggaggggcaggggacgccgcgaggagcagggccaaggagctctccgcaaaggctcatgcggccatggcggaaggtgggtcctcgcacggcgacctgcgacgcctgattgatgatctcatcaaagaaaaatcggctggtgcagggacgacggtctgatactctggtttgagctcatgaagcttgtctttttttttcctttaagaataagagtgtctcatttatttctctgttttcggtttggattttccactgtttggttagcaagctccggtgttagtaatcctgtgcacgcctgtagttagaactgcattgc

SEQ ID NO: 1953 - protein, 485 aa, Panicum virgatum
  misc_feature (14)..(477): Pfam Name: UDPGT Pfam Description: UDP-glucoronosyl and UDP-glucosyl transferas
  misc_feature: Ceres Clone ID no. 1914331
  misc_feature: Bit score of 1030.9 for HMM based on sequences of Figure 25
  misc_feature: Functional Homolog Of SEQ ID NO. 1946
MPMASPPPQREKLRVLLIPFFATSHIGPFADLAFHLAAARPGVVEATVAVTPANVPVLRSALARRGPSRHAAAVQIATYAFPAVDGLPPGVENHSAVKAADAWRIDAVGSDEQLMRPGHEGLVKDLSPDAIVSDILFHWNTDIAASVGVPCVTLHAMGAFPMLALSCLTGAEATGGAVALPGFLPPDVRIPVTELPEGLRSQSQDGVRASRDQLTSAHSSCFGLIVNTFFDLEDRYCEMYMRHMKHAYFVGPLSLPPPPQLAAGDDGSRCIDWLDRKPAQSVVYLCFGTLSHTSEAQPRELALGLEASGKPFLWVVRLEEWVLPEGWKERVGDRGMVVTGWAPQTAILAHPAVGAFVTHCGWNSVQETVAAGMPVLTWPKVFEQFITERFVTEVLKIGERLWPEGAGVRSTRYEEHELVPSEAVARAVAKFMEPGGAGDAARSRAKELSAKAHAAMAEGGSSHGDLRRLIDDLIKEKSAGAGTTV

SEQ ID NO: 1954 - DNA, 1760 bp, Panicum virgatum
  misc_feature: Ceres Clone ID no. 1886911
  misc_feature: Encodes the peptide sequence at SEQ ID NO. 1955
caaactcctctaacgatcgatctgacttgttaaagcatcgagatgctctacactccagctgccccagccagccagccaccggcggaagattgcaaggaaaccatggcagcctcccctccgccgccgagcaagaagctgcgcgtccttctcatccccttcttcaccaccagccacatcggccccttcgcggacctcgccttccacctcgccgcggcccggccgggcgccgtcgaggccaccgtcgccgtcaccccggcgaacgtcccggtcctccggtcggcgctcgcccggcgcggccccggccccgacggcgccgccccggtccagatcgcgacgtacgcgttcccgcccgtggacggcctcccgccggaggtggagaaccactccgccgccagcgccgcggacgcgcagcgcatcgacgacgccgccggcgacgagcagctgatgcggccgcggcacgagggcctcatcagggaccactcgcccgacgccgtcgtctccgacctgcacttctactggaacgccgacatcgccgccgccaccggcgtgccgtgcgtcacgttccacgtcataggggtgttcccgatgctggcccagttctgcttgacgggtgcggaggccgccggcggggcggtgactcttcccgagtttctggccggaccggacacacggatcccggtcaccgagctgccggaggtggtgaggaaccagcggccggaggacagcgccaggggagcccgagcaagctcagcgcacaacgggggcttcgggctcgtcgtcaactctttcttcgatttggagaacaagtattgcgacatgtacgcgagccacatgaaacgcgcctacttcgtcgggcccttgtcgctgccgccgccaccgtcgccgccggccgccggcgacggcgacgacggctccggctgcatcgactggctggataggaagccggccgggtcggtcgtgtacctgtgcttcggcagcttgacacacatgtccgaggctcagctccgcgagctcgccctcgggttggaagcctccgggaagccgttcctgtgggtggtcaggtcggcggcggcggcgtcggcgctgccggaggggtggaaggagcgtgtcggggacagagggatggccgtcacggggtgggccccgcagacggcgatcctcgcgcacccggcggtgggggcgttcgtgacgcactgcgggtggaactcggtgctggagaccgccgcggccggcgtgccggtgctgacgtggccgatggtgttcgagcagttcctcaccgagaggttcgtgacgcgggtgctggggatcggcgagcgcctgtggccggagggcgccggggtgaggagcacgaggtacgaagagcacgagctggtcccgagcgaggcggtggcgcgagcggtgaccgggttcatggagcccggaggggcgggggaggccgcgaggagcagggtcaaggagctcgccgccaaggctcacgcggccatggcggaaggtgggtcctcgcacggcgacctgcgccgcctgattgatgatctcatccaagaaagaacggctggcgcagggacgacgccatagtctgatgccctgatcggttctagctcatgatgaagcaagcgtgtctctttttttttaagaataagcgtgtcgcatttatctgtctgttttcggtttggattttccactgtttggttagtaagctccagtacacctgagcttcaagatcttattttcagaataagatgacgtatttcacctcttcc

SEQ ID NO: 1955 - protein, 510 aa, Panicum virgatum
  misc_feature (46)..(502): Pfam Name: UDPGT Pfam Description: UDP-glucoronosyl and UDP-glucosyl transferas
  misc_feature: Ceres Clone ID no. 1886911
  misc_feature: Bit score of 1003.1 for HMM based on sequences of Figure 25
  misc_feature: Functional Homolog Of SEQ ID NO. 1946
MLYTPAAPASQPPAEDCKETMAASPPPPSKKLRVLLIPFFTTSHIGPFADLAFHLAAARPGAVEATVAVTPANVPVLRSALARRGPGPDGAAPVQIATYAFPPVDGLPPEVENHSAASAADAQRIDDAAGDEQLMRPRHEGLIRDHSPDAVVSDLHFYWNADIAAATGVPCVTFHVIGVFPMLAQFCLTGAEAAGGAVTLPEFLAGPDTRIPVTELPEVVRNQRPEDSARGARASSAHNGGFGLVVNSFFDLENKYCDMYASHMKRAYFVGPLSLPPPPSPPAAGDGDDGSGCIDWLDRKPAGSVVYLCFGSLTHMSEAQLRELALGLEASGKPFLWVVRSAAAASALPEGWKERVGDRGMAVTGWAPQTAILAHPAVGAFVTHCGWNSVLETAAAGVPVLTWPMVFEQFLTERFVTRVLGIGERLWPEGAGVRSTRYEEHELVPSEAVARAVTGFMEPGGAGEAARSRVKELAAKAHAAMAEGGSSHGDLRRLIDDLIQERTAGAGTTP

SEQ ID NO: 1956 - DNA, 1479 bp, Sorghum bicolor
  misc_feature: Ceres Annot ID no. 8733425
  misc_feature: Encodes the peptide sequence at SEQ ID NO. 1957
atggccacaaccaaagctaagccgagaaagaagttgcggatcctgctcatgcccttcttcgccaccagccacatcggccccttcacggacctcgcattccacctcgtcgtggccaggcctcacgacgtcgaggccaccattgcagtcactccggcaaatcaatcggtcgtacagtcatctctcgagcggcgtggtggcaccagtcaggccacgatcaaggtggccacgtacccattcccgttcgtggatggccttccaccgggtgtggagaaccaatccacagtcaaggttgccgacacctggcgcatcgattccgtcgccatggacgagaagatgatgcggccagggcaggagagtctcattagggagcgctcgccagacctcgtcatcaccgacgtacacttctggtggaacgttgatgtcgctaccgacatcggcgtgccatgcatgatgttccatgtcatagggaccttcccaacgttggccatgtttgatttatcgcatgctgctcgtgcgatcgatgccgccgatggcaagttggtgactcttcccgagtttctagcgccagaaattcaggtcccaaccacagagctacctgagatgctagggagacaacaaataaccgatgactgtgctatagagaaccggatggactcggcgcacaagaggtgttttggacttattgttaacacattctttgatttggagcacaggcactgtgatatgttcgtaggcaatggtcaagtgaagcgtgcctactttgtcgggcccctattgttgccgtcgccaccacaggtggcagttggcacatacgactcaaggtgcatcgattggctagataagaattctcccctgtctgtggtgtacttgtgcttcggcagcttgactcatgtctcagaggctcagctccatgaagtagctcttggattagaggcctctaagaggccattcttgtgggtgatcaggtcagagacatgggtgccaccggagggatggaaggatcgtgttgggaacagggggttggtcgtcactggatgggctccgcagaccgtgatactggtgcaccgtgcggtgggtgtgtttgtgatgcattgcgggtggaactcggtcctggaaacggtggtggctggcgtgccggtactgacatggcctatggtgtttgagcaattcatcacagagaggttcgtgacaaaagtgttggcaatcggcgagcggctgtgggcggaggatgctggggtgagaagcacaaggtttgaagagcatgggttggtccctgctgaggcagtggcacaggcactggccaagtttatggagcccggaggggctggtgatgtagcgaggagtagagtaaaggagctctctgcaaaggctcatgcagccatggcggaaggcggctcttcccaccgtgatctgcgtcgcatgattgatgacctcatggaagcaggaatagctgctgcagggccagccctttctgtataa

SEQ ID NO: 1957 - protein, 492 aa, Sorghum bicolor
  misc_feature (13)..(482): Pfam Name: UDPGT Pfam Description: UDP-glucoronosyl and UDP-glucosyl transferas
  misc_feature: Ceres Annot ID no. 8733425
  misc_feature: Bit score of 1323.2 for HMM based on sequences of Figure 25
  misc_feature: Functional Homolog Of SEQ ID NO. 1946
  misc_feature: in Figure 25
MATTKAKPRKKLRILLMPFFATSHIGPFTDLAFHLVVARPHDVEATIAVTPANQSVVQSSLERRGGTSQATIKVATYPFPFVDGLPPGVENQSTVKVADTWRIDSVAMDEKMMRPGQESLIRERSPDLVITDVHFWWNVDVATDIGVPCMMFHVIGTFPTLAMFDLSHAARAIDAADGKLVTLPEFLAPEIQVPTTELPEMLGRQQITDDCAIENRMDSAHKRCFGLIVNTFFDLEHRHCDMFVGNGQVKRAYFVGPLLLPSPPQVAVGTYDSRCIDWLDKNSPLSVVYLCFGSLTHVSEAQLHEVALGLEASKRPFLWVIRSETWVPPEGWKDRVGNRGLVVTGWAPQTVILVHRAVGVFVMHCGWNSVLETVVAGVPVLTWPMVFEQFITERFVTKVLAIGERLWAEDAGVRSTRFEEHGLVPAEAVAQALAKFMEPGGAGDVARSRVKELSAKAHAAMAEGGSSHRDLRRMIDDLMEAGIAAAGPALSV

SEQ ID NO: 1958 - DNA, 1707 bp, Panicum virgatum
  misc_feature: Ceres Clone ID no. 1754974
  misc_feature: Encodes the peptide sequence at SEQ ID NO. 1959
ctcaagccaaaggccaccgcataatacaatggcttcagctgcaaagcagagcaagaagctgcgcatccttgtgatgcccttcttcgccaccagccacatcctccccttgacagaccttgccttccacctcgccgcagttaggccggacgatgtcgaggtcgtcgtcgccgtaaccccggcaaacgcccccattgttcggtcagcccttgcaaggcgtgagccgagccatgccagcgtcgacgtcgccacctacgccttcccagcggtggacggcctcccaccaggggtcgagaacatgtccaccgtctcagccgcggactcatggcggctcgagatagcagccactgatgaggcgctgctcaggccggctcaggagagtctcgtcagggagagctcccctgacgccatcgtcagcgacctgcacttcttccggtggaacgctggtattgccgccgaacttgggatcccctgtgttcttttcaatgtcgtgggtattttctcgacgctagctacgtggcgccttgccttaagcggcaatgttaaggacacccctgctggtagttcggtgaccattcctcagatccccggtccagaaataagtatgccagttaccgagctatcagagtttttgaggaacccaccggtatttgacccgagcgcaggtgctcacttcatgatgttgcttaagagttgtggctttatctccaacactttctttgatcttgagcatgagtactgtgagagccacgagcacagcggctatgtgaagcgaacctactgtgttggcccgctttcactgcccatgtcaccaccagcaagagccggtgctgctggcagatcagcttgcctggattggatggacacaaagcctgcccactccgttgtatacctgtgcttcggcagcctgacaaacttttcggaggctcaacttgatgagctagccctcgggctagaagcctctggtgtgccgttcttgtgggttgtcagggttaaaacatgggagccaccggtagggtggaaagatcgtgttgggagcagaggcatggttttcaaaggttgggcaccacaaaccgatatactccagcacccagcgctgggggctttcgtgacgcaatgcgggtggaactccgtcctggagacaattgcggtcggcgtgcctgttctgacatggcccatggtgtacgagcagttcctcactgagaggtttgtgactcatgtgctacaaatcggggagcgcctgtggccggagggcgctgggcggcgtagcacgaggtatgcagagcatgatgtgatccctgctaaggacattgcgcaatctattgccaagttcatggagcatggaggtgctgcggaagccgcgaggaggagggcaatggaactctctccaaaggctcatgcggctattgcagaaggcggaacctctaaccgtgatctgcatcagcttattgatgattttatagcagcaagagggcctacaacgtcatgaatacattgagaatccaggtggaacgcaaggattaatttcatgaagaggggggaggtggctacctatagatgccacatggtgtttcaagaataaaagttgttgtcccgcaaccggttcactgcaaaatgtgtctgcgagcagacatctcagagatgatatgtatttgtaattttaataaactagttgaatgcccatgcattgctacgggagtcgattttttt

SEQ ID NO: 1959 - protein, 485 aa, Panicum virgatum
  misc_feature (12)..(480): Pfam Name: UDPGT Pfam Description: UDP-glucoronosyl and UDP-glucosyl transferas
  misc_feature: Ceres Clone ID no. 1754974
  misc_feature: Bit score of 874.6 for HMM based on sequences of Figure 25
  misc_feature: Functional Homolog Of SEQ ID NO. 1946
MASAAKQSKKLRILVMPFFATSHILPLTDLAFHLAAVRPDDVEVVVAVTPANAPIVRSALARREPSHASVDVATYAFPAVDGLPPGVENMSTVSAADSWRLEIAATDEALLRPAQESLVRESSPDAIVSDLHFFRWNAGIAAELGIPCVLFNVVGIFSTLATWRLALSGNVKDTPAGSSVTIPQIPGPEISMPVTELSEFLRNPPVFDPSAGAHFMMLLKSCGFISNTFFDLEHEYCESHEHSGYVKRTYCVGPLSLPMSPPARAGAAGRSACLDWMDTKPAHSVVYLCFGSLTNFSEAQLDELALGLEASGVPFLWVVRVKTWEPPVGWKDRVGSRGMVFKGWAPQTDILQHPALGAFVTQCGWNSVLETIAVGVPVLTWPMVYEQFLTERFVTHVLQIGERLWPEGAGRRSTRYAEHDVIPAKDIAQSIAKFMEHGGAAEAARRRAMELSPKAHAAIAEGGTSNRDLHQLIDDFIAARGPTTS

SEQ ID NO: 1960 - DNA, 1740 bp, Panicum virgatum
  misc_feature: Ceres Clone ID no. 1988346
  misc_feature: Encodes the peptide sequence at SEQ ID NO. 1961
accatcggcatatttaaggccacggctcctacaccatcaaaaaaaaaccttctcaagccaaaggccaccgcatactacaatggcttcagctgcaaagcagagcaagaagctgcgcatccttgtgatgcccttcttcgccaccagccacatcctccccttgacagaccttgccttccacctcgccgcagttaggccggacgatgtcgaggtcgtcgtcgccgtaaccccggcaaacgcccccattgttcggtcagcccttgcaaggcgtgagccgagccatgccagcgtcgacgtcgccacctacgccttcccagcggtggacggcctcccaccaggggtcgagaacatgtccaccgtctcagccgcggactcatggcggctcgagatagcagccactgatgaggcgctgctcaggccggctcaggagagtctcatcagggagagctcccctgacgccatcgtcagcgacctgcacttcttccggtggaacgctggtactgccgccgaacttgggatcccctgtgttcttttcaatgtcgtgggtattttctcgacgctagctacgtggcgccttgccttaagcggcaatgttaaggacacccctgctggtagttcggtgaccattcctcagatccccggtccagaaataagtatgccagttaccgagctatcagagtttttgaggaacccaccggtatttgacccgagcgcaggtgctcacttcatgatgttgcttaagagttgtggctttatctccaacactttctttgatcttgagcatgagtactgtgagagccacgagcacagcggctatgtgaagcgaacctactgtgttggcccgctttcactgcccatgtcaccaccagcaagagccggtgctgctggcagatcagcttgcctggattggctggacacaaagcctgcccactccgttgtatacctgtgcttcggcagcctgacaaacttttcggaggctcaacttgatgagctagccctcgggctagaagcctctggtgtgccgttcttgtgggttgtcagggttaaaacatgggaaccaccggtagggtggaaagatcgtgttgggagcagaggcatggttttcaagggttgggcaccacaaaccgacatactccagcacccagcgctgggggctttcgtgacgcaatgcgggtggaactccgtcctggagacaattgcggtcggcgtgcctgttctgacatggccaatggtgtacgagcagttccttactgagaggtttgtgactcatgtgctacaaatcggggagcgcctgtggccggagggcgctgggcggcgtagcacgaggtatgcagagcatgatgtgatccctgctaaggacattgcgcaatctattgccaagttcatggagcatggaggtgctgcggaagccgcgaggaggagggcaatggaactctctccaaaggctcatgcggctattgcagaaggcggaacctctagccgtgatctgcatcagcttattgatgattttatagcagcaagagggcctacaacgtcatgaatacattgagaatccaggtggaacgcacggattaatttcatgaagaggggggaggtggctacctatagatgccacatggtgtttcaagaataaaagttgttgtcccgcaaccggttcactgcaaaatgtgtctgcgagcagacatctcagagatgatatgtatttgtaattttaataaactagttgaatgcccatgcattgct

SEQ ID NO: 1961 - protein, 485 aa, Panicum virgatum
  misc_feature (12)..(480): Pfam Name: UDPGT Pfam Description: UDP-glucoronosyl and UDP-glucosyl transferas
  misc_feature: Ceres Clone ID no. 1988346
  misc_feature: Bit score of 879.4 for HMM based on sequences of Figure 25
  misc_feature: Functional Homolog Of SEQ ID NO. 1946
MASAAKQSKKLRILVMPFFATSHILPLTDLAFHLAAVRPDDVEVVVAVTPANAPIVRSALARREPSHASVDVATYAFPAVDGLPPGVENMSTVSAADSWRLEIAATDEALLRPAQESLIRESSPDAIVSDLHFFRWNAGTAAELGIPCVLFNVVGIFSTLATWRLALSGNVKDTPAGSSVTIPQIPGPEISMPVTELSEFLRNPPVFDPSAGAHFMMLLKSCGFISNTFFDLEHEYCESHEHSGYVKRTYCVGPLSLPMSPPARAGAAGRSACLDWLDTKPAHSVVYLCFGSLTNFSEAQLDELALGLEASGVPFLWVVRVKTWEPPVGWKDRVGSRGMVFKGWAPQTDILQHPALGAFVTQCGWNSVLETIAVGVPVLTWPMVYEQFLTERFVTHVLQIGERLWPEGAGRRSTRYAEHDVIPAKDIAQSIAKFMEHGGAAEAARRRAMELSPKAHAAIAEGGTSSRDLHQLIDDFIAARGPTTS

SEQ ID NO: 1962 - DNA, 1832 bp, Triticum aestivum
  misc_feature: Ceres Clone ID no. 918401
  misc_feature: Encodes the peptide sequence at SEQ ID NO. 1963
gctagcagtagtaattcgcaaagaaaatggcctctacggaaaccactggcagcagcaagaagctgcgcgtgctcctcatccccttcttcgcctccagccacatcggacccttcaccgagctcgccgttagccttgcgacggccagaccacaggccgtagaggccaccatcgcggtgacgccggcgaacgtgccgctcgtccggtcgttgctccagccgcacgagaacggcagtggcataccggtgaaggtggcgacgtacccgttcccggccgtggacggcctccccaagggcgtcgagaacctcggtgcggcagcgcaggccgacgcatggcgcatcgacgtggctgcgctgagcgatacactgatgcggcccgtccaggaaacgctcatcagggcgcagtcaccggacgcgctcgtcaccgacgtgcacttcatgtggaacgccggcgtctgcgacgacctcggcgtgccatgcgtcacgttcaacgtcatcggtgccttctcgacgatcgcgatgcggcatctattgggccgcgtttccaacggcgagccggaggtggtgaccaccatccctcggtttccggcccccgagatacgagtgccggcggtggagctgccggagtacttgaggagccaacggaagggtggccaatccaccttccaccggctctatgcggtgcaaggtgactgcttcgggctggccgtcaacacgtcaccagctctggaggagcactactgcgggatgtacgtgggcaatggctacgcgaagcgtgcgtacatgctaggcccgctgtcaccgcgactgccgtcgtcaccggaagccggcgactcacggtacaccgactggcttgactcgaagccgagccggtcggtggtgtacctgtgcttcggcagcctcgcccacgtctccgacgctcagctggacgagctcgctctcgggctcgaggcctcagggatggcgttcctgtgggtggtgaggacggacaagtggtctcccccggagcggtggcacgagcgtgttggaggcaggggaatggtggccaccgcctgggctccgcaaagggctatcctggggcaccgggcggtgggggccttcgtgacgcactgcggatggaactccgtcctggagacggtggcggcgggcgtgccggtgctcacatggcccatagtgttcgagcagttcatcaccgagaggctgctcacgcaggtcctagggatcggggagcggctgtggccggacggcgccggcgttcggagcacgaggtatgaagaaaacgaggtaatccccgcccaagatgtggcacgggcattgacgaccttcatgcagcctggagggccgggggatgcggcgaggagaagagtcatggaactggccgccaaggttcacgccgcggtggcggaaggaggatcctccgaccgtgatctgcaccgcttgatagatgacctcatggaagctgccggtgccggtgccggaaggacgacgatatgaagtcagacttgctcaaaatccttactattgaatggtcggtcagtctcatcagctatcttatctcacctgtatgcctgagttcgtataattttgtaagttgtttgcttttcatcttttcttttctgggctgtagcccggtggcaaggacacagttgtgcatccttacggatcgaggttctacaaccgtccgaagcgaattttcacgaaatcacccggatcagcttcttctataaaaatatgtcgtgggtagtgtccatggatctttttttcttcttttctttacaatcacctttttccttgtaagaaatccaaacgaagccttaataaatgttttgtctgccg

SEQ ID NO: 1963 - protein, 487 aa, Triticum aestivum
  misc_feature (14)..(478): Pfam Name: UDPGT Pfam Description: UDP-glucoronosyl and UDP-glucosyl transferas
  misc_feature: Ceres Clone ID no. 918401
  misc_feature: Bit score of 1274.5 for HMM based on sequences of Figure 25
  misc_feature: Functional Homolog Of SEQ ID NO. 1946
  misc_feature: in Figure 25
MASTETTGSSKKLRVLLIPFFASSHIGPFTELAVSLATARPQAVEATIAVTPANVPLVRSLLQPHENGSGIPVKVATYPFPAVDGLPKGVENLGAAAQADAWRIDVAALSDTLMRPVQETLIRAQSPDALVTDVHFMWNAGVCDDLGVPCVTFNVIGAFSTIAMRHLLGRVSNGEPEVVTTIPRFPAPEIRVPAVELPEYLRSQRKGGQSTFHRLYAVQGDCFGLAVNTSPALEEHYCGMYVGNGYAKRAYMLGPLSPRLPSSPEAGDSRYTDWLDSKPSRSVVYLCFGSLAHVSDAQLDELALGLEASGMAFLWVVRTDKWSPPERWHERVGGRGMVATAWAPQRAILGHRAVGAFVTHCGWNSVLETVAAGVPVLTWPIVFEQFITERLLTQVLGIGERLWPDGAGVRSTRYEENEVIPAQDVARALTTFMQPGGPGDAARRRVMELAAKVHAAVAEGGSSDRDLHRLIDDLMEAAGAGAGRTTI

SEQ ID NO: 1964 - DNA, 1613 bp, Zea mays
  misc_feature: Ceres Clone ID no. 353187
  misc_feature: Encodes the peptide sequence at SEQ ID NO. 1965
agcaacagccatggcttcagcgaagcagagcaagaagatgcgcatacttctgatcccattcttcgccaccagccacatcgggccctacatcgacttcgccgtccgtctcgcggcagccaggccaggagccgtcgagcccaccgtcgccgtgaccccggccaatgttgcggtggtccggtcggcgctcgagcgccacggccccgcggcgagcggcacggtcaggatcgtcacgtacccgttcccgcgcgtggatggcctcgctccgggcgtggagaacctctccaccgccggagacgacgcgtggcgcatcgacgccgccgccatcgacgaggccctctcgcggccggcgcaggaggcgctcctcagggagcggtcccccgacgccgtcgtgtcggactaccacttcttctggaccagcagcatcgccgccgagctgggcctgccgtgcgtcgttttcagtgtcatcgcccccttctcgggtctcgtcatgcgcatcctcgccggcgccgtcgtctctgggtcgcgtgacgttaccgttcccgggttgccagggccggagatacggatccccgtcagcgagctgccggagttcctgagacgcccggcgaaggaccaaggcacgttcagcccctgcaacgcggcgcaggccaggtgtttgggcgtcgcctacaacacgttcgcaggcatggagcaggagtaccgcgaggcgaacgtgcgcgccaaatccttgaagcgctgctacttcgtcggccccgtctcactgccgctgccggcggcagcggcaggcaccagcgagtctccatgcatcaggtggctcgactccaggccaaactgctcggtggtgtacgtgtgcttcggcacctacgccgccatctcggaggaccagctccgggagctggcgctcggcctggaggcctcaggggagccgttcctgtgggtggtgagggccgacgggtggacgccgccggagggctgggagcagcgcgtcggggagagggggatgctggtgagagggtgggctccgcagacggcggtgctggcccatccagcggtgggcgcgttcctgacgcactgcgggtcgagctcgttgctggaggcggcggcggccggcgtgccgatgctgacgtggccgctggtgttcgaccagttcatcgaggagaggctggtgacggacgtgctcgggatcggggagcgggtctggagtggggcgcggagcacgaggtacgaggagagggagctcgtgccggcggaggcggtggctcgggcggtggcgaggttcttggagccaggcgggccgggggaggcggcgaggggcagggcgcgggatctcgcagtgaaggcccacgctgccgtagcggagggcggctcgtcgtcccgtgatctgcatcgcctcatcgacgacctggtcgaagccagagcggcaacgagcagctgcaacgctgacagcgagtaagagatggaattgctggagatgtctcgatctggcgagcaactggaagaaggtctcgaacagccttcacggacaagtacgccatctgcaacgtacgtacgttctcggagtcgaagaaaacacttatggaaataatatggtactgcaccacctcgatttctgt

SEQ ID NO: 1965 - protein, 480 aa, Zea mays
  misc_feature (24)..(469): Pfam Name: UDPGT Pfam Description: UDP-glucoronosyl and UDP-glucosyl transferas
  misc_feature: Ceres Clone ID no. 353187
  misc_feature: Bit score of 975.2 for HMM based on sequences of Figure 25
  misc_feature: Functional Homolog Of SEQ ID NO. 1946
MASAKQSKKMRILLIPFFATSHIGPYIDFAVRLAAARPGAVEPTVAVTPANVAVVRSALERHGPAASGTVRIVTYPFPRVDGLAPGVENLSTAGDDAWRIDAAAIDEALSRPAQEALLRERSPDAVVSDYHFFWTSSIAAELGLPCVVFSVIAPFSGLVMRILAGAVVSGSRDVTVPGLPGPEIRIPVSELPEFLRRPAKDQGTFSPCNAAQARCLGVAYNTFAGMEQEYREANVRAKSLKRCYFVGPVSLPLPAAAAGTSESPCIRWLDSRPNCSVVYVCFGTYAAISEDQLRELALGLEASGEPFLWVVRADGWTPPEGWEQRVGERGMLVRGWAPQTAVLAHPAVGAFLTHCGSSSLLEAAAAGVPMLTWPLVFDQFIEERLVTDVLGIGERVWSGARSTRYEERELVPAEAVARAVARFLEPGGPGEAARGRARDLAVKAHAAVAEGGSSSRDLHRLIDDLVEARAATSSCNADSE

SEQ ID NO: 1966 - DNA, 1712 bp, Panicum virgatum
  misc_feature: Ceres Clone ID no. 1726495
  misc_feature: Encodes the peptide sequence at SEQ ID NO. 1967
aaaaaaaaccttctgaagccaaagccaccgcatacaacaatggtttcagctgctatgcagagcaagaagctgcgcatccttgtggtgcccttcttcgccaccagccacatcctccccatgacagacctcgccttccacctcgccgcggttaggccggacgatgtcgaggtcgtcgtcgccgtaaccccggcaaacgcccccattgtgcagtcagcccttgcaaggcgcgagcccagccatgccagcgttgaggtcgcgacctacgccttcccaaaggtagacgggctcccaccaggggtcgagaacatgtccaccgtcacggtcgcgaactcaccgctcctcgaggcagcagccactgatgaggcgctaattaggccagctcaggagagcctcatcagggagagctcgcctgatgccatcgtcagcgacctgcacttcttccggtggaacgctggtattgccgccgaacttgggatcccctgtgttctattcaatgtcgtgggtattttctcgacgctagctacgtggcgccttgctttaagtggcattgttaaggacacccctcctgctagttcggtgaccgttcctcagttacccggtccagaaataagtctgccagttactgagctgtcagagtttttgaggaacccaccggaatttggcaaggacgcaggtgcttacttcatgatgttgctcaagagctctggctttatttccaacactttctatgatctcgagcatgagtactgtgagagctacgcggaaagcggctatgtgaagcgaacctactgtgttggtccgctttcactgcccttgccaccaccagcaagagcaggtactggccgctcagcttgcttggattggctggacacaaagcctgcccactccgttgtgtacttgtgcttcggcagcctgacaaacttttctgatgttcaacttaatgagctagccctcggactggaagcctctggtgtgccattcttgtgggttgttagggttaaaacatgggagccaccggtagggtggaaagaccgtgtagggaatagaggcatggttgtcatgggttgggccccacaaaccgatatactccagcacccagcactgggggcatttgtgacccaatgcgggtggaactccatcctggagacaattgcggttggcgtgcctgtcttgacatggccaaaggtgtacgagcagttcatcactgagaggtttgtgactcatgtgttgcaaatcggggagcgcctgtggccggagggtgctgggcggcgtagcacgaggagtgcagagcatgaagtgatccctgctaaggaaattgcgcaatctgttgccaagttcatgggacatggaggtgctgcagaagccgcgaggagaagggtaaaggaactttctccaaaggctcatgcggctttggcagaaggcggaacctctaaccgtgatctgcatcagcttattgatgatttcattgctgcaaaagcatctgctgctgggactacgacgtcatgaaaagattgagaatccaggtggaacgcaaggtttaatttcatgaagaagggggaggtggctatctatgcatgtgccatggtgtttcaagaataaaagtttgttgtcccgcaaacggttcactgtaaaatgtatctgcgagcggacatttcaaagatgatatgtattggtacttttaataaatttaaagtatcgcattgttgttggtc

SEQ ID NO: 1967 - protein, 488 aa, Panicum virgatum
  misc_feature (12)..(479): Pfam Name: UDPGT Pfam Description: UDP-glucoronosyl and UDP-glucosyl transferas
  misc_feature: Ceres Clone ID no. 1726495
  misc_feature: Bit score of 862.2 for HMM based on sequences of Figure 25
  misc_feature: Functional Homolog Of SEQ ID NO. 1946
MVSAAMQSKKLRILVVPFFATSHILPMTDLAFHLAAVRPDDVEVVVAVTPANAPIVQSALARREPSHASVEVATYAFPKVDGLPPGVENMSTVTVANSPLLEAAATDEALIRPAQESLIRESSPDAIVSDLHFFRWNAGIAAELGIPCVLFNVVGIFSTLATWRLALSGIVKDTPPASSVTVPQLPGPEISLPVTELSEFLRNPPEFGKDAGAYFMMLLKSSGFISNTFYDLEHEYCESYAESGYVKRTYCVGPLSLPLPPPARAGTGRSACLDWLDTKPAHSVVYLCFGSLTNFSDVQLNELALGLEASGVPFLWVVRVKTWEPPVGWKDRVGNRGMVVMGWAPQTDILQHPALGAFVTQCGWNSILETIAVGVPVLTWPKVYEQFITERFVTHVLQIGERLWPEGAGRRSTRSAEHEVIPAKEIAQSVAKFMGHGGAAEAARRRVKELSPKAHAALAEGGTSNRDLHQLIDDFIAAKASAAGTTTS

SEQ ID NO: 1968 - DNA, 1497 bp, Sorghum bicolor
  misc_feature: Ceres Annot ID no. 8733426
  misc_feature: Encodes the peptide sequence at SEQ ID NO. 1969
atggcttcagcaaagcagagcaagaagttgcgcatacttctgatcccattcttcgccacaagccacatcggcccctacaccgacctcgccgtccgtctcgcagcggccaggcctggctccgtcgagccctccatcgccgtgaccccggctaacgtcacggtggttcggtccgccctcgagcggcacggccctgcggcgagcggcgtcgtcaagatcgtcacctacccgttcccgtgcgtggacggcctcgctccgggcgtcgagaacctctccactgccggagacgacgcgtggcgcatcgacgccgccgccatcgatgagtccctgtcgcggccggcacaggaggcgctcctccgggagcaggtccccgacgccgtcgtcacggacttccacttcttctggaacagcagcatcgccgccgaactcggcttgccgagcgtcgttttcaatgtcatcggccccttcgcggggctcgtcatgaagctcctcagcggcgccgtcgtcagtggcggcggcactgactctgagtcccatgaggttgccgttcccgggttgccggggccggagatacggatccccgtcagcgagctgccggagttcttgagatgcccagcgaacgtccaaggcacgttcaatccttgcatcgcggcgatggccaggtgcttgggcgtcgccttcaacacgttcgcagacttggagcaggagtacggcgaggcgcgcgtgcgcgtcggatctttgaagcgcggctacttcgtcggcccggtctcactgccattgccaccggccgccgcaagcatcagcgagtctccctgcatcaggtggctcgactccaagccgagctgctcggtggtgtacgtgtgcttcggcacctacgccgccatctcgggcgatcagctccgggagctggcgctcggcctggaagcctcagggacgccgttcctgtgggcggtgagggccgacggatgggcgccgccggagggctgggaggagcgcgtcggggagagggggatgctggtgagagggtgggcgccgcagacggcgatactggcccatccagcggtgggcgcgttcctgacgcactgcgggtccagctcgctgctggaggcggcggcggccggcgtgccgatgctgacgtggccgctggtgttcgaccagttcatcgaggagcggctggtgacggaggtcctcaagatcggggagcgagtctggagcggggcgcggagcacgaggtacgaggagagggagctcgtgccggcggaggccgtggctcgggcggtgggaaggttcttggaggcaggtgggacgggggaggcggcgaggggcagggcgcgggatctcgccgtgaaggcccacgccgccgtagaggaaggcggctcgtcgtcccgtgatctgcaccgcctcatcgacgacttgatcgaagccagagcggctgccggcgtggcaaccttgccgtcagctgcacccgtggaaacgagcaccgatgctgacggcgagtag

SEQ ID NO: 1969 - protein, 498 aa, Sorghum bicolor
  misc_feature (24)..(475): Pfam Name: UDPGT Pfam Description: UDP-glucoronosyl and UDP-glucosyl transferas
  misc_feature: Ceres Annot ID no. 8733426
  misc_feature: Bit score of 980.8 for HMM based on sequences of Figure 25
  misc_feature: Functional Homolog Of SEQ ID NO. 1946
MASAKQSKKLRILLIPFFATSHIGPYTDLAVRLAAARPGSVEPSIAVTPANVTVVRSALERHGPAASGVVKIVTYPFPCVDGLAPGVENLSTAGDDAWRIDAAAIDESLSRPAQEALLREQVPDAVVTDFHFFWNSSIAAELGLPSVVFNVIGPFAGLVMKLLSGAVVSGGGTDSESHEVAVPGLPGPEIRIPVSELPEFLRCPANVQGTFNPCIAAMARCLGVAFNTFADLEQEYGEARVRVGSLKRGYFVGPVSLPLPPAAASISESPCIRWLDSKPSCSVVYVCFGTYAAISGDQLRELALGLEASGTPFLWAVRADGWAPPEGWEERVGERGMLVRGWAPQTAILAHPAVGAFLTHCGSSSLLEAAAAGVPMLTWPLVFDQFIEERLVTEVLKIGERVWSGARSTRYEERELVPAEAVARAVGRFLEAGGTGEAARGRARDLAVKAHAAVEEGGSSSRDLHRLIDDLIEARAAAGVATLPSAAPVETSTDADGE

SEQ ID NO: 1970 - DNA, 1446 bp, Sorghum bicolor
  misc_feature: Ceres Annot ID no. 8733429
  misc_feature: Encodes the peptide sequence at SEQ ID NO. 1971
atggccgcgcccgagtccagcaagaagctgcgcatccttctcatgcccttcttcgccaccagtcatatcggcccgttcaccgacctcgccgtccgccttgccacagccagcccggacgccgtcgagctcactctggctgtcactccggcgaacgtccacgtggttcgctcggccctcgggcggcacggcgccgaggcgagcgccgtggtcaagatcaccacctacccgttcccgcgcgtggacggcctcgccccgggcgtggagaacctctcggtcgccggagacgacgggtggcgcattgacgccgtcgccgtcgacgaggccctgacgcgaccggtgcaggaggcgctcatcagggaacagtcccctgacgctgtcatcaccgacatccacttcgtcatctggaacagcgccgtggccggcgaactcggcgtgccgtgcgtcacgttcagcgtcgttggcatcttctcgacgctcgtcatgtaccacctcggccgtgccgccgccgccggcgtcgtcgtcagagatggccaggaggtgatcgtcccagagttcccggggccggagatacgggtccccgtatccgagttgccggagttcctgagacgcccaccggagcacgacgtgatcagccagtgccatgtggcgatgggcaggtgcttcggcgtcgccatcaactcgttcgtggatctggagcagccatactgcgacatgtgcgtgcgcagcggatacctcaagcgcgcctacttcgtcggccccctctcgctgccgttaccaccggccggagcaagcggcggcgactcgccgtgcgtcgcgtggctcggcaccaagccgagattttcggtggtgtacgtatgcttcggcaccttcgctgccatctcggaggagcagctccgggagctggcgcttgggctagaagcctctgggaagccattcctgtgggtggtgagggccggcggctggacgccgccggagggctgggaggagcgcgtcggtgagagggggatgctggtgagagggtgggcgccgcagacggcgatactggcccatccagcggtgggcgcgttcctgacgcactgtgggtccagctcgctgctggaggcggcggcggccggcgtgccgatgctgacgtggccgctggtgttcgaccagttcgtcgaggagaggctggtgacggaggtcctcaagatcggggagagggtgtggagcgggccgcggagcacgagatacgaggagcagacgctcgtgccagcagaggcggtggcgcgagcggtggcaaggttcttggagccgggcggcaccggcgaggcggcgaggagcagggcgggggtgctcgccgccaaggcacgctcggctgtggcggagggcggctcgtcattttgtgatctgcgccgtctcgtcgatgatctgatcgaagcaagaacggctgccggaacccctgcctga

SEQ ID NO: 1971 - protein, 481 aa, Sorghum bicolor
  misc_feature (24)..(474): Pfam Name: UDPGT Pfam Description: UDP-glucoronosyl and UDP-glucosyl transferas
  misc_feature: Ceres Annot ID no. 8733429
  misc_feature: Bit score of 993.5 for HMM based on sequences of Figure 25
  misc_feature: Functional Homolog Of SEQ ID NO. 1946
MAAPESSKKLRILLMPFFATSHIGPFTDLAVRLATASPDAVELTLAVTPANVHVVRSALGRHGAEASAVVKITTYPFPRVDGLAPGVENLSVAGDDGWRIDAVAVDEALTRPVQEALIREQSPDAVITDIHFVIWNSAVAGELGVPCVTFSVVGIFSTLVMYHLGRAAAAGVVVRDGQEVIVPEFPGPEIRVPVSELPEFLRRPPEHDVISQCHVAMGRCFGVAINSFVDLEQPYCDMCVRSGYLKRAYFVGPLSLPLPPAGASGGDSPCVAWLGTKPRFSVVYVCFGTFAAISEEQLRELALGLEASGKPFLWVVRAGGWTPPEGWEERVGERGMLVRGWAPQTAILAHPAVGAFLTHCGSSSLLEAAAAGVPMLTWPLVFDQFVEERLVTEVLKIGERVWSGPRSTRYEEQTLVPAEAVARAVARFLEPGGTGEAARSRAGVLAAKARSAVAEGGSSFCDLRRLVDDLIEARTAAGTPA

SEQ ID NO: 1972 - protein, 493 aa, Zea mays
  misc_feature (24)..(479): Pfam Name: UDPGT Pfam Description: UDP-glucoronosyl and UDP-glucosyl transferas
  misc_feature: Public GI ID no. 194701962
  misc_feature: Bit score of 949.9 for HMM based on sequences of Figure 25
  misc_feature: Functional Homolog Of SEQ ID NO. 1946
MASAKQSKKTRILVIPFFASSHIGPHTDFAVRLAAARPGVVEPTVAVTPANVTVVRSALERHGPAASGTVKIVTYPFPCVDGLAPGVENLSTAGADAWRINAAAIDEALSRPAQEALLREQSPDAVVTDFHFFWNSIIAAELGLPCVVFSVIGPFSGLIMHLLSGAAVVGDGGSESESREVAVPGLPEPEIRIPVSELPEFLRRPAKGQGTLNPCNAAMARCLGVAYNTFAGLEQEYREASMRVASLKRSYFVGPVSLPLPPAAAGVTEPPCIRWLHSKPSCSVVYVCFGTYAAISGEQLRELALGLEASGKPFLWVVRAGDGWAPPDGWAERVGERGMLVRGWAPQTAVLAHPAVGAFLTHCGSSSLLEAAAAGVPMLTWPLVFDQFIEERLVTDALGIGERVWSGARSTRYEEREVVPAEAVARAVERFLEPGGPGEAARGRARDLAVKAHAAVAEGGSSSRDLQRLIDDLVEGRAAAGVPTSPSVASVGT

SEQ ID NO: 1973 - protein, 486 aa, Oryza sativa subsp. japonica
  misc_feature (30)..(473): Pfam Name: UDPGT Pfam Description: UDP-glucoronosyl and UDP-glucosyl transfer
  misc_feature: Public GI ID no. 115464717
  misc_feature: Bit score of 1218.9 for HMM based on sequences of Figure 25
  misc_feature: Functional Homolog Of SEQ ID NO. 1946
  misc_feature: in Figure 25
MASTDRSKKLRVLLIPFFATSHIGPFTDLAVRLVTARPDAVEPTIAVTPANVSVVRSALERHGSAATSVVSIATYPFPEVAGLPRGVENLSTAGADGWRIDVAATNEALTRPAQEALISGQSPDALITDAHFFWNAGLAEELGVPCVSFSVIGLFSGLAMRFVTAAAANDDSDSAELTLAGFPGAELRFPKSELPDFLIRQGNLDGIDPNKIPQGQRMCHGLAVNAFLGMEQPYRERFLRDGLAKRVYLVGPLSLPQPPAEANAGEASCIGWLDSKPSRSVLYVCFGTFAPVSEEQLEELALGLEASGEPFLWAVRADGWSPPAGWEERVGERGVLVRGWVPQTAILSHPATAAFLTHCGSSSLLEAVAAGVPLLTWPLVFDQFIEERLVTDVLRIGERVWDGPRSVRHEEAMVVPAAAVARAVARFLEPGGAGDAARLRAQELAAEAHAAVAEGGSSYRDLRRLVDDMVEARAAGGEAAAAPQPQ

SEQ ID NO: 1974 - protein, 484 aa, Oryza sativa subsp. indica
  misc_feature (24)..(473): Pfam Name: UDPGT Pfam Description: UDP-glucoronosyl and UDP-glucosyl transferas
  misc_feature: Public GI ID no. 125534461
  misc_feature: Bit score of 995.2 for HMM based on sequences of Figure 25
  misc_feature: Functional Homolog Of SEQ ID NO. 1946
MASAERSKKLRVLLMPFFATSHIGPCTDLAVRLAAARPDVVEPTLAVTPANVSVVRSALRLHGSAASTVVSIATYPFPEAAGLPPGVENLSTAGDERWRVDAAAFDEAMTWPAQEALIKDQSPDVLITDFHFSWNVGIAEELAMPCVQLNVIGLFSTLAVYLAAAVVNDSDSEELTVAGFPGPELRIPRSELPDFLTAHRNLDLVDNMRKLVQVNTRCHGFAVNSFLFLDKPYCEKFMCNGFAKRGYYVGPLCLPQPPAVASVGEPTCISWLDSKPSRSVVYICFGTFAPVSEEQLHELALGLEASGKPFLWAVRAADGWAPPAGWEERVGDRGLLVRDWVPQTAILAHSATAAFLTHCGWNSVLEGVTAGVPLLTWPLVFEQFITERLVMDVLRIGERVWDGARSVRYKEAALVPAAAVARAVARFLEPGGAGDAARIRAQDFAAEAHAAVAEGGSSYGDLRRLIDDLVEARADAGESALQPL

SEQ ID NO: 1975 - protein, 484 aa, Oryza sativa subsp. japonica
  misc_feature (24)..(473): Pfam Name: UDPGT Pfam Description: UDP-glucoronosyl and UDP-glucosyl transferas
  misc_feature: Public GI ID no. 115464719
  misc_feature: Bit score of 990.6 for HMM based on sequences of Figure 25
  misc_feature: Functional Homolog Of SEQ ID NO. 1946
MASAERSKKLRVLLMPFFATSHIGPCTDLAVRLAAARPDVVEPTLAVTPANVSVVRSALRLHGSAASTVVSIATYPFPEAAGLPPGVENLSTAGDERWRVDAAAFDEAMTWPAQEALIKDQSPDVLITDFHFSWNVGIAEELAMPCVQLNVIGLFSTLAVYLAAAVVNDSDSEELTVAGFPGPELRIPRSELPDFLTAHRNLDLVDNMRKLVQVNTRCHGFAVNSFLFLDKPYCEKFMCNGFAKRGYYVGPLCLPQPPAVASVGEPTCISWLDSKPNRSVVYICFGTFAPVSEEQLHELALGLEASGKPFLWAVRAADGWAPPAGWEERVGDRGLLVRDWVPQTAILAHSATAAFLTHCGWNSVLEGVTAGVPLLTWPLVFEQFITERLVMDVLRIGERVWDGARSVRYKEAALVPAAAVARAVARFLEPGGAGDAARIRAQDFAAEAHAAVAEGGSSYGDLRRLIDDLVEARADAGESALQPL

SEQ ID NO: 1976 - protein, 488 aa, Oryza sativa subsp. japonica
  misc_feature (24)..(475): Pfam Name: UDPGT Pfam Description: UDP-glucoronosyl and UDP-glucosyl transferas
  misc_feature: Public GI ID no. 115464721
  misc_feature: Bit score of 1018.6 for HMM based on sequences of Figure 25
  misc_feature: Functional Homolog Of SEQ ID NO. 1946
MASAERSKKLRILFIPFFATSHIGPFTDLAVRLAAARPDIVEPTIAVTPANVSVVRSAVKRHGSVASSMVSIAKYPFPDVAGLSPGVENLSTAGDEGWRIDNAAFNEALTRPPQEAVIREQSPDVLITDSHFSWIVYIAEGLGMACFRFCVIGFFSILAMRLLAGAAADANGSDSESLTAAGFPGPKLQIPRSEVPDFLTRQQNFDKFDMRKLQQSQDRCHGIVVNSFLFLDKPYCEKFVCNGFAKRGYHVGPLCLPKPPAVGNVGEPSCISWLDSKPSRSVVYICFGTFAPVSEEQLHELALGLEASGKPFLWAVRAADGWAPPAGWEERVGDRGLLVRDWVPQTAILAHSATAAFLTHCGWNSMLEGATAGVPLLTWPLVFEQFITERFVTDVLRIGERVWDGPRSVRYEEKAVVPAAAVARAVARFLEPGGTGDAARIRAQELAAEAHAAVAEGGSSYDDLRRLIDDMVEARAAAGGVAPARQPQ

SEQ ID NO: 1977 - DNA, 1648 bp, Zea mays
  misc_feature: Ceres Clone ID no. 280182
  misc_feature: Encodes the peptide sequence at SEQ ID NO. 1978
gtcctgcagtctccatggccgccgcagtcgacaccgcggccgtggcgggcgcgaccgggaggctcagggtgttcttcctgccctccttcatccggggacacctcatcccgcagaccgacatggcgtgccgcgtcgccgcggcaaggcccgcggaggtggaggcgaccgtggtcgtgacgccggccaacgcggccctcatcgcgccgaccgtggcgcgcgccgcggccgccggccacgccgtgcgcgtgctctgctacccgttcccggacgtcggcctcggggagggcgtggagtgcctcgccaccgccaccgcgcgcgacgcgtggcgcgtctaccgcgccatggaggtggtgcagccgtcccacgagtcgctgctccgggaccaccgccccgacgccatcgtcgccgacgtgccgttctggtggaccaccggtgtcgccgccgagctcggggtgccgcgcctcacgttccaccctgtcggaatcttcgctctgctcgccatgaacagcctgttcaccatacggcccgacatcatcggccgggccagctccgacgccgctgggacggtgctgtccgtgccgggcttgcccgggaaggagatcacgatcccggtgtccgagctcccgaccttcttggtccaggacgaccacctctccaaggcgtggcagcggatgagggcgtgccagctcactggcttcggcgtcatcgtcaacaccttcgccgacctggagcagccctactgcgaggaattcagccgcgtggaggcgcgccgcgcctacttcgtcgggcccctgggaaagccatcgcgctccaccatgcaccgcggcggcagcggcaacgcggactgcctgagctggttgtccaccaaaccgagccggtcggtagtgttcgtctgcttcgggagctgggccgagttctcagcgactcagacaagagagctcgccctggggctcgaggcgtcgaaccagccattcctgtgggttgtccgctccaatgactccagcgatgaccagtgggcaccggagggctgggagcagcgcgtcgccaaccgtggcctggtcgtccacggatgggccccgcagctggccgttctggcccacccgtcggtgggcgcgttcgtgacgcactgcggttggaactcggtcctcgaagccgcgtccgccggcgtgccggtgctcacgtggccgttagtgttcgagcagttcatcaacgagcggctggccaccgaggtggccgccttcggcgtgcgcctgtgggacggcggcaggcgcagcgagagggccgaggatgcggagatcgtgccggcggaggcgatcgcgcgggccgtggccggtttcatggaaggcggagagcagcgcgacaagttgaacgccagggccggggaactagcggagcgcgcgcgcgccgctgtcagtgaggacgggtcgtcgtggcgtgacataaaccgcctgatcgatgatctcctgcaggcgagagcgtcagggctgccacaaatgaattccgtccagcttgagtgatttaaattattctacacagacattgtacgcaaatgcaaggctaaaaataaagagtgaagttaaggtggtgtttggttcatctaaatgtaacgtaaatagtttacatgggtaatggataccgctaattttgt

SEQ ID NO: 1978 - protein, 500 aa, Zea mays
  misc_feature (30)..(487): Pfam Name: UDPGT Pfam Description: UDP-glucoronosyl and UDP-glucosyl transferas
  misc_feature: Ceres Clone ID no. 280182
  misc_feature: Bit score of 672.6 for HMM based on sequences of Figure 25
  misc_feature: Functional Homolog Of SEQ ID NO. 1946
MAAAVDTAAVAGATGRLRVFFLPSFIRGHLIPQTDMACRVAAARPAEVEATVVVTPANAALIAPTVARAAAAGHAVRVLCYPFPDVGLGEGVECLATATARDAWRVYRAMEVVQPSHESLLRDHRPDAIVADVPFWWTTGVAAELGVPRLTFHPVGIFALLAMNSLFTIRPDIIGRASSDAAGTVLSVPGLPGKEITIPVSELPTFLVQDDHLSKAWQRMRACQLTGFGVIVNTFADLEQPYCEEFSRVEARRAYFVGPLGKPSRSTMHRGGSGNADCLSWLSTKPSRSVVFVCFGSWAEFSATQTRELALGLEASNQPFLWVVRSNDSSDDQWAPEGWEQRVANRGLVVHGWAPQLAVLAHPSVGAFVTHCGWNSVLEAASAGVPVLTWPLVFEQFINERLATEVAAFGVRLWDGGRRSERAEDAEIVPAEAIARAVAGFMEGGEQRDKLNARAGELAERARAAVSEDGSSWRDINRLIDDLLQARASGLPQMNSVQLE

SEQ ID NO: 1979 - protein, 493 aa, Oryza sativa subsp. japonica
  misc_feature (24)..(489): Pfam Name: UDPGT Pfam Description: UDP-glucoronosyl and UDP-glucosyl transferas
  misc_feature: Public GI ID no. 115456097
  misc_feature: Bit score of 647.4 for HMM based on sequences of Figure 25
  misc_feature: Functional Homolog Of SEQ ID NO. 1946
MAAATADGHGGRRRLRVFFLPFFARGHLIPMTDLACLMAAASTDAVEVEATMAVTPANAAAIAATVAGNAAVRVVCYPFPDVGLARGVECLGAAAAHDTWRVYRAVDLSRPAHESLLRHHRPDAIVADVPFWWATGVAAELGVPRLTFNPVGVFPQLAMNNLVAVRPDIVRGGADGPPVTVPGMPGGREITIPVSELPDFLVQDDHLSMSWDRIKASQLAGFGVVVNTFAALEAPYCDEFSRVDARRAYFVGPVSQPSRAAAAAVRRGGDGDVDCLRWLSTKPSQSVVYVCFGSWAHFSVTQTRELALGLEASNQPFLWVIRSDSGDGGGERWEPEGWERRMEGRGMVVRGWAPQLAVLAHPSVGAFVTHCGWNSVLEAAAAGVPALTWPLVFEQFINERLVTEVAAFGARVWEDGGGKRGVRAREAETVPAGVIARAVAGFMAGGGGRRERAAAMATALAESARVAVGENGSSWRDIRRLIQDLTDATASQP

SEQ ID NO: 1980 - protein, 488 aa, Oryza sativa subsp. indica
  misc_feature (15)..(480): Pfam Name: UDPGT Pfam Description: UDP-glucoronosyl and UDP-glucosyl transferas
  misc_feature: Public GI ID no. 125545696
  misc_feature: Bit score of 643.9 for HMM based on sequences of Figure 25
  misc_feature: Functional Homolog Of SEQ ID NO. 1946
MADAIGGGGRRRRLRVFFLPFFAKGHLIPMTDLACRMAAARPEEMDATMVVTPGNAALIATAVTRAAARGHPVGVLCYPFPDVGMERGVECLGVAAAHDAWRVYRAVDLSQPIHEALLLEHRPDAIVADVPFWWATDIAAELGVPRLTFSPVGVFPQLAMNNLVTVRAEIIRAGDAAPPVPVPGMPGKEISIPASELPNFLLRDDQLSVSWDRIRASQLAGFGVAVNTFVDLEQTYCHEFSRVDARRAYFVGPVGMSSNTAARRGGDGNDECLRWLSTKPSRSVVYVSFGSWAYFSPRQVRELALGLEASNHPFLWVIRPEDSSGRWAPEGWEQRVAGRGMVVRGCAPQLAVLAHPSVGAFVSHCGWSSVLEAASAGVPVLAWPLVFEQFINERLVTEVVAFGARVRGGGRRSAREGEPETVPAEAVARAVAGIMARGGDGDRARARARVLAERARAAVGEGGSSWRDIHRLIDDLTEATASPEPQLQ

SEQ ID NO: 1981 - DNA, 1494 bp, Sorghum bicolor
  misc_feature: Ceres Annot ID no. 8632742
  misc_feature: Encodes the peptide sequence at SEQ ID NO. 1982
atgaccgccgcagtcgacaccgcggccgtggcgggtgcgggcaggaggctgagggtgttcttcctaccctccttcatccggggccacctcatcccgcacaccgacctggcgtgccgcgtcgccgcggcaaggaccacggaggtggaggcgaccatggtcgtgacgccggccaacgcggccctcatcgcgcccaccgtggcgcgcgccgccgccgccggccacgccgtgcgcgtgctctgctacccgttcccggacgtcggcctcggcgagggcgtcgagtgcctcaccaccgccgccgcgcacgacgcgtggcgtgtgtaccgcgccatggagatcgtgcagccgtcccacgagtcgcttctccgggaccaccgccccgacgccatcgtcgccgacgtgccgttctggtggaccaacgaggtcgccgccgagctcggcgtgccgcgcctcacgttccaccctgtcggcatcttcgcgctgctcgccatgaacagcctgttcaccatacggtccgacatcatccggaccagctccgccgcccctgggacggtgctgtccgtgcctggcctgcccgggaaggagatcgccatcccggtgtccgagctcccgaacttcttggtccaggacgaccacctctccaaatggtgggagcggaagagagcgtgccagcttgctggcttcggcgtcatcgtcaacaccttcgtcgacctagagcagccctactgcgaggagttcagacgcgtggaggcgcgccgcgcctacttcgtcgggcccctgggactgccatcgcgctccaccctgcaccgcggcggcgacggcaacgtggactgcctggactggctgtccaccaaaccgaggcggtcggtagtgttcgtctgcttcgggagctgggccgacttctccgtgactcagagcagagagctcgccttggggctcgaggcgtcggaccagacattcctttgggttgtccgctgccatgactccagcgaccagtgggcaccggagggctgggagcagcgcgtcgccaaccgtggcttggtcgtccgcggatgggcgccgcagctggcggtgctggcccacccgtcggtgggcgcgttcctgacgcactgcggttggaactcggtcctcgaagccgcgtccgccggcgtgccggtgctaacgtggccgctggtgttcgagcagttcatcaacgagcggctggtcaccgaggtggccacgttcggcgcgcgcgtctgggacggcggcaggcgcagcgagaggcccgaggatgctgagaccgtgccggcggaggcaatcgcgcgggccgtcgccggtttcatggacggcggagagcagcgcgacaggttgaaggccagggccggggaactagcggagcgcgcgcgcgccgctgtaggtgaggatggcttgtcctggcgtgacgtaaaccgcttgatcgatgatctcctgcaggccagagcctcagggttgccacaagggaattccatccaggtttaa

SEQ ID NO: 1982 - protein, 497 aa, Sorghum bicolor
  misc_feature (30)..(485): Pfam Name: UDPGT Pfam Description: UDP-glucoronosyl and UDP-glucosyl transferas
  misc_feature: Ceres Annot ID no. 8632742
  misc_feature: Bit score of 636.5 for HMM based on sequences of Figure 25
  misc_feature: Functional Homolog Of SEQ ID NO. 1946
MTAAVDTAAVAGAGRRLRVFFLPSFIRGHLIPHTDLACRVAAARTTEVEATMVVTPANAALIAPTVARAAAAGHAVRVLCYPFPDVGLGEGVECLTTAAAHDAWRVYRAMEIVQPSHESLLRDHRPDAIVADVPFWWTNEVAAELGVPRLTFHPVGIFALLAMNSLFTIRSDIIRTSSAAPGTVLSVPGLPGKEIAIPVSELPNFLVQDDHLSKWWERKRACQLAGFGVIVNTFVDLEQPYCEEFRRVEARRAYFVGPLGLPSRSTLHRGGDGNVDCLDWLSTKPRRSVVFVCFGSWADFSVTQSRELALGLEASDQTFLWVVRCHDSSDQWAPEGWEQRVANRGLVVRGWAPQLAVLAHPSVGAFLTHCGWNSVLEAASAGVPVLTWPLVFEQFINERLVTEVATFGARVWDGGRRSERPEDAETVPAEAIARAVAGFMDGGEQRDRLKARAGELAERARAAVGEDGLSWRDVNRLIDDLLQARASGLPQGNSIQV

SEQ ID NO: 1983 - protein, 488 aa, Oryza sativa subsp. japonica
  misc_feature (15)..(480): Pfam Name: UDPGT Pfam Description: UDP-glucoronosyl and UDP-glucosyl transferas
  misc_feature: Public GI ID no. 115455283
  misc_feature: Bit score of 631.0 for HMM based on sequences of Figure 25
  misc_feature: Functional Homolog Of SEQ ID NO. 1946
MADAIGGGGRRRRLRVFFLPFFAKGHLIPMTDLACRMAAAGPEEMDATMVVTPGNAALIATAVTRAAARGHPVGVLCYPFPDVGMERGVECLGVAAAHDAWRVYRAVDLSQPIHEALLLEHRPDAIVADVPFWWATDIAAELGVPRLTFSPVGVFPQLAMNNLVTVRAEIIRAGDAAPPVPVPGMPGKEISIPASELPNFLLRDDQLSVSWDRIRASQLAGFGVAVNTFVDLEQTYCHEFSRVDARRAYFVGPVGMSSNTAARRGGDGNDECLRWLSTKPSRSVVYVSFGSWAYFSPRQVRELALGLEASNHPFLWVIRPEDSSGRWAPEGWEQRVAGRGMVVHGCAPQLAVLAHPSVGAFVSHCGWSSVLEAASAGVPVLAWPLVFEQFINERLVTEVVAFGARVRGGGRRSAREGEPETVPAEAVARAVAGIMARGGDGDRARARARVLAERARAAVGEGGSSWRDIHRLIDDLTEATASPEPQLQ

SEQ ID NO: 1984 - DNA, 1476 bp, Sorghum bicolor
  misc_feature: Ceres Annot ID no. 8667668
  misc_feature: Encodes the peptide sequence at SEQ ID NO. 1985
atggccatcaaagatgagctgcagccgttgcacatcctcttcttcccattcctcgcgccagggcacctcatcccgatcgccgacatggccgcgctcttcgctgcccgaggcgtcaagtgcaccatcctcaccaccccggtgaacgcccaagtcatccgctccgcggtggaccacgccaacgacgcctcccgcggcaccgatggcgccctggccatcgacatcgccgtcgtgcctttccctgacgtcgggctgccacccggcgtcgagagcggcccggcccttaattccatggaggaccgcgaaaagttctcccacgccgcccagttactccgcgacccgttcgaccggttcttggtggagaatcgccccgacgccgtggtgagcgacagcttcttcgactggtcagtcgacgccgccgcggagcacggcgtcccgcggatagcgttcctcggcatcagcttgttcgcgcggtcctgcagcgacaccatgttgcgcaacaacccagtggaggccgcccccgacgacccggacgcgcccgtgctgcttccgggcctgccgcaccgcgtcgagctgaagcggagccagatgatggagcccaagaagcggccggagcactgggccttcttccagcgcgtcaacgccgcggaccagaggagctacggcgaggtgttcaacagcttccacgagctggagccggactacttggagcactacaccacgacgctcgggcgccgcgcgtggctcgtcgggccggtcgcgctcgccagcaaggacgcggcgacgaggggcgccggcaacggtctctcgccggacgcggacggctgccagcagtggctcgacaccaagccggagggctcggtgctgtacgtgtccttcggcacgctgtcccatttctcgccgcccgagctgcgcgagctcgcacgcggcctcgacatgtccggcaagaacttcgtctgggtcatcaacggcggcgcggagacagaggaatcggaatggatgcccgatgggttcgcggagctgatggcgtgcggcgaccgtggcttcatcatccggggctgggcgccgcagatggtgatcctgacccacccggcagtgggcgggttcgtgacgcactgcgggtggaactcgacgctggaggccgtgagcgccggcgtgcctatggtgacgtggccacggtacgccgaccagttctacaacgagaagctggtggtggagctgctcaaggtcggtgtcggcgtggggtccacggactacgcgtcgaagctggagacgcggcgcgtgatcggcggcgaggtgatcgcggaggccatcggaagagtgatgggcgatggcgaggacgcggaggcaatacgggagaaggcccaggagctcggggggaaggccaggcgcgcggtggcgaagggtgggtcatcttatgatgatgtcggacggttagtggacgagctgatggctcgcaggagctccgtcaatgtctga

SEQ ID NO: 1985 - protein, 491 aa, Sorghum bicolor
  misc_feature (21)..(486): Pfam Name: UDPGT Pfam Description: UDP-glucoronosyl and UDP-glucosyl transferas
  misc_feature: Ceres Annot ID no. 8667668
  misc_feature: Bit score of 478.9 for HMM based on sequences of Figure 25
  misc_feature: Functional Homolog Of SEQ ID NO. 1946
MAIKDELQPLHILFFPFLAPGHLIPIADMAALFAARGVKCTILTTPVNAQVIRSAVDHANDASRGTDGALAIDIAVVPFPDVGLPPGVESGPALNSMEDREKFSHAAQLLRDPFDRFLVENRPDAVVSDSFFDWSVDAAAEHGVPRIAFLGISLFARSCSDTMLRNNPVEAAPDDPDAPVLLPGLPHRVELKRSQMMEPKKRPEHWAFFQRVNAADQRSYGEVFNSFHELEPDYLEHYTTTLGRRAWLVGPVALASKDAATRGAGNGLSPDADGCQQWLDTKPEGSVLYVSFGTLSHFSPPELRELARGLDMSGKNFVWVINGGAETEESEWMPDGFAELMACGDRGFIIRGWAPQMVILTHPAVGGFVTHCGWNSTLEAVSAGVPMVTWPRYADQFYNEKLVVELLKVGVGVGSTDYASKLETRRVIGGEVIAEAIGRVMGDGEDAEAIREKAQELGGKARRAVAKGGSSYDDVGRLVDELMARRSSVNV

SEQ ID NO: 1986 - protein, 496 aa, Oryza sativa subsp. japonica
  misc_feature (22)..(491): Pfam Name: UDPGT Pfam Description: UDP-glucoronosyl and UDP-glucosyl transferas
  misc_feature: Public GI ID no. 115438785
  misc_feature: Bit score of 405.5 for HMM based on sequences of Figure 25
  misc_feature: Functional Homolog Of SEQ ID NO. 1946
MAVGEGEQQPLHILFFPFIAHGHLIPVADMAALFAARGVRCTILTTPVNAAVIRSAVDRANDASRGTGSPEISITLFPFPDVGLPPGVESVPGISSKAEQEKIAEAFLRFREPFDRFLAEHHTDAVVVDSFFHWSSDAAADHGVPRLAFLGSSLFARACSDSMLRHNPVEASPDDPDAVVSLPDLPHRVELRRSQMMDPREREGEWAFLQLVNAADQRSFGELFNSFREMEPDYVEHYHTKLGRRAWLLGPVALAAGKGMAERQDTDTDSGRLSPDEERCLRWLDGKAAGSVVYISFGTIARLLAAELTEIARALQLSGKNFLWIITREDTDASEWMPEGFADLMARGERGLVVRGWAPQVLVLNHPAVGGFVTHCGWNSVLEAVSAGVPMVAWPRYTDQFYNEKLIVEMLKVGVGVGAREFASFIDHRSQVIAGEVIAEAIGRVMGEGEEGEAMRKKVKELREKARSAVKEGGSSYDDAGRLLDELMARRSSGTS

SEQ ID NO: 1987 - protein, 496 aa, Oryza sativa subsp. indica
  misc_feature (22)..(491): Pfam Name: UDPGT Pfam Description: UDP-glucoronosyl and UDP-glucosyl transferas
  misc_feature: Public GI ID no. 125526997
  misc_feature: Bit score of 403.4 for HMM based on sequences of Figure 25
  misc_feature: Functional Homolog Of SEQ ID NO. 1946
MAVGEGEQQPLHILFFPFIAHGHLIPVADMAALFAARGVRCTILTTPVNAAVIRSAVDRANDASRGTGSPEISITLFPFPDVGLPPGVESVPGISSKAEQEKIAEAFLRFREPFDRFLAEHHTDAVVVDSFFHWSSDAAADHGVPRLAFLGSSLFARACSDSMLRHNPVEASPDDPDAVVSLPDLPHRVELRRSQMMDPREREGEWAFLQLVNAADQRSFGELFNSFREMEPDYVEHYHTKLGRRAWLLGPVALAAGKGMAERQDTDTDSGRLWPDEERCLRWLDGKAAGSVVYISFGTIARLLAAELTEIARALQLSGKNFLWIITREDTDASEWMPEGFADLMARGERGLVVRGWAPQVLVLNHPAVGGFVTHCGWNSVLEAVSAGVPMVSWPRYTDQFYNEKLIVEMLKVGVGVGAREFASFIDHRSQVIAGEVIAEAIGRVMGEGEEGEAMRKKVKELREKARSAVKEGGSSYDDAGRLLDELMARRSSGTS

SEQ ID NO: 1988 - DNA, 1476 bp, Sorghum bicolor
  misc_feature: Ceres Annot ID no. 8667665
  misc_feature: Encodes the peptide sequence at SEQ ID NO. 1989
atggccatcaaagatgagcagcagccgctgcacatcctcttcttaccgttccttgcaccggggcacctcatcccggtcgccgacatggccgcgctcttcgccgcccgaggcgtcaagtgcaccatcctcaccaccccggtgaacgcccaagtcatccgctcggcggtggaccacgccaacgacgcctcccgcggcaccgagggcgccctggccatcgacatcgccgtcgtgcctttccccgacgtcgggctgccccctggcgtcgagtgcggcccggcccttaattccatggaggaccgcgaaaagttcttccacgcggtgcagttactccgcgatccattcgtccggttcttggcggagaatcgccccgacgccgtggtgagcgacagcttcttcgtctggtccgccgacgccgccgcggagcacggcgtcccgcggatagcgttcctcggcagtagcttgttctcgcgggcctgcaacgacaccacggtgcgcaacaaccccgtggaggccgcccccgacgaccccgacgcgctcgtgctgcttccggggctgccgcaccgcgtcgtgctgaggcgcagccaaatgtttgagcccaagaagcggccggagcactgggcctccatgcagcgcggcaacgccgcggaccagaggagctacggcgaggtgttcaacagcttccacgagctggagccggactacttggagcactacaccacgacgctcgggcgccgcgcgtggctcgtcgggccggtcgcgctcgccagcaaggacgcggcgacgaggggcgccagcaacggtctctcgccggacgcgaacggctgcctgcagtggctcgacaccaagcaggagggctcggtcgtgtacgtgtccttcggcacgctgtcccatttctcgccgcctgagctgcgcgagctcgcacgcggcctcgacatgtccggcaagaacttcgtctgggtcatcggcggcggagcggacaccgaggagtcggaatggatgcccgacgggttcgcagagctgatggcgggcggtgaccgcggcttgatcatccggggctgggcgccgcagatgctgatcctgacccacccggcagtgggcgggttcgtgacgcactgtgggtggaactcgacgctagaggccatgagcgccggcgtgcctatggtgacgtggccgcgcttcgccgaccagttctacaacgaaaagctagtggtggagctgctcaaggtcggtgttggcgtggggtccacggactacgcgtcgaaggtggagacccgtcgcgtgatcggcggcgaggtgatcgcggaggcaatcgtgagagtgatgggcgacggcgaggacgcggtggcaatacgggagaaggccaaggagctcgcggagaaggccaggcgcgcggtggccaggggagggtcctcttacgatgatgtcggacgcttactggacgagctgatggctcgcaggagctccgtcaatgtctga

SEQ ID NO: 1989 - protein, 491 aa, Sorghum bicolor
  misc_feature (21)..(486): Pfam Name: UDPGT Pfam Description: UDP-glucoronosyl and UDP-glucosyl transferas
  misc_feature: Ceres Annot ID no. 8667665
  misc_feature: Bit score of 465.5 for HMM based on sequences of Figure 25
  misc_feature: Functional Homolog Of SEQ ID NO. 1946
MAIKDEQQPLHILFLPFLAPGHLIPVADMAALFAARGVKCTILTTPVNAQVIRSAVDHANDASRGTEGALAIDIAVVPFPDVGLPPGVECGPALNSMEDREKFFHAVQLLRDPFVRFLAENRPDAVVSDSFFVWSADAAAEHGVPRIAFLGSSLFSRACNDTTVRNNPVEAAPDDPDALVLLPGLPHRVVLRRSQMFEPKKRPEHWASMQRGNAADQRSYGEVFNSFHELEPDYLEHYTTTLGRRAWLVGPVALASKDAATRGASNGLSPDANGCLQWLDTKQEGSVVYVSFGTLSHFSPPELRELARGLDMSGKNFVWVIGGGADTEESEWMPDGFAELMAGGDRGLIIRGWAPQMLILTHPAVGGFVTHCGWNSTLEAMSAGVPMVTWPRFADQFYNEKLVVELLKVGVGVGSTDYASKVETRRVIGGEVIAEAIVRVMGDGEDAVAIREKAKELAEKARRAVARGGSSYDDVGRLLDELMARRSSVNV

SEQ ID NO: 1990 - protein, 481 aa, Vitis vinifera
  misc_feature (9)..(472): Pfam Name: UDPGT Pfam Description: UDP-glucoronosyl and UDP-glucosyl transferas
  misc_feature: Public GI ID no. 157335556
  misc_feature: Bit score of 596.3 for HMM based on sequences of Figure 25
  misc_feature: Functional Homolog Of SEQ ID NO. 1946
MGSKDDELHVMFLPYMAPGHMMPLVDMARLFAAHGVRITIITTTMNAFRFQNAIHRDIEAGRQIGLEILQFPSVEAGLPEGCENLISTPTPEMSMKLFQAIRMMKPRMETLLRNHRPDCIASDVLFHWTVDVAAELGIPRLSFSGSGYFNLCVSHCVERYQPHKDVSSETEIFLVPGLPDEIKLTRSQLPDLVKGRNEFSELFDRLKEAERKSFGTLMNSFYELEPAYADYYRNNIGIKAWHIGPVSLFNKDAADKAERGNKASLDEDSWLSWLDSKKPNSVLYVCLGSLTRLSKTQLTEIASALEDSGHAFIWVVGKEDGSHEWWLPEGGIGHIIRGWAPQVLILEHPAIGGFLTHCGWNSILEGVSSGLPMITWPIFAEQFYNEKLVTQVLKLGVGVGNEVWKVWATEEMPLMSREKIRRAVTMVMDQGIAADEMRRKASLLGELAKKAIEKGGSSYNQLKALIKEIRSFRQPPLCRNL

SEQ ID NO: 1991 - DNA, 1592 bp, Glycine max
  misc_feature: Ceres Clone ID no. 464566
  misc_feature: Encodes the peptide sequence at SEQ ID NO. 1992
gtagtaagtagtaagccactatcgtttctctctaacagcaaaaaagttctaacctcaccaaacccacactaccatgggtaatgagaatcgcgagcttcacgtattattcttccccttcccagctaatgggcacataataccaagcattgacttagccagagtctttgcttcaagaggaatcaaaaccaccgtagtcaccactcccctcaacgttccactcatttcaagaaccataggaaaagccaacatcaaaatcaaaacaatcaagtttccttctcatgaggaaactgggttgcccgaaggttgtgaaaattccgattctgccctctcctctgacttgatcatgacgttcctgaaggccaccgtgctcctgcgggacccactggagaatctgatgcaacaagaacatcctgactgtgtaattgccgacatgttctacccctgggcgacagactctgccgccaaattcggcattccgagggtcgtgttccatgggatggggttctttccgacatgcgtgtcggcgtgcgtgcggacatacaagccccaggacaacgtctcctcgtggtccgaacccttcgcggttccggagcttccgggggagatcaccatcaccaagatgcagctcccccagacaccgaaacacgacgaggttttcacaaagcttctagacgaggtcaacgcttcggagctcaagagccacggcgtgatcgccaatagcttctacgagctcgagccggtttacgccgatttttaccggaaggagctcgggagaagagcgtggcatttgggaccggtttgtttgagcaatagggacgccgaggaaaaagcatgcagaggaagagaagctgctattgatgaacacgagtgtctgaagtggcttgactcaaaggaaccaaattcagttgtgtatttgtgtttcggtagcatgacagcgttctccgacgcgcaactcaaagaaatcgctttaggtttggaggcttcagggcagaatttcatatgggttgtcaaaaaagggttgaatgaaaaattggaatggttaccagaagggtttgaggagagaattttaggtcaaggaaagggtttgatcataagaggttgggcaccccaagtgatgattttggaccatgaatccgttggagggtttgtgacacattgtgggtggaactcagtattggagggggtgtgtgcaggggtgccaatggtgacatggccaatgtacgcagagcaattttacaatgctaagtttttgacggacatagttaagattggggtgagtgtaggcgttcaaacgtggattgggatgatgggaagggaccctgtgaagaaggaaccggttgagaaggctgtgaggaggatcatggttggagaggaggcagaggaaatgaggamcagagcaaaagagcttgctcgaatggcaaagcgtgctgtggaggaaggaggatcttcttacaacgatttcaactcattgatcgaggatttgaggtcscgtgcctgttgatgattgttgtgtcatgtatgcatgtagacttaggacggtttgtgggaaattgtgatgatcgatttgctaataatacccgcggaagttgctt

SEQ ID NO: 1992 - protein, 475 aa, Glycine max
  misc_feature (9)..(474): Pfam Name: UDPGT Pfam Description: UDP-glucoronosyl and UDP-glucosyl transferas
  misc_feature: Ceres Clone ID no. 464566
  misc_feature: Bit score of 1189.4 for HMM based on sequences of Figure 25
  misc_feature: Functional Homolog Of SEQ ID NO. 1946
  misc_feature: in Figure 25
  misc_feature (440)..(440): Xaa is any aa, unknown, or other
  misc_feature (472)..(472): Xaa is any aa, unknown, or other
MGNENRELHVLFFPFPANGHIIPSIDLARVFASRGIKTTVVTTPLNVPLISRTIGKANIKIKTIKFPSHEETGLPEGCENSDSALSSDLIMTFLKATVLLRDPLENLMQQEHPDCVIADMFYPWATDSAAKFGIPRVVFHGMGFFPTCVSACVRTYKPQDNVSSWSEPFAVPELPGEITITKMQLPQTPKHDEVFTKLLDEVNASELKSHGVIANSFYELEPVYADFYRKELGRRAWHLGPVCLSNRDAEEKACRGREAAIDEHECLKWLDSKEPNSVVYLCFGSMTAFSDAQLKEIALGLEASGQNFIWVVKKGLNEKLEWLPEGFEERILGQGKGLIIRGWAPQVMILDHESVGGFVTHCGWNSVLEGVCAGVPMVTWPMYAEQFYNAKFLTDIVKIGVSVGVQTWIGMMGRDPVKKEPVEKAVRRIMVGEEAEEMRXRAKELARMAKRAVEEGGSSYNDFNSLIEDLRXRAC

SEQ ID NO: 1993 - DNA, 2272 bp, Triticum aestivum
  misc_feature: Ceres Clone ID no. 678511
  misc_feature: Encodes the peptide sequence at SEQ ID NO. 1994
aatcgcaccgaggcttgccgcttgcgtctgatctgcatttgtactcgatctcatcctccacgccggccgtagtactttccggctagctcgccagccatggctgtccacgacgagccgctgcacatcctcttcttcccgttcctggcctccggccacctcattccgatcgccgacatggccgcgctcttcgccggccgcggcgtcaggtgcaccatcctcaccacgcccgtcaacgccgccatcatccgctccgccgtcaagcgcgccaacgacgccttcgccggcaccggctgtcccgccatcgacatcgctgtcgtgcctttccccgacgtcgggctcccgccgggggtggagaacggcacggccctctcgtcccaggacgaccgcgacaagttcttccacgcggcgactctgctccgggagccattcgaccggttcctggccgaccaccgcaccgacgctgtcgtgtccgacagcttcttccactggtctgtcgacgccgccgcggagcggggcgtcccgcgcatcgcgttcctcggcagcagcatgttcgcgcgctcctgcagcgacagcatgctgcgccacaacccgctggagaacgcccccgacgaccccgacgccttcgtcgccctgccggggctgccgcaccgcatcgagctgaggcgaagccagatgatggacccggctaagaagccatggcagtggcagttcttcaagggcgtgaacgccgccgaccagaggagcttcggcgaggtgttcaacagcttccacgagctggagccggattacgtcgagcacttcaacaagacgctctcccggcgtgtgtggctcgtcgggccagtagcgctcgccagcaaggacatggctgtgagaggcaccgacgcgccctcgccggacgcggacagctgcatccggtggctggacgcgaagccagccggctcggtggtgtacgtctccttcggcacactaaccaagttcgcaccggcggagctgcaccagctcgcccgcgccctcgacctctcaggcgtgaacttcgtgtgggtcatcggcaccgccgcaggccaagactctgctgaatggatgcccgaaggcttcgcggacctcatagcgcacggcgaccgcggcttcctaatccgaggctgggcgccgcagatgctgatcctgagccacgccgccctgggcgggttcgtgacgcactgcggctggaactcggtgctggaggccgtgagcgccggcgtgccgatggtgacgtggccgcggtacgcggaccagttcaacaacgagaagctcgtggtggagctgctcaaggtgggcgtcagcatcggggccaaggactacgcgtcgggcatcgaggcccacgaggtgatcgccggcgaggtgatcgccgagtccatccagaggctgatggagagcgacgccatccagaagaaggccaaggacctcggtgagaaggcaaggcgcgcggtggagaagggcggatcttcgtacgatgatgttggccggctcatggacgtgctgacggcccgtcggagctccgtcgaggttggccaagacatccaggccagctgatgggctggtacgacggtgtgtgtgttaatttgggcagcttggaactttccttttgctgattaatggccgctagatccgctggcgatcttttgctagtacgacagccatgacgccatggaatttaggtcctatttggttcataggtgctaggactttttttagtcccatcttataagtctcaagtccttaaaaagtccctacctgtttggttcctaggacttataaatccttataagaccatattacaactataagtccctataaatccctccttaagagtcttattttataagtctcaaatgcccactttaagttcctataagtcctttctgtttggtttagatgtccttaagccaataaatccctagaaacgaacaccctaattgtacgtcgctgttctctgagaaaagtgtaaaatgagtaagaaaactttctttttgcatctcggggactgaaaggacttggtggatgccaagccacgctcgtgctctgtcagtatcatggctgcaaacatgatacgtagcatggtccgtggccatatataatgctgtacgttcccatctcgccggcatgccaccattgctaatttgttgcatcgagattgtgttgtttgggggacacgtgacagaagctctttgattttcttcttctgtgaaagtagtgaaacactatacttttgatttctaaaatctgagaaaatcgt

SEQ ID NO: 1994 - protein, 490 aa, Triticum aestivum
  misc_feature (9)..(478): Pfam Name: UDPGT Pfam Description: UDP-glucoronosyl and UDP-glucosyl transferas
  misc_feature: Ceres Clone ID no. 678511
  misc_feature: Bit score of 430.3 for HMM based on sequences of Figure 25
  misc_feature: Functional Homolog Of SEQ ID NO. 1946
MAVHDEPLHILFFPFLASGHLIPIADMAALFAGRGVRCTILTTPVNAAIIRSAVKRANDAFAGTGCPAIDIAVVPFPDVGLPPGVENGTALSSQDDRDKFFHAATLLREPFDRFLADHRTDAVVSDSFFHWSVDAAAERGVPRIAFLGSSMFARSCSDSMLRHNPLENAPDDPDAFVALPGLPHRIELRRSQMMDPAKKPWQWQFFKGVNAADQRSFGEVFNSFHELEPDYVEHFNKTLSRRVWLVGPVALASKDMAVRGTDAPSPDADSCIRWLDAKPAGSVVYVSFGTLTKFAPAELHQLARALDLSGVNFVWVIGTAAGQDSAEWMPEGFADLIAHGDRGFLIRGWAPQMLILSHAALGGFVTHCGWNSVLEAVSAGVPMVTWPRYADQFNNEKLVVELLKVGVSIGAKDYASGIEAHEVIAGEVIAESIQRLMESDAIQKKAKDLGEKARRAVEKGGSSYDDVGRLMDVLTARRSSVEVGQDIQAS

SEQ ID NO: 1995 - DNA, 1458 bp, Populus balsamifera subsp. trichocarpa
  misc_feature: Ceres Annot ID no. 1494030
  misc_feature: Encodes the peptide sequence at SEQ ID NO. 1996
atgggtagtttgggtcaccaattgcacattttcttcttccccttctttgctcatggccacatgataccatccgtggacatggccaagctttttgcttctcgaggcataaagacaactatcatcaccactcctctaaacgcgcctctcttttcgaaaacaatccaaaaaaccaaagagttgggttttgatattaatatcttaaccatcaaattccctgcggcagaggcaggttttcctgaaggatatgaaaatacagatacgttcattttcagcgaaaatgcaagggcaatgaccacaaagtttttcaaggccacaaccttgcttcaagcaccctttgagaaggtgctacaagaatgccaccctgattgcattgttgctgatatgttctttccctgggctactgatgctgctgccaaatttggaattccgaggctagtgtttcatggcactagtaactttgctttaagtgcttcagaatgtgtgaggctttatgagccacacaagaaagtttcatcagattccgaaccattcgtggtgcctgatcttcctggtgatataaagttgacaaagaagcaactgccagatgatgtaagagaaaatgttgaaaatgactttagcaagatcttgaaagcatctaaagaagcagaattgaggagctttggtgttgttgtcaacagcttttatgagcttgagccagcttacgctgattactacaagaaggtcttgggcagaagggcttggaatgtaggcccggtttcactatgcaatagagacactgaagataaagcaggaagaggaaaagaaacctcaattgatcaccatgagtgtttgaagtggctcgattcaaagaaaccaaattcagttgtttatatttgctttggaagcacgaccaacttcagtgactctcagcttaaggagattgcagcaggtctcgaagcttctggtcagcagtttatctgggtagttagaagaaacaaaaagggtcaagaagacaaggaagattggttacctgaaggatttgaggaaagaatggaaggcgtgggactaattatcagaggatgggcaccccaagttttgattcttgatcatgaagcaataggggcatttgtgactcattgtggatggaactcaactcttgaaggcataactgcagggaaaccaatggttacatggccaatatttgctgagcaattctataatgaaaagttggtgactgatgttttgaaaactggagtcggtgttggagttaaggaatggtttagagtgcatggagatcatgttaaaagtgaagctgtagagaagacaatcactcaaattatggtgggtgaagaggcagaggaaatgaggagcagagcaaagaagctaggagaaacggccaggaaagctgtcgaagaaggtggatcttcttactctgatttcaatgctttgattgaagagctgaggtggcgtcgcccctga

SEQ ID NO: 1996 - protein, 485 aa, Populus balsamifera subsp. trichocarpa
  misc_feature (9)..(484): Pfam Name: UDPGT Pfam Description: UDP-glucoronosyl and UDP-glucosyl transferas
  misc_feature: Ceres Annot ID no. 1494030
  misc_feature: Bit score of 812.4 for HMM based on sequences of Figure 25
  misc_feature: Functional Homolog Of SEQ ID NO. 1946
MGSLGHQLHIFFFPFFAHGHMIPSVDMAKLFASRGIKTTIITTPLNAPLFSKTIQKTKELGFDINILTIKFPAAEAGFPEGYENTDTFIFSENARAMTTKFFKATTLLQAPFEKVLQECHPDCIVADMFFPWATDAAAKFGIPRLVFHGTSNFALSASECVRLYEPHKKVSSDSEPFVVPDLPGDIKLTKKQLPDDVRENVENDFSKILKASKEAELRSFGVVVNSFYELEPAYADYYKKVLGRRAWNVGPVSLCNRDTEDKAGRGKETSIDHHECLKWLDSKKPNSVVYICFGSTTNFSDSQLKEIAAGLEASGQQFIWVVRRNKKGQEDKEDWLPEGFEERMEGVGLIIRGWAPQVLILDHEAIGAFVTHCGWNSTLEGITAGKPMVTWPIFAEQFYNEKLVTDVLKTGVGVGVKEWFRVHGDHVKSEAVEKTITQIMVGEEAEEMRSRAKKLGETARKAVEEGGSSYSDFNALIEELRWRRP

SEQ ID NO: 1997 - protein, 497 aa, Oryza sativa subsp. japonica
  misc_feature (21)..(492): Pfam Name: UDPGT Pfam Description: UDP-glucoronosyl and UDP-glucosyl transferas
  misc_feature: Public GI ID no. 115438196
  misc_feature: Bit score of 424.9 for HMM based on sequences of Figure 25
  misc_feature: Functional Homolog Of SEQ ID NO. 1946
MATMDEQQPLHILFLPFLVPGHLIPIADMAALFAARGVRCTILTTPVNAAVVRPAVDRANDDALRGDAGGAPAIDIAVVPFPDVGLPPGVESGTALASEEDRGKFVHAIQRLREPFDRFMAEHHPDAVVADGFFTWSVDAAAEHGVPRLVFLGTGVFARSCQESMVRHNPVEACPDDDPDAAVSLPGLPHRVEMRRSQMIDPKKRPDHWAYFKMMNDADQRSYGEVFNSFHELETDYVEHYRTALGRRAWLVGPAAFASKDFAARGAAELSPDADGCLRWLDAKPHGSVAYVSFGTLSSFSPAEMRELARGLDLSGMNFVWVINGAADDTDASGQWMPEGFPELISPHGDRGLTIRGWAPQMLILNHPAVGGFVTHCGWNSTLEAVSAGVPMVTWPRYADQFFNEKLIVEVLKVGVSVGSKDFASNLENHQVIGGEVIAGAVRRVMGDGEEGAEAIRKKAAELGVKARGALEKGGSSHDDVGRLMDALMARRTSVDV

SEQ ID NO: 1998 - DNA, 1476 bp, Sorghum bicolor
  misc_feature: Ceres Annot ID no. 8667669
  misc_feature: Encodes the peptide sequence at SEQ ID NO. 1999
atggccatcaaagatgagcagaagccgctgcacatcctcttcttcccgttcctcgcgccggggcacctcatcccgatcgccgacatggccgcactcttcgccgcccgaggcgtcaagtgcaccatcctcaccacccctgtgaacgcccaagtcatccgctcggcggtggatcacgccaacgacgccttccgcggcactgagggcaccctggccatcgacatcgccgtcgtgccttttcccgacgtcgggctgcctcctggcgtcgagtgcggcccggcccttaattccgtggacgaccacgaaaagttcttccacgccgcccagttactccgcgagccgttcgaccggttcttggcggagaatcgccccgatgccgtcgtggccgacagtttcttcgagtgggcggccgacgccgccgcggagcacggcgtcccgcggatggcgttcctcggcagcagcttgttctcgcggacatgcatcgacagcatgctgcgctacaaccccgtggaggccgcccccgacgaccccgacgcgctcgtgctgcttccagggctgccgcaccgcgtcgagctgaggcgcagccagatgaaggagcccaaggagcagccggaggactgggccttcctccagcgcgtcaacgccgcggacctgaggagctacggcgaggtgttcaacagcttccacgacctggagcgggagtccttggagcactacaccacgacgctagggtgccgcgcgtggctcgtcgggccggtcgcgctcgccagcaagaaccacgcggcgaggggcgccggcgacgagccctcgccggacgcggacagctgccagcagtggctcgacaccaaggcggagggctcggtggtgtacgtgtccttcggcacgctgtcccatttctcgccgcccgagctgcgcgagctcgcaagcggcctggacatgtccggcaagaacttcgtctgggtcatcggcggcggcgcggacaccaaggagtcggaatggatgccccacgggttcgcggagctgatggcgcgcggcgaccgtggcttcatcatccggggctgggcgccgcagaggctgattctggctcacccggcaatgggcggcttcgtgacgcactgcggctggaactcgacgctggaggcggtgagcgccggcgtgcctatggtgacgtggccgcgcttcgccgaccagttctacaacgagaagctggtggtcgagctgctcaaggtcggtgtcagcgtggggtccacggactacgcgtcgaaacttgagacacggcgcgtgatcggcggcgaggtgattgcggaggccattgggagagtgatgggcgacggcgaggacgcagaggcaatacgagagaaggccaaggagctcggggagaaggccaggcgtgcggtggccaagggtgggtcctcttacgatgacgtcggacgcttaatggacgagctgatcgctcgtaggagctccgtcgatgtctga

SEQ ID NO: 1999 - protein, 491 aa, Sorghum bicolor
  misc_feature (21)..(486): Pfam Name: UDPGT Pfam Description: UDP-glucoronosyl and UDP-glucosyl transferas
  misc_feature: Ceres Annot ID no. 8667669
  misc_feature: Bit score of 459.1 for HMM based on sequences of Figure 25
  misc_feature: Functional Homolog Of SEQ ID NO. 1946
MAIKDEQKPLHILFFPFLAPGHLIPIADMAALFAARGVKCTILTTPVNAQVIRSAVDHANDAFRGTEGTLAIDIAVVPFPDVGLPPGVECGPALNSVDDHEKFFHAAQLLREPFDRFLAENRPDAVVADSFFEWAADAAAEHGVPRMAFLGSSLFSRTCIDSMLRYNPVEAAPDDPDALVLLPGLPHRVELRRSQMKEPKEQPEDWAFLQRVNAADLRSYGEVFNSFHDLERESLEHYTTTLGCRAWLVGPVALASKNHAARGAGDEPSPDADSCQQWLDTKAEGSVVYVSFGTLSHFSPPELRELASGLDMSGKNFVWVIGGGADTKESEWMPHGFAELMARGDRGFIIRGWAPQRLILAHPAMGGFVTHCGWNSTLEAVSAGVPMVTWPRFADQFYNEKLVVELLKVGVSVGSTDYASKLETRRVIGGEVIAEAIGRVMGDGEDAEAIREKAKELGEKARRAVAKGGSSYDDVGRLMDELIARRSSVDV

SEQ ID NO: 2000 - protein, 494 aa, Oryza sativa subsp. japonica
  misc_feature (18)..(489): Pfam Name: UDPGT Pfam Description: UDP-glucoronosyl and UDP-glucosyl transferas
  misc_feature: Public GI ID no. 125571055
  misc_feature: Bit score of 410.0 for HMM based on sequences of Figure 25
  misc_feature: Functional Homolog Of SEQ ID NO. 1946
MDEQQPLHILFLPFLVPGHLIPIADMAALFAARGVRCTILTTPVNAAVVRPAVDRANDDALRGDAGGAPAIDIAVVPFPDVGLPPGVESGTALASEEDRGKFVHAIQRLREPFDRFMAEHHPDAVVADGFFTWSVDAAAEHGVPRLVFLGTGVFARSCQESMVRHNPVEACPDDDPDAAVSLPGLPHRVEMRRSQMIDPKKRPDHWAYFKMMNDADQRSYGEVFNSFHELETDYVEHYRTALGRRAWLVGPAAFASKDFAARGAAELSPDADGCLRWLDAKPHGSVAYVSFGTLSSFSPAEMRELARGLDLSGMNFVWVINGAADDTDASGQWMPEGFPELISPHGDRGLTIRGWAPQMLILNHPAVGGFVTHCGWNSTLEAVSAGVPMVTWPRYADQFFNEKLIVEVLKVGVSVGSKDFASNLENHQVIGGEVIAGAVRRVMGDGEEGAEAIRKKAAELGVKARGALEKGGSSHDDVGRLMDALMARRTSVDV

SEQ ID NO: 2001 - DNA, 1452 bp, Populus balsamifera subsp. trichocarpa
  misc_feature: Ceres Annot ID no. 1441129
  misc_feature: Encodes the peptide sequence at SEQ ID NO. 2002
atgggtggtgaggagaatcaggtacacatcttcttcttccccttcatggcacatggccacatgataccaaccatagacatggcaaagctatttgcttctcgaggagtgaaagcaaccattgtcaccactcctctcaatgcaccacttgtttccagaacaatccagaggtcaaaaggtttgggttttgatatcaatatcaaaaccatcaagtttcctgctgttgaggttggattgccagaaggatgcgaaaacgcagattcgatcacttctcatgagacacagggagaaatgaccaaaaaacttttcatggccacagccatgctccaacaaccacttgagaagctactacaagaatgccaccctgattgtcttattgctgacatgttccttccttggactactgatgctgcagccaaatttgggattccaagattagtatttcatggcatcagttgcttttctttgtgcacttcagattgcttgaacagatataagccgtacaagaaagtttcttctgattctgagctgtttgtggtgcctgagcttcctggtgacatcaagttcacaagcaagcaactgccagattatatgaaacaaaacgtggaaactgattttactaggttaattcaaaaggtcagagaatcatcactgaagagttatgggattgtcgtcaatagtttctatgagctcgagtcggattatgctaattttttcaaggagttagggaggaaggcatggcacataggcccagtttcgctatgcaatagagaatttgaagataaagcacagagaggaaaggaagcttcaattgacgaacatgagtgtttgaaatggctggactcaaagaagcctaattcagttgtttatatatgctttggaactgtagccaatttcagtgattctcagctaaaggagattgcaatagctcttgaagcttcagggcagcagtttatttgggttgtcaggaaagacaagaaagctaaggataacgaggaatggttgcctgagggatttgagaaaagaatggaaagcaagggactgattataagaggatgggcgccacaagtagtgattcttgatcacgaagctataggggggtttgtgactcattgtgggtggaattcgaccattgaaggcatagctgccgggaagccaatggtaacatggccagtttccgcagagcaattctttaatgagaagctggtgactgacgtgctaaaaattggtgtggctgttggtgttcaacaatgggttacagtatacggggataaaattacgagtggagctgtagaaaaggccgtaactcgaatcatgacaggtgaagaagcaaaggaaatgagaagcagagttgaggcccttggaggaatggcaaagagggctatcgaagaagatggttcatcttactctaatttgaatgctctaattgaagaattaagaggcaggcgccactga

SEQ ID NO: 2002 - protein, 483 aa, Populus balsamifera subsp. trichocarpa
  misc_feature (8)..(482): Pfam Name: UDPGT Pfam Description: UDP-glucoronosyl and UDP-glucosyl transferas
  misc_feature: Ceres Annot ID no. 1441129
  misc_feature: Bit score of 822.9 for HMM based on sequences of Figure 25
  misc_feature: Functional Homolog Of SEQ ID NO. 1946
MGGEENQVHIFFFPFMAHGHMIPTIDMAKLFASRGVKATIVTTPLNAPLVSRTIQRSKGLGFDINIKTIKFPAVEVGLPEGCENADSITSHETQGEMTKKLFMATAMLQQPLEKLLQECHPDCLIADMFLPWTTDAAAKFGIPRLVFHGISCFSLCTSDCLNRYKPYKKVSSDSELFVVPELPGDIKFTSKQLPDYMKQNVETDFTRLIQKVRESSLKSYGIVVNSFYELESDYANFFKELGRKAWHIGPVSLCNREFEDKAQRGKEASIDEHECLKWLDSKKPNSVVYICFGTVANFSDSQLKEIAIALEASGQQFIWVVRKDKKAKDNEEWLPEGFEKRMESKGLIIRGWAPQVVILDHEAIGGFVTHCGWNSTIEGIAAGKPMVTWPVSAEQFFNEKLVTDVLKIGVAVGVQQWVTVYGDKITSGAVEKAVTRIMTGEEAKEMRSRVEALGGMAKRAIEEDGSSYSNLNALIEELRGRRH

SEQ ID NO: 2003 - protein, 494 aa, Oryza sativa subsp. indica
  misc_feature (18)..(489): Pfam Name: UDPGT Pfam Description: UDP-glucoronosyl and UDP-glucosyl transferas
  misc_feature: Public GI ID no. 125526697
  misc_feature: Bit score of 406.9 for HMM based on sequences of Figure 25
  misc_feature: Functional Homolog Of SEQ ID NO. 1946
MDEQQPLHILFLPFLVPGHLIPIADMAALFAARGVRCTILTTPVNAAVVRPAVDRANDDALRGDAGGAPAIDIAVVPFPDVGLPPGVESGTALASEEDRGKFVHAIQRLREPFDRFMAEHHPDAVVADGFFTWSVDAAAEHGVPRLVFLGTGVFARSCQESMVRHNPVEACPDDDPDAAVSLPGLPHRVEMRRSQMIDPKKRPDHWAYFKMMNDADQRSYGEVFNSFHELETDYVEHYRTALGHRAWLVGPAAFASKDFAARGAAELSPDADGCLRWLDAKPHGSVAYVSFGTLSSFSPAEMRELARGLDLSGMNFVWVINGAADDTDASGQWMPEGFPELISPHGDRGLTIRGWAPQMLILNHPAVGGFVTHCGWNSTLEAVSAGVPMVTWPRYADQFFNEKLIVEVLKVGVSVGSKDFASNLENHQVIGGEVIAGAVRRVMGDGEEGAEAIRKKAAELGVKARGALEKGGSSHDDVGRLMDALMARRTSVDV

SEQ ID NO: 2004 - DNA, 1864 bp, Triticum aestivum
  misc_feature: Ceres Clone ID no. 847251
  misc_feature: Encodes the peptide sequence at SEQ ID NO. 2005
caatcgacagagcatgcgtcccagggatgagcagcggcagcagctccaacccctgcacatcctcttcctcccgttcttcgcccccgggcacctcattccggtcgtcgacatggccacgatattctccgctcgcggcgcgaggtgcaccatcctcaccacgcccgtcaacgccgacatcatccgtccggccgtcgaccgcgccaacgactccaactgccacggcaccgactccccttcccctgcagtcgacatctccgtcgtgcctttccccgatgtagggctccccccaggcatggagaacctcatatcccttactccagcccacggagccgactacaacttcaagttcatccaggccgcgcagctgctccgcgagcccttcgaccggttgatagctgccaaccgccccgacgccgtcgtgtccgacagcttcttcaggtggtccgcggacgccgccggggagcacggcgtcccgcgcctcgtgttcctcggtagcagcgtgttcgcccggtgctgcagcgagaccatgctgcgcaccaacccgctagagacaacgacggctaccaccgacgacgaccctgatgacgacgcccagctcgtctccctgccggggctgccgcaccgtgtccagctgaggcggagccagatgatggatcccaggaagcggccggcgatgtgggcattccacaaggacaacgatgccgcggaccagaggagcttcggcgaggtgttcaacagcttccacgagctggagccggactacgtcgagcacttccgcacgacgctcggccgccgtgcgtggctcgtggggccggtcgcgctcgccagcaaagacatggctaagagaggcagcaccaacaacacgaaggcacacgtcaccgacgactgcctgcggtggttggacgcaaagcgggccggctcggtggtgtacgtctcctttggcacgttcaccagtttctcgccggccgagctgcgcgagctcgcccgcggcctggacctctctggcaaggacttcgtgtggatcatcagctccggcacaggcacggacgggtcagagtggatgcctgagggcttcgccgagctgatggcacgcggtgaccgcggcatcatcatccgagactgggcgccgcagacgctcatcctcaaccaccccgccatgggcggcttcatgacgcactgcggctggaactcggcgctggaggccgtgagcgccggcgtgccgatggtcacgtggccgcggtatgcggaccagttctacaacgagaagctcatcgtggatgtgctcaaggtgggtgtcagcatcggcgccaaggacttcgcctcgcctctggagagacatgaggtgatcggcggcgaggtgatcgctggatgcatcgggaggctgatgggcagcagcgaggagggcgacgccttacggaagaaggccaaggacctcagtgtgaaagcaaggagcgccatggcgaagggtggatcttcgtacgacgacgtcggaaggctgatgggtgagttgatggctcgccggagttctggagaagtcacccgggcggcgagttttggtacgcctgccgactgactagtctcattgcagaattaattacgagtagttattacaacatgaggtggcaacatcgatccagaggcagcctgaactttcttccttttgtacgttggcgatcttggctacggcaggcaccgaggacgtcgtggcatgttataggtcgctacttgcaacgtgtgctgccagaagtgttgctgactgatgaaacgccgtggcatcttgcttgcaattcaatatcgttgtacgattgaaatttacaggcagcaccggcggcttgccgcaaacgccgtggcgtctctctctctt

SEQ ID NO: 2005 - protein, 519 aa, Triticum aestivum
  misc_feature (15)..(503): Pfam Name: UDPGT Pfam Description: UDP-glucoronosyl and UDP-glucosyl transferas
  misc_feature: Ceres Clone ID no. 847251
  misc_feature: Bit score of 425.5 for HMM based on sequences of Figure 25
  misc_feature: Functional Homolog Of SEQ ID NO. 1946
MRPRDEQRQQLQPLHILFLPFFAPGHLIPVVDMATIFSARGARCTILTTPVNADIIRPAVDRANDSNCHGTDSPSPAVDISVVPFPDVGLPPGMENLISLTPAHGADYNFKFIQAAQLLREPFDRLIAANRPDAVVSDSFFRWSADAAGEHGVPRLVFLGSSVFARCCSETMLRTNPLETTTATTDDDPDDDAQLVSLPGLPHRVQLRRSQMMDPRKRPAMWAFHKDNDAADQRSFGEVFNSFHELEPDYVEHFRTTLGRRAWLVGPVALASKDMAKRGSTNNTKAHVTDDCLRWLDAKRAGSVVYVSFGTFTSFSPAELRELARGLDLSGKDFVWIISSGTGTDGSEWMPEGFAELMARGDRGIIIRDWAPQTLILNHPAMGGFMTHCGWNSALEAVSAGVPMVTWPRYADQFYNEKLIVDVLKVGVSIGAKDFASPLERHEVIGGEVIAGCIGRLMGSSEEGDALRKKAKDLSVKARSAMAKGGSSYDDVGRLMGELMARRSSGEVTRAASFGTPAD

SEQ ID NO: 2006 - DNA, 1789 bp, Glycine max
  misc_feature: Ceres Clone ID no. 463175
  misc_feature: Encodes the peptide sequence at SEQ ID NO. 2007
aaaaaatattcatactagaatcccctcttttcccaagtgttttccttttcttattacttaccaaacagttctagttcaagtgcaaaagttctaccaacttgcttactttactactgaaaaagatgagcaatgaagttcgttctttgcatgtattcttcatccctttcttggcacatggccatatcataccaaccattgacatggccaaactatttgctggaaagggtctgaagaccacaataatcaccacaccccttaacgtacctttcatctccaaagccatcggaaaagccgaatccgaatccaacgacaacaacgtgatccatatcgaaaccatcgagttcccttatgcagaggctggtttacctaaaggctgtgaaaacaccaactccatcacttccatgcatttataccctgcgttcttcaaagcacttgggttactacaacacccctttgagcaacttttgcttcagcaacacccaaattgtgttgttgctgatgttatgttcccatgggctactaattcttcagcaaaatttggagttcctagccttgtgtacgatgggactagtttcttctccatatgcgccaacgaatgcacgaggctctacgagccttacaagaatgtttcttctgattcagaaccctttgtgattcccaaccttcccggtgagattacaatgacaaggatgcaggtgtcacctcatgtcatgagcaataaggaaagtcccgccgtgaccaaattgttggaggaagtgaaagaatcggagctgaaaagctatggtatggttgttaatagcttctatgaactcgagaaggtttatgcagatcatttaaggaacaatcttggaagaaaagcatggcatgttggtccaatgtttcttttcaacagggttaaagaagaaaaagcacatagaggaatggatgcatctattaatgatgagcatgagtgcttaaagtggcttgacacgaaggaaccgaattcagttgtttatgtgtgctttggaactacaacaaagttaactgattctcaacttgaggatattgccattggtctagaggcttcagggcaacaattcatctgggtcgtgaggaaaagcgaaaaagatggagttgatcaatggctacctgatggatttgaggaaaggatagaaggtaagggactaatcataagagggtgggcgcctcaagtgttgattcttgaacacgaagcgattggcgcgtttgtgacgcattgcggatggaattcaattttggaaggagtggttgcaggggtgcctatggtgacttggcctattgcttatgagcaatttttcaatgagaagttggtggccgagatcctcaaaattggagtacctgttggagctaagaaatgggctgcaggagttggggatactgttaagtgggaggcagtggagaaggctgtgaaaaggataatgattggggaagaagcagaagaaatgaggaacaaagccaaggggttttctcaactagctagacaatctgtggaagaaggaggatcttcttactcagatttggatgctttaattgcagagttgggttcactctcctactcaaatgagtaatgttatagttacttatatgtttctactaatcctcctattgctctataaaataagtattaaataaaaaaggaaatgtatttgatttgtttgagcatctttaatggagatgttttaagtgatgtgagcttaataagaattttgtaagtgtgggtgaaataccaaatgtttacataagcacactgcgcatatgctaaaattgtttg

SEQ ID NO: 2007 - protein, 487 aa, Glycine max
  misc_feature (21)..(483): Pfam Name: UDPGT Pfam Description: UDP-glucoronosyl and UDP-glucosyl transferas
  misc_feature: Ceres Clone ID no. 463175
  misc_feature: Bit score of 709.0 for HMM based on sequences of Figure 25
  misc_feature: Functional Homolog Of SEQ ID NO. 1946
MSNEVRSLHVFFIPFLAHGHIIPTIDMAKLFAGKGLKTTIITTPLNVPFISKAIGKAESESNDNNVIHIETIEFPYAEAGLPKGCENTNSITSMHLYPAFFKALGLLQHPFEQLLLQQHPNCVVADVMFPWATNSSAKFGVPSLVYDGTSFFSICANECTRLYEPYKNVSSDSEPFVIPNLPGEITMTRMQVSPHVMSNKESPAVTKLLEEVKESELKSYGMVVNSFYELEKVYADHLRNNLGRKAWHVGPMFLFNRVKEEKAHRGMDASINDEHECLKWLDTKEPNSVVYVCFGTTTKLTDSQLEDIAIGLEASGQQFIWVVRKSEKDGVDQWLPDGFEERIEGKGLIIRGWAPQVLILEHEAIGAFVTHCGWNSILEGVVAGVPMVTWPIAYEQFFNEKLVAEILKIGVPVGAKKWAAGVGDTVKWEAVEKAVKRIMIGEEAEEMRNKAKGFSQLARQSVEEGGSSYSDLDALIAELGSLSYSNE

SEQ ID NO: 2008 - protein, 493 aa, Oryza sativa subsp. indica
  misc_feature (21)..(490): Pfam Name: UDPGT Pfam Description: UDP-glucoronosyl and UDP-glucosyl transferas
  misc_feature: Public GI ID no. 125526698
  misc_feature: Bit score of 405.6 for HMM based on sequences of Figure 25
  misc_feature: Functional Homolog Of SEQ ID NO. 1946
MAAIDEQQPLHILFLPFLVPGHLIPIADMAALFAARGVRCTILTTPVNAAVVRPAVERANEDALRGDAGGALVPIDIAVVPFPDVGLPPGVENGAALTSEDDVRRFFHAIRRLREPFDRFMAEHRPDAVVSDGFFTWSADAAAAHGVPRLVFLGTSVFARLCNEIMVRHNPVGACPDDDPDAVVSLPGHPHRVELRRSQMADPKKLPIHWAFFQTMSAADERSYGEVFNSFHELEPECVEHHRAALGRRAWLVGPVALASKDVAARGAAELSPDVDGCLRWLDTKPDGSVVYVSFGTVSSFSPAETRELARGLDLSGMNFAWVISGADEPEPEWTPEGFAELIPPRGDRGRTIRGWAPQVLVLNHPAVGVFVTHCGWNSTLEAVSAGVPMVTWPRYSDQFYNERHVVEVLGVGVGVGARDFGSNLESHHRVIGGEVIAGAIRRVTGDGEEGEAIRWKAAELAAKARAAPEKGGSSYDDVGRLMDELMARRTFR

SEQ ID NO: 2009 - protein, 482 aa, Vitis vinifera
  misc_feature (9)..(479): Pfam Name: UDPGT Pfam Description: UDP-glucoronosyl and UDP-glucosyl transferas
  misc_feature: Public GI ID no. 147839909
  misc_feature: Bit score of 707.8 for HMM based on sequences of Figure 25
  misc_feature: Functional Homolog Of SEQ ID NO. 1946
MGNETDQLHVLFFPFMALGHMIPTIDMAKLFSARGVRATIITTPLNAPVVSKTMERGHYLGAQIGLRVIQFPSVQAGLPQGLENLDQDASPEIRLKFFLAMSLFQQPLEQLLQEYRPHGLVADAFFPWALDVASKFGIPRLAFQGTGFFAMCALQSLTAHKPYKGVGSDTEPFLLPDLPDEIKLTRLQISNDLTLGLENDFTRFFKEARESEERSYGTIVNTFYELEPAYAEHWRKVLGRKAWHIGPVSLCNRDAQDKTQRGKAASIDEDECLKWLNSKNPDSVIYVCFGSVSKFPAAQLLEIAMGLEASGQQFIWVVRKNKDEGDEEEWLPQGYEKRMEGKGLIIRGWAPQTLILDHEAVGGFVTHCGWNSTLEGVSAGVPMVTWPVFADQFYNEKLLTDVLKIGIGVGAQRWVPFVGDFVKQDAIEKAVKAVMAGEKAEELRSRAKSLGGMARRAIEKGGSSYTDMDALIEELKLYHAQI

SEQ ID NO: 2010 - protein, 482 aa, Vitis vinifera
  misc_feature (9)..(479): Pfam Name: UDPGT Pfam Description: UDP-glucoronosyl and UDP-glucosyl transferas
  misc_feature: Public GI ID no. 157341038
  misc_feature: Bit score of 706.2 for HMM based on sequences of Figure 25
  misc_feature: Functional Homolog Of SEQ ID NO. 1946
MGNETDQLHVLFFPFMALGHMIPTIDMAKLFSARGVRATIITTPLNAPVVSKTMERGHYLGAQIGLRVIQFPSVQAGLPQGLENLDQDASPEIRLKFFLAMSLFQQPLEQLLQEYRPHGLVADAFFPWALDVASKFGIPRLAFQGTGFFAMCALQSLTAHKPYKGVGSDTEPFLLPDLPDEIKLTRLQISNDLTLGLENDFTRFFKEARESEERSYGTIVNTFYELEPAYAEHWRKVLGRKAWHIGPVSLCNRDAQDKTQRGKAASIDEDECLKWLNSKYPDSVIYVCFGSVSKFPAAQLLEIAMGLEASGQQFIWVVRKNKDEGDEEEWLPQGYEKRMEGKGLIIRGWAPQTLILDHEAVGGFVTHCGWNSTLEGVSAGVPMVTWPVFADQFYNEKLLTDVLKIGIGVGAQRWVPFVGDFVKQDAIEKAVKAVMAGEKAEELRSRAKSLGGMARRAIEKGGSSYTDMDALIEELKLYHAQI

SEQ ID NO: 2011 - protein, 487 aa, Catharanthus roseus
  misc_feature (6)..(478): Pfam Name: UDPGT Pfam Description: UDP-glucoronosyl and UDP-glucosyl transferas
  misc_feature: Public GI ID no. 50284482
  misc_feature: Bit score of 629.4 for HMM based on sequences of Figure 25
  misc_feature: Functional Homolog Of SEQ ID NO. 1946
MVNQLHIFNFPFMAQGHMLPALDMANLFTSRGVKVTLITTHQHVPMFTKSIERSRNSGFDISIQSIKFPASEVGLPEGIESLDQVSGDDEMLPKFMRGVNLLQQPLEQLLQESRPHCLLSDMFFPWTTESAAKFGIPRLLFHGSCSFALSAAESVRRNKPFENVSTDTEEFVVPDLPHQIKLTRTQISTYERENIESDFTKMLKKVRDSESTSYGVVVNSFYELEPDYADYYINVLGRKAWHIGPFLLCNKLQAEDKAQRGKKSAIDADECLNWLDSKQPNSVIYLCFGSMANLNSAQLHEIATALESSGQNFIWVVRKCVDEENSSKWFPEGFEERTKEKGLIIKGWAPQTLILEHESVGAFVTHCGWNSTLEGICAGVPLVTWPFFAEQFFNEKLITEVLKTGYGVGARQWSRVSTEIIKGEAIANAINRVMVGDEAVEMRNRAKDLKEKARKALEEDGSSYRDLTALIEELGAYRSQVERKQQD

SEQ ID NO: 2012 - DNA, 1613 bp, Glycine max
  misc_feature: Ceres Clone ID no. 577260
  misc_feature: Encodes the peptide sequence at SEQ ID NO. 2013
aaaaatagcctttccgtagtagagagaaagatgggtagtagtgaatatcagactctgcacattttcttctttcccttcttggctcatggccacatgataccaactgtggacatggccaaattatttgccgaaaagggtgtgaaggccactataatcaccacacccctcaacgaacctttcatctacaacgccattggaaaatccaaaactaatggcaacaaaatccacatccaaaccatagagtttccttctgcagaggctggtttacttgatggctgtgaaaataccgagtcagtcccttccccagaattgttgaatccgttttttatggccacccatttcctccaagagccacttgagcagctactgcaaaagcaacttccagattgcattgttgctgatatgttcttcccatgggcaactgattccgccgccaaatttggaattcctaggctcgtcttccatgggactagtttcttctccttgtgtgttaccacgtgtatgccattctatgagcctcatgacaaatatgcttcttctgattctgattcgtttctcattcctaatttcccgggcgagattagaatcgaaaagacaaagattccaccttatagcaagagtaaggagaaagcaggcctggccaaattgttggaggaggcaaaggaatcagagttaaggagctatggggttgttgttaatagcttctacgaacttgagaaggtttatgcagatcattttaggaacgtacttggaagaaaagcgtggcatattggtcccttatctctatgcaataaagacgcagaagagaaagcacgtagaggaaaggaggcatctattgatgagcatgagtgcctgaagtggctaaacacaaagaaacccaattcagttatttatatatgctttggaagtacagtaaagtttcctgattctcaacttagagaaattgctaagggtcttgaggcttcagggcaacaattcatttgggtcgttaggaaaagcggagaagaaaagggagagaaatggttacatgatggatttgagaaaagaatggaaggcaagggactaatcataagagggtgggcgcctcaagtgttgattcttgaacaccaagcgattggcacgtttgtgacacattgtggatggaattcaacgttggaagcagtgactgcaggggttcccatggtcacttggcctattttcgccgaccaatttttcaatgagaagttggtgattgaggtccttaaaattggggtacctgttggtgctaaaacatggcttggaatgcagggagatagtatttcatgtgatgcagtggagaaggcagtgaagaggataatgacaggggaagaagccattgaaatgaggaacaaagcaaaggtgctttcacatcaagctaggcgggccatggaagaaggtggatcatccaactctgattttaaagctttaattgagggattaagttcgttgagccactaatataccaccatcaacactatgcatgcatttactctcaagattatttgttatctaaattttaatgatttaagctaaaatagtttaaaatcctgtcgacctaatttttttttatctagtgaaaatcaaatactatttat

SEQ ID NO: 2013 - protein, 481 aa, Glycine max
  misc_feature (10)..(480): Pfam Name: UDPGT Pfam Description: UDP-glucoronosyl and UDP-glucosyl transferas
  misc_feature: Ceres Clone ID no. 577260
  misc_feature: Bit score of 740.7 for HMM based on sequences of Figure 25
  misc_feature: Functional Homolog Of SEQ ID NO. 1946
MGSSEYQTLHIFFFPFLAHGHMIPTVDMAKLFAEKGVKATIITTPLNEPFIYNAIGKSKTNGNKIHIQTIEFPSAEAGLLDGCENTESVPSPELLNPFFMATHFLQEPLEQLLQKQLPDCIVADMFFPWATDSAAKFGIPRLVFHGTSFFSLCVTTCMPFYEPHDKYASSDSDSFLIPNFPGEIRIEKTKIPPYSKSKEKAGLAKLLEEAKESELRSYGVVVNSFYELEKVYADHFRNVLGRKAWHIGPLSLCNKDAEEKARRGKEASIDEHECLKWLNTKKPNSVIYICFGSTVKFPDSQLREIAKGLEASGQQFIWVVRKSGEEKGEKWLHDGFEKRMEGKGLIIRGWAPQVLILEHQAIGTFVTHCGWNSTLEAVTAGVPMVTWPIFADQFFNEKLVIEVLKIGVPVGAKTWLGMQGDSISCDAVEKAVKRIMTGEEAIEMRNKAKVLSHQARRAMEEGGSSNSDFKALIEGLSSLSH

SEQ ID NO: 2014 - DNA, 1458 bp, Populus balsamifera subsp. trichocarpa
  misc_feature: Ceres Annot ID no. 1461026
  misc_feature: Encodes the peptide sequence at SEQ ID NO. 2015
atgggcagtgaggttaaccagctacatgctcttttctttcctttcatggctcatggtcacatgataccactggtagacatggccaagctatttgcttcccgaggcctgaagactaccatagtcaccacccctctaaatgtgcctttcttctccaaaacagtccaaagaataaaaaatttgggatttgaaattaatatacgaaccatcgaattctccactgttgagactggattaccagaaggatgtgaaaatgcagacttgattatttctcaggctatgggctgggatatgctcaaaaaatttttcgtggcaaccaccattctccaagaaccccttgaaaggctactagaggaaatccatcctgactgccttattgcagatatgttctttccttggactactgatgctgcagctaaatttggaattccaaggttagtgtttcatggaactagctttttttctttatgcgttggagaaagtatgagactatacgagccacacaagaaagtttcatcagattgtgaaccctttttcatgcctaaccttcctgatgatatcaagttgacaagaaatgaactgccatatcctgaaagacatgatgatggatccgacttcaacaagatgtacaagaaggttaaagagggagattcgaaaagttacggggtggttgtcaacagtttctacgaacttgagccggtttatgctgatcattacagaaaagcttttggaagaaaagcatggcatgtaggaccagtttctctttgcaacagaaacatagatgacaaagcagagaggggaagagaagcttctattaatgaaaatgagtgtttgaagtggcttgactccaagaaacccaattcagttgtttatatctgctttggaagtatggcaagcttctctgcctctcagctaaaggagattgcaacaggccttgaagcttctggccagcaatttatctgggttgttagaagaaacaaaaacagtgaagaagataaggaagattggttacctgaagggtttgaggaaagaatggaagacaaggggctgattataagagggtgggcaccccaagtgttgattcttgatcatgaagcaataggtgcatttgtgactcattgtggatggaactcgactcttgaaggcataactgcagggaagcccatgattacatggcctgtatctgctgagcaattctataatgaaaagttggtgactgatgttttaaaaactggagttggtgttggagtcaaggaatgggttagagtgcgtggagatcatgttaaaagtgaagctgtagagaaggcaatcactcaaatcatggtgggtgaagaaggagaggaaaagaggagcagagcaattaagctaggagaaatggcaaggaaggctgttgaagaaggtggatcttcttgctctgatttcaatgctttgattgaagagttgaggtcgtatcgcccttga

SEQ ID NO: 2015 - protein, 485 aa, Populus balsamifera subsp. trichocarpa
  misc_feature (9)..(484): Pfam Name: UDPGT Pfam Description: UDP-glucoronosyl and UDP-glucosyl transferas
  misc_feature: Ceres Annot ID no. 1461026
  misc_feature: Bit score of 792.4 for HMM based on sequences of Figure 25
  misc_feature: Functional Homolog Of SEQ ID NO. 1946
MGSEVNQLHALFFPFMAHGHMIPLVDMAKLFASRGLKTTIVTTPLNVPFFSKTVQRIKNLGFEINIRTIEFSTVETGLPEGCENADLIISQAMGWDMLKKFFVATTILQEPLERLLEEIHPDCLIADMFFPWTTDAAAKFGIPRLVFHGTSFFSLCVGESMRLYEPHKKVSSDCEPFFMPNLPDDIKLTRNELPYPERHDDGSDFNKMYKKVKEGDSKSYGVVVNSFYELEPVYADHYRKAFGRKAWHVGPVSLCNRNIDDKAERGREASINENECLKWLDSKKPNSVVYICFGSMASFSASQLKEIATGLEASGQQFIWVVRRNKNSEEDKEDWLPEGFEERMEDKGLIIRGWAPQVLILDHEAIGAFVTHCGWNSTLEGITAGKPMITWPVSAEQFYNEKLVTDVLKTGVGVGVKEWVRVRGDHVKSEAVEKAITQIMVGEEGEEKRSRAIKLGEMARKAVEEGGSSCSDFNALIEELRSYRP

SEQ ID NO: 2016 - protein, 487 aa, Fragaria x ananassa
  misc_feature (1)..(481): Pfam Name: UDPGT Pfam Description: UDP-glucoronosyl and UDP-glucosyl transferas
  misc_feature: Public GI ID no. 82880420
  misc_feature: Bit score of 655.4 for HMM based on sequences of Figure 25
  misc_feature: Functional Homolog Of SEQ ID NO. 1946
MAMETKSCQQLHIFFLPFMARGHSIPLTDIAKLFSSHGARCTIVTTPLNAPLFSKATQRGEIELVLIKFPSAEAGLPQDCESADLITTQDMLGKFVKATFLIEPHFEKILDEHRPHCLVADAFFTWATDVAAKFRIPRLYFHGTGFFALCASLSVMMYQPHSNLSSDSESFVIPNLPDEIKMTRSQLPVFPDESEFMKMLKASIEIEERSYGVIVNSFYELEPAYANHYRKVFGRKAWHIGPVSFCNKAIEDKAERGSIKSSTAEKHECLKWLDSKKPRSVVYVSFGSMVRFADSQLLEIATGLEASGQDFIWVVKKEKKEVEEWLPEGFEKRMEGKGLIIRDWAPQVLILEHEAIGAFVTHCGWNSILEAVSAGVPMITWPVFGEQFYNEKLVTEIHRIGVPVGSEKWALSFVDVNAETEGRVRREAIEEAVTRIMVGDEAVETRSRVKELGENARRAVEEGGSSFLDLSALVGELNDLAFGGLVE

SEQ ID NO: 2017 - protein, 483 aa, Arabidopsis thaliana
  misc_feature (11)..(480): Pfam Name: UDPGT Pfam Description: UDP-glucoronosyl and UDP-glucosyl transferas
  misc_feature: Public GI ID no. 18418380
  misc_feature: Bit score of 1082.0 for HMM based on sequences of Figure 25
  misc_feature: Functional Homolog Of SEQ ID NO. 1946
MGSDHHHRKLHVMFFPFMAYGHMIPTLDMAKLFSSRGAKSTILTTSLNSKILQKPIDTFKNLNPGLEIDIQIFNFPCVELGLPEGCENVDFFTSNNNDDKNEMIVKFFFSTRFFKDQLEKLLGTTRPDCLIADMFFPWATEAAGKFNVPRLVFHGTGYFSLCAGYCIGVHKPQKRVASSSEPFVIPELPGNIVITEEQIIDGDGESDMGKFMTEVRESEVKSSGVVLNSFYELEHDYADFYKSCVQKRAWHIGPLSVYNRGFEEKAERGKKANIDEAECLKWLDSKKPNSVIYVSFGSVAFFKNEQLFEIAAGLEASGTSFIWVVRKTKDDREEWLPEGFEERVKGKGMIIRGWAPQVLILDHQATGGFVTHCGWNSLLEGVAAGLPMVTWPVGAEQFYNEKLVTQVLRTGVSVGASKHMKVMMGDFISREKVDKAVREVLAGEAAEERRRRAKKLAAMAKAAVEEGGSSFNDLNSFMEEFSS

SEQ ID NO: 2018 - protein, 501 aa, Oryza sativa subsp. indica
  misc_feature (6)..(492): Pfam Name: UDPGT Pfam Description: UDP-glucoronosyl and UDP-glucosyl transferas
  misc_feature: Public GI ID no. 125524633
  misc_feature: Bit score of 318.2 for HMM based on sequences of Figure 25
  misc_feature: Functional Homolog Of SEQ ID NO. 1946
MAAEFHFLVVPLIAQGHIIPMVEVARLLAARGARATVVTTPVNAARNGAAVEAARRDGLAVDLAEVAFPGPEFGVPEGLENMDQLADADPGMYLPLQRAIWAMAPPLERLVRALPRRPDCLVADYCNPWTAPVCDRLGIARVVMHCPSAYFLLATHNLSKHGVYGLAAGDGELEPFVVPDFPVRAVVDTATFRRFFQWPGLEEEERDAVEAERTADGFVINTFRDIEGAFVDGYAAALGRRAWAIGPTCAAAAGGGTDADARASRGNRADVDAGRILSWLDARPPASVLYISFGSISHLAAKQVIELARGIEASGRPFVWAIKEAAAGAVREWLDGEGYEERVKDRGVLVRGWAPQVSILSHPATGGFLTHCGWNSTLEAIAHGVPALTWPTILDQFSSERLLVDVLGVGVRSGVTAPPMYLPAEAEGVQVTAAGVEKAVAELMDGGADGAARRARARELAATARAAVEEGGSSHADLTDMIRHVAEVARTKRQEREVRPT

SEQ ID NO: 2019 - protein, 528 aa, Oryza sativa subsp. japonica
  misc_feature (11)..(493): Pfam Name: UDPGT Pfam Description: UDP-glucoronosyl and UDP-glucosyl transferas
  misc_feature: Public GI ID no. 115481308
  misc_feature: Bit score of 356.9 for HMM based on sequences of Figure 25
  misc_feature: Functional Homolog Of SEQ ID NO. 1946
MAAASAAKELHFLLVPLVAQGHIIPMVDLARLLAGRGARVTVVTTPVNAARNRAAVEGARRGGLAVELAEITFTGPEFGLPEGVENMDQLVDIAMYLAFFKAVWNMEAALEAYVRALPRRPDCVVADACNPWTAAVCERLAIPRLVLHCPSVYFLLAIHCLAKHGVYDRVADQLEPFEVPGFPVRAVVNTATCRGFFQWPGAEKLARDVVDGEATADGLLLNTFRDVEGVFVDAYASALGLRAWAIGPTCAARLDDADSSASRGNRAVVDAARIVSWLDARPPASVLYVSFGSLTHLRATQAIELARGLEESGWPFVWAIKEATAAAVSEWLDGEGYEERVSDRGLLVRGWAPQVTILSHPAAGGFLTHCGWNATLEAISHGVPALTWPNFSDQFSSEQLLVDVLRVGVRSGVTVPPMFLPAEAEGVQLTSDGVVKAVTELMDGGDEGTARRARAKELAAKARAAMEEGGSSHADLTDVIGYVSEFSAKKRQERDAGETAQQPPPSPAELGDISGDKVEADPALSVQS

SEQ ID NO: 2020 - DNA, 1524 bp, Sorghum bicolor
  misc_feature: Ceres Annot ID no. 8656592
  misc_feature: Encodes the peptide sequence at SEQ ID NO. 2021
atggcttccaatgatgagcagcagccgccaatacatattctcttcttcccgtatattgcgcctggccacctcataccggtggcggccatggccgccctctttgcttcacgtggtggcgtcaagtgcaccatactcaccactcccgtaaacgccaccgtcatccgctcggccgtcgacaaggccaacaactccttccgcgggacctccgccctggcgatccacatctccaccatccccttccctgatgtcggactcccgccgggcgtcgagagcgttgtcggcatctcctcagagtccgacctccacaagttgctggaaggggtccagcgcctccgcgagcccttggatcggttcctggccgatcaccgccacccccgccccgacgccgtcgtggtcgacagcttctacctgtgggccgccgacgtcgccgccgagcacggcatcccacggctgtctttcctcgggagcagcctgttcgcccgggcctgtaacgagtccttgctgcgccacaacccgttcgcgctcgctccggatgaccccgacgccgtcgtgtccctgccggagctgccgcaccgcgtcgcgatgaggcgcagacaggtgatggacccaagaaaggaccagctggagtgggaatacaaccagctcgtgcacgccgcggaccggaggagctacggcgaggtgttcaacagcttcgccgagctggagccggactacgtcgagcactaccgcacgacgctcggccgccgtgtgtggctggttggcccggtcgcccacgccaacgccttcgccttcgccggcgaggacgaggacgaggacatggcgcccggcgcggacaggtgcctgcggtggctcgacgagaagccacgcggctcagttgtgtacctcgcattcggcacactagcccatttctcggcggcggagctgcgggaggtggcgcgcggcctgcagctgtccggcaagaatttcctgtgggtcatgaagggtggaggagcggacacggcggaggacgcatcggaatggatgcccgaaggcttcgccgagctgctgattgacgtcggagcacgcggcctcatcttccagggttgggctccgcagaggcttatcctcgagcactccgccgtcggtgggttcgtgacgcactgtggatggaactcggtgctggaggccgtcagcgctggggtgccgctggtgacgttgccacggtacgccgaccagttctataacgagaagctcgtcgtcgagttgctcaagatgggggtcgatgtcgatgccggcgactatgtctccccgtttgaggtccgccgcgaggtgatcagcggtgagaagatcgcggaagggattgacagagtgatgggtgggaaccaagaggccgaggcgataaggaaaaacgctatggagctccgtcggaaggctaggagcgcaactgacaagggcggcacttcgtatgacgatgtcggcaagctcatccacgagttgatggcttgccggagatctctccaaaatagccatttacatgcgaattag

SEQ ID NO: 2021 - protein, 507 aa, Sorghum bicolor
  misc_feature (22)..(498): Pfam Name: UDPGT Pfam Description: UDP-glucoronosyl and UDP-glucosyl transferas
  misc_feature: Ceres Annot ID no. 8656592
  misc_feature: Bit score of 371.5 for HMM based on sequences of Figure 25
  misc_feature: Functional Homolog Of SEQ ID NO. 1946
MASNDEQQPPIHILFFPYIAPGHLIPVAAMAALFASRGGVKCTILTTPVNATVIRSAVDKANNSFRGTSALAIHISTIPFPDVGLPPGVESVVGISSESDLHKLLEGVQRLREPLDRFLADHRHPRPDAVVVDSFYLWAADVAAEHGIPRLSFLGSSLFARACNESLLRHNPFALAPDDPDAVVSLPELPHRVAMRRRQVMDPRKDQLEWEYNQLVHAADRRSYGEVFNSFAELEPDYVEHYRTTLGRRVWLVGPVAHANAFAFAGEDEDEDMAPGADRCLRWLDEKPRGSVVYLAFGTLAHFSAAELREVARGLQLSGKNFLWVMKGGGADTAEDASEWMPEGFAELLIDVGARGLIFQGWAPQRLILEHSAVGGFVTHCGWNSVLEAVSAGVPLVTLPRYADQFYNEKLVVELLKMGVDVDAGDYVSPFEVRREVISGEKIAEGIDRVMGGNQEAEAIRKNAMELRRKARSATDKGGTSYDDVGKLIHELMACRRSLQNSHLHAN

SEQ ID NO: 2022 - protein, 478 aa, Arabidopsis thaliana
  misc_feature (11)..(477): Pfam Name: UDPGT Pfam Description: UDP-glucoronosyl and UDP-glucosyl transferas
  misc_feature: Public GI ID no. 2911049
  misc_feature: Bit score of 1174.1 for HMM based on sequences of Figure 25
  misc_feature: Functional Homolog Of SEQ ID NO. 1946
  misc_feature: in Figure 25
MGTPVEVSKLHFLLFPFMAHGHMIPTLDMAKLFATKGAKSTILTTPLNAKLFFEKPIKNLNPGLEIDIQIFNFPCVELGLPEGCENVDFFTSNNNDDKNEMIVKFFFSTRFFKDQLEKLLGTTRPDCLIADMFFPWATEAAGKFNVPRLVFHGTGYFSLCAGYCIGVHKPQKRVASSSEPFVIPELPGNIVITEEQIIDGDGESDMGKFMTEVRESEVKSSGVVLNSFYELEHDYADFYKSCVQKRAWHIGPLSVYNRGFEEKAERGKKANIDEAECLKWLDSKKPNSVIYVSFGSVAFFKNEQLFEIAAGLEASGTSFIWVVRKTKEKEEWLPEGFEERVKGKGMIIRGWAPQVLILDHQATCGFVTHCGWNSLLEGVAAGLPMVTWPVAAEQFYNEKLVTQVLRTGVSVGAKKNVRTTGDFISREKVVKAVREVLVGEEADERRERAKKLAEMAKAAVEGGSSFNDLNSFIEEFTS

SEQ ID NO: 2023 - protein, 491 aa, Oryza sativa subsp. indica
  misc_feature (21)..(490): Pfam Name: UDPGT Pfam Description: UDP-glucoronosyl and UDP-glucosyl transferas
  misc_feature: Public GI ID no. 125526993
  misc_feature: Bit score of 418.4 for HMM based on sequences of Figure 25
  misc_feature: Functional Homolog Of SEQ ID NO. 1946
MAIKDEQQPLHILFFPFLAPGHLIPIADMAALFAARGVRCTILTTPVNAAVIRSAVDRANDSFRRNNGGLAIELTVVPFPDVGLPPGFESGTALTTQDDRDKFFLGIRLLHEPFDRYLSEHHVDAAVVDSFFRWAADAAAEHGVPRLGFLGTSVFARACTNSMLRNNPLETAPDDPDAVVPLPGLPHCVELRRSQMMDPKKRPDHWEKFQSIDAADQRSFGEVFNSFHELEPDYVEHYRTTLGRRVWLVGPVALANKDVAVRGTSELSPHADGYLRWLDAKPRGSVVYVSFGTLSSFSPAEMRELARGLDLSGKNFVWVINGADADASEWMPEGFAELIAPRGERGLTIRGWAPQMLILNHPAVGGFVTHCGWNSTLEAVTAGVPMVTWPRYADQFYNEKLITEVLEVGVGVGSMDFASKLENRRVIIGGEVVAGAIGRVMGDGEEGEAIRKKATELGVKARGALEKGGSSYDDVGILMDELMARRGSVNV

SEQ ID NO: 2024 - protein, 528 aa, Oryza sativa subsp. indica
  misc_feature (11)..(493): Pfam Name: UDPGT Pfam Description: UDP-glucoronosyl and UDP-glucosyl transferas
  misc_feature: Public GI ID no. 125531288
  misc_feature: Bit score of 350.7 for HMM based on sequences of Figure 25
  misc_feature: Functional Homolog Of SEQ ID NO. 1946
MAAASAAKELHFLLVPLVAQGHIIPMVDLARLLAGRGARVTVVTTPVNAARNRAAVEGARRGGLAVELAEIAFTGPEFGLPEGVQNMDQLVDIAMYLAFFKAVWNMEAALEAYVRALPRRPDCVVADACNPWTAAVCEHLAIPRLVLHCPSVYFLLAIHCLAKHGVYDRVADQLEPFEVPGFPVRAVVNTATCRGFFQWPGAEKLACDVVDGEATADGLLLNTFRDVEGVFVDAYASALGLRAWAIGPTCAARLDDADSSASRGNRAVVDAARIVSWLDARPPASVLYVSFGSLTHLRATQAIELARGLEESGWPFVWAIKEATAAAVSEWLDGEGYEERVSDRGLLVRGWAPQVTILSHPAAGGFLTHCGWNATLEAISHGVPALTWPNFSDQFSSEQLLVDVLRVGVRSGVTVPPMFLPAEAEGVQLTSDGVVKAVTELMDGGDEGTARRARAKELAAKARAAMEEGGSSHADLTDVIGYVSELSAKKRQERDAGETAQQPPPSPAELGDISGDKVEADPALSVQS

SEQ ID NO: 2025 - DNA, 1506 bp, Populus balsamifera subsp. trichocarpa
  misc_feature: Ceres Annot ID no. 1443816
  misc_feature: Encodes the peptide sequence at SEQ ID NO. 2026
atggattcagaagaaaaacaaattcatgtaatgttccttccctacctggcaccaggccacatgatgccaatggtggacatggctaggctattagccggaaatggattaaaggtcaccataatcaccaccaccatgaatgccgctcagtttaagaatgctattgatcgggatatcaaatccggtcgacagatttcgttggcaactctccgtttccctagcatagaagctggtttacctgaaggctgcgaaaatttatcctccacaacgacccctgaaatgactttgaagctgtttcacggcatagaattgctgcaaccacatattaaaatgatcttgcagaagcaccgccctgactgcattgcctctgattatctcttcccatggactgttgatgttgccattgaacttggcataccgaggcttgcctttaatggcagtggattcttcaatctttgtgttgcaaacagcattgattgtcatcaacctcacaacaatgtcacatctgagacagaacaatttgtcatcccaggcttgccagacaaagtaaccattacaagatcacaactaccggatattgtcaaaggcgaaaacgaagttttctctgctttgtttgataaactgaaggaggctgagaggaagagctttggagtgttgatgaatagcttttatgagttagaaccagcctatgctgatcatttcagaaaagtcactggaatcaaggcgtggcacttgggtcctgtatctctgttcaatagaaatgctgatgatagactagaaagaggtggcaagacttcaatacgtaaacatagctgcctggattggctggaatccaagaaaccaaagtccgttctctacatttgtttcggaagcctgaccagatttagcaagattcaaatatcagaaattgctagtgcacttgaagagtcgaggcactctttcatttgggctgtaggaaaaatcctgaaatctgacaacgaagataacaacctggatcggcagcaggactggtggctgccagaagagtatgaagacaggttgaagaacagtggcaaaggattgattataaagggatgggccccgcagctgctaatactggagcacccagcaattggagggtttttaactcactgcggctggaactctattcttgaaggtgtttgtgccggtcagcccatggtcacatggccaatttttgcagagcagttttacaatgagaagctcataactcaggtgcttaaattaggagtgccagttggcaatgagacttggaaagtgtgggcaaatgaggactcaccattgattaacagagacaaaatagagaaggcagtgagaattgttatgggtgacacagatgaggcaattgagatgaggaaacaagcaagtagactagcagcattcgcgaagatgacaattgaagagggcggatcgtcttctaatgacttgaaagccctaattgaggacatcagaacgtacaaacacgcaacaggacgcggggaatcaaggtga

SEQ ID NO: 2026 - protein, 501 aa, Populus balsamifera subsp. trichocarpa
  misc_feature (9)..(492): Pfam Name: UDPGT Pfam Description: UDP-glucoronosyl and UDP-glucosyl transferas
  misc_feature: Ceres Annot ID no. 1443816
  misc_feature: Bit score of 554.2 for HMM based on sequences of Figure 25
  misc_feature: Functional Homolog Of SEQ ID NO. 1946
MDSEEKQIHVMFLPYLAPGHMMPMVDMARLLAGNGLKVTIITTTMNAAQFKNAIDRDIKSGRQISLATLRFPSIEAGLPEGCENLSSTTTPEMTLKLFHGIELLQPHIKMILQKHRPDCIASDYLFPWTVDVAIELGIPRLAFNGSGFFNLCVANSIDCHQPHNNVTSETEQFVIPGLPDKVTITRSQLPDIVKGENEVFSALFDKLKEAERKSFGVLMNSFYELEPAYADHFRKVTGIKAWHLGPVSLFNRNADDRLERGGKTSIRKHSCLDWLESKKPKSVLYICFGSLTRFSKIQISEIASALEESRHSFIWAVGKILKSDNEDNNLDRQQDWWLPEEYEDRLKNSGKGLIIKGWAPQLLILEHPAIGGFLTHCGWNSILEGVCAGQPMVTWPIFAEQFYNEKLITQVLKLGVPVGNETWKVWANEDSPLINRDKIEKAVRIVMGDTDEAIEMRKQASRLAAFAKMTIEEGGSSSNDLKALIEDIRTYKHATGRGESR

SEQ ID NO: 2027 - DNA, 1219 bp, Panicum virgatum
  misc_feature: Ceres Clone ID no. 1830065
  misc_feature: Encodes the peptide sequence at SEQ ID NO. 2028
gtcagttccaccgtgccgtagagcggaacaggtcaggccaggccaccaccatccacccaagctcccgacgaggtcgacggcgatggcgtcggacggcgatggcggcggcgacggcctcgtctgcgtgacgggcggcagcggcttcatcggctcgtggctcgtccgccgcctcctcgaccgcggctacaccgtccacgccaccgtcaagaacctccaggacgagggcgagacgaagcacctccgggccctggacggcgcgggcgcgcggctctggctgttccagatggacctcctcgacccggcctccgtgcggccggcggtcgagggcgcccgcggcgtcttccacctggcctcccccgtcatactgcaccctacgcaggaccccgagaaggagctggtggagcctgcggtggagggcacgctcggcgtcctccgcgccgccaaggactgcggcgtcggccgcgtggtcatggtgtcgtcgcagacggccatggtgcccaaccccaggtggccggcggacaaggtcgtcgacgaggattcctgggccgacgtcgacctgctcaaggaactcaagctttggtacagcgtgtccaaaacactggcagagaaggctgcgtgggacttcgctgagaagcaggggttgcagctcgcggtgctgaatccagtgctggtgttgggcccgacattgacgccgtcgattaccggtagtctccaagtatttctgcagattatgaagggccagaggttcgacatggacgagtacttccttggctgcgttgatgtccgggacgtggcgcagtctctcgtagccttgtatgagagctcgtcggcacagggacgccacttgtgcgtggagtccattgaacggatggttgatttcaccaacaaacttgccgacctttatcctgaacttccggttcaaaaaatccaagaggacaaacaggagtgggtggtcagggcaaaggacccatccaagaaactgatcgaattgggtgttcgtttcattccatccgaccaaatcatcatggacactatggattgctttaggagcaaaggactcatctagctcttcatgtcgatttcctcatggaaaaatagcccatctaggtcgaatgcgatggtggatcaaaactgctgctgttaattaaaaaaaagtgctgctgtatgtaagttttctagtcgaaaataaactggcaggacacatgagtatctctctgcg

SEQ ID NO: 2028 - protein, 327 aa, Panicum virgatum
  misc_feature (13)..(258): Pfam Name: Epimerase Pfam Description: NAD dependent epimerase/dehydratase fam
  misc_feature: Ceres Clone ID no. 1830065
  misc_feature: Bit score of 815.4 for HMM based on sequences of Figure 43
  misc_feature: Functional Homolog Of SEQ ID NO. 2028
  misc_feature: in Figure 43
MASDGDGGGDGLVCVTGGSGFIGSWLVRRLLDRGYTVHATVKNLQDEGETKHLRALDGAGARLWLFQMDLLDPASVRPAVEGARGVFHLASPVILHPTQDPEKELVEPAVEGTLGVLRAAKDCGVGRVVMVSSQTAMVPNPRWPADKVVDEDSWADVDLLKELKLWYSVSKTLAEKAAWDFAEKQGLQLAVLNPVLVLGPTLTPSITGSLQVFLQIMKGQRFDMDEYFLGCVDVRDVAQSLVALYESSSAQGRHLCVESIERMVDFTNKLADLYPELPVQKIQEDKQEWVVRAKDPSKKLIELGVRFIPSDQIIMDTMDCFRSKGLI

SEQ ID NO: 2029 - DNA, 987 bp, Sorghum bicolor
  misc_feature: Ceres Annot ID no. 8669366
  misc_feature: Encodes the peptide sequence at SEQ ID NO. 2030
atggcatctcacggagacggcggcggcggcagcagcctcgtctgcgtgacgggcggcagcggcttcatcggctcctggctcgtccgcctccttctcggtcgcggctacaccgtccacgccaccgtcaagaacctccaggacgagagcgagacgaagcacctgcaggcaatggacggagcgaactcgcggctccggctgttccagatggacctcctcgaacccgcctccatccggccggcggtcgagggcgcccgcggcgtcttccacgttgcttctccggtcatcctgcaccgtgcacaggacccagagaatgagttggtggagcctgcgttgaagggcacgctgagcgtcctccgcgccgcgaaagactgtggagtcggccgtgttgtcatggtgtcatcgcagacggccatggtgccaaatccagcgtggcctgctgacaaggtcgtggatgaggactcctgggccgacattgagcagctcaagaaacttcagctttggtacaacgtctccaaaacactggcagagaaggccgcatgggacttcgccgaaaaggaaggtttggagctcgttgtgctcaatccagctctggtgttgggccctactttgacgcccaatatcatggccagtctccaaatgtttcttcagatcatgggagggaagaagtatgacatggacgagttcttcattggctgtgttgatgtccgagacgtcgcacagtctctgatagtgctgtatgagaacacatctgccgagggacgccacttatgcctggagtcctctgaacggatggtcgatttcaccaatagacttgctcatctctaccctgaattttcagtttacagaatccaagaggacaaacaagactgggtggtgagggccaaggacccctccaagaaactgatcaatttgggtgtccgtttcactccattggacaaaactatcgcggacactatggactgctttaggagcaaaggactcatctag

SEQ ID NO: 2030 - protein, 328 aa, Sorghum bicolor
  misc_feature (14)..(259): Pfam Name: Epimerase Pfam Description: NAD dependent epimerase/dehydratase fam
  misc_feature: Ceres Annot ID no. 8669366
  misc_feature: Bit score of 824.2 for HMM based on sequences of Figure 43
  misc_feature: Functional Homolog Of SEQ ID NO. 2028
  misc_feature: in Figure 43
MASHGDGGGGSSLVCVTGGSGFIGSWLVRLLLGRGYTVHATVKNLQDESETKHLQAMDGANSRLRLFQMDLLEPASIRPAVEGARGVFHVASPVILHRAQDPENELVEPALKGTLSVLRAAKDCGVGRVVMVSSQTAMVPNPAWPADKVVDEDSWADIEQLKKLQLWYNVSKTLAEKAAWDFAEKEGLELVVLNPALVLGPTLTPNIMASLQMFLQIMGGKKYDMDEFFIGCVDVRDVAQSLIVLYENTSAEGRHLCLESSERMVDFTNRLAHLYPEFSVYRIQEDKQDWVVRAKDPSKKLINLGVRFTPLDKTIADTMDCFRSKGLI

SEQ ID NO: 2031 - protein, 329 aa, Vitis vinifera
  misc_feature (14)..(259): Pfam Name: Epimerase Pfam Description: NAD dependent epimerase/dehydratase fam
  misc_feature: Public GI ID no. 157337055
  misc_feature: Bit score of 903.9 for HMM based on sequences of Figure 43
  misc_feature: Functional Homolog Of SEQ ID NO. 2028
  misc_feature: in Figure 43
MSSESGSVTRSEVVCVTGGSGYIGSWLVCLLLRRGYTVHATVKNLKDERETKHLEALEGADSRLRLFQIDVLDYDSIVAAVNGAAGVFHLASPCIVDQVQDPEKELLDPAIKGTNNVLTAAKELGVGRVVVTSSISAIIPSPNWPADVVKGEDCWTDTEYCKQKGIWYPLSKTLAEKAAWEFAKEKGLDVVVVNPGTVMGPILPPGLNASMLMILRLLQGCTDIYEDFFMGSVHVKDVALAHILVYENKSASGRHLCVEAISHYGDFAAKVAELYPEYKVPRLPKDTQPGLLRAKTASKKLMDLGLQFIPMEQIIKDSVESLRSKGFIS

SEQ ID NO: 2032 - protein, 324 aa, Solanum demissum
  misc_feature (9)..(254): Pfam Name: Epimerase Pfam Description: NAD dependent epimerase/dehydratase fam
  misc_feature: Public GI ID no. 47900734
  misc_feature: Bit score of 870.4 for HMM based on sequences of Figure 43
  misc_feature: Functional Homolog Of SEQ ID NO. 2028
  misc_feature: in Figure 43
MANGEGEVVCVTGGSGFIGSWLVSSLLERGYTVHATVKDLNDEKETKHLLALDGAESRLRLYQIDLLDYDSIVSAITGAVGVFHLASPCIVDEVKDPENDLLSPAIKGTSNVLTASKELGVKRVVVTSSVSSITPNPNWPADRIMNEDCWTDIEYCKQNGVWYPLSKTLAEKDAWKFAKEKDLDIVVVNPGTVMGPIIPPSLNASMQMILRLLQGCTDTYQDFFMGLVHVKDVALAHILVYENKSAKGRHMCVEAITHYGDFAAKVAELYPEYNVPRLPKDTQPGLLRAKDGAKKLMDLGLEFIEMEQIIRDAVESLKIKGYIS

SEQ ID NO: 2033 - DNA, 1260 bp, Glycine max
  misc_feature: Ceres Clone ID no. 626124
  misc_feature: Encodes the peptide sequence at SEQ ID NO. 2034
atagtagattacactgaaacattaaaaaactggaggttgatagttaatctatctgcaacagcaacattgtgacagtgacagtgtcgtaggatggagaaggtggtatgtgtgaccggcggcagcggctgcattggttcatggctcgtccatctcctcttggatcgcggctacaccgttcacgccaccgtccaaaacctcaacgatgaagccgagacgaagcatcttcaatccctcgacggagcgtccacgcgcctccgcctcttccagatggatctcctccgccacgacaccgtcctcgccgccgtgcgtggctgcgccggcgtcttccacctcgcctctccctgcattgtcgaccaagtccacgacccccagaaggagcttctggacccggcgattaagggaaccatgaacgtgctcacggcggcgaargaagcaggggtgcggcgcgtggtgctcacgtcctccatctccgcggktacgccgagccccaattggcccggcgatgttgccaagacggaggagtgctggaccgacgttgaatattgcaagcaaaaggggttgtggtatccattgtcgaagactttagctgagaaagctgcttgggattttgctaaagagaatgatttggatgttgtggtggtgaatcctggcactgtgatgggtcctgttattccaccaaggcttaatgcgagcatggtcatgctcgtgcgccttctacaaggctgtgccgaaacatatgaggacttttttatgggatcggtccactttaaggatgtagcattggcacatattttggtgtatgagaacaaatcagcggctggtaggcatttgtgtgttgaagctatctctcactatggtgactttgtggcaaaagttgctgaactctatccagagtataatgtgcctaagatgcaacgagatacccagccgggattattgagaacaaaggatggagcaaagaaactgatggatttgggtttgcaattcattccaatggagaagattattaaggatgctgtagaggatttgaagagcaaagggttcctttcataaataatgctgctgctgctgctatttagaaccagagtgtaatgtttgcaatatgagtacttatgacacgagcctgtaatgtatagtctgtttcctctatgcctatgatgctatgcaaattggcgctgactcgatatgtattttcaatctgatgcttttttattaataaaaaataaaagctagaatagaccgggagaggttaaggacttg

SEQ ID NO: 2034 - protein, 320 aa, Glycine max
  misc_feature (5)..(250): Pfam Name: Epimerase Pfam Description: NAD dependent epimerase/dehydratase fam
  misc_feature: Ceres Clone ID no. 626124
  misc_feature: Bit score of 869.1 for HMM based on sequences of Figure 43
  misc_feature: Functional Homolog Of SEQ ID NO. 2028
  misc_feature: in Figure 43
  misc_feature (113)..(113): Xaa is any aa, unknown, or other
  misc_feature (129)..(129): Xaa is any aa, unknown, or other
MEKVVCVTGGSGCIGSWLVHLLLDRGYTVHATVQNLNDEAETKHLQSLDGASTRLRLFQMDLLRHDTVLAAVRGCAGVFHLASPCIVDQVHDPQKELLDPAIKGTMNVLTAAXEAGVRRVVLTSSISAXTPSPNWPGDVAKTEECWTDVEYCKQKGLWYPLSKTLAEKAAWDFAKENDLDVVVVNPGTVMGPVIPPRLNASMVMLVRLLQGCAETYEDFFMGSVHFKDVALAHILVYENKSAAGRHLCVEAISHYGDFVAKVAELYPEYNVPKMQRDTQPGLLRTKDGAKKLMDLGLQFIPMEKIIKDAVEDLKSKGFLS

SEQ ID NO: 2035 - DNA, 1110 bp, Brassica napus
  misc_feature: Ceres Clone ID no. 1411238
  misc_feature: Encodes the peptide sequence at SEQ ID NO. 2036
gtctgaaactgaaacgctctaagcaaaaatcatcaatgtcgacggaacgagaagtagtctgtgtcaccggcgcaagtggctgcatcgggtcgtggctcgtccatctgctcctcctccgcggctactccgttcacgccaccgtgaaaaacctccaggatgagaaagagacgaaacatctggaagctctcgaaggagcagccacgcgcctccatctattcgagatggatctactgaagtacgacactgtttccgccgccgtcaacggatgttccggcgttttccacctcgcatctccctgtatcgtcgacgaagtccaagatcctcagaagcaactacttgatccagcggttaaggggacattaaatgtactcacggcggcgaaagaagccggcgtgaagagggttgtggtgacgtcttccatatcggcgataaccccaagccccaactggcctgctgataagatcaagaacgaggactgttgggctgatgaagacttctgcaagcaaaatggattgtggtatccactttctaagacgcttgctaagaaggcagcttgggagtttgcagaggagaagggattagatgtggttgtggtgaatccaggaaccgtcatgggtcctgttattcctccatccatcaacgctagcatgctcatgcttcaacgcctccttgaggggtgtacagagacatacgagaacttcttcatgggttcggtgcatttcaaggatgtggcattagctcatatacttgtctatgagaacccatctgctaaaggaagacacctgtgcgttgaggccatctctcactacggtgattttgtagccaaagtagctgaactctatcctaattacagtgtccccaagttaccgagagagactcaaccgggtttactccgagccaagaacgcagcaaagaagctgatggaattggggttagagttcagttccatggaggttatcatcaaggatggtgtggagagtcttaaaagcaaaggatttatctcttaaactcatttgcttgatctagcagtgagcaaattatggtggcagcagaatcatgttatgttatatatataagactttgtaatttgaataagctgcacattgttgt

SEQ ID NO: 2036 - protein, 323 aa, Brassica napus
  misc_feature (8)..(253): Pfam Name: Epimerase Pfam Description: NAD dependent epimerase/dehydratase fam
  misc_feature: Ceres Clone ID no. 1411238
  misc_feature: Bit score of 876.9 for HMM based on sequences of Figure 43
  misc_feature: Functional Homolog Of SEQ ID NO. 2028
  misc_feature: in Figure 43
MSTEREVVCVTGASGCIGSWLVHLLLLRGYSVHATVKNLQDEKETKHLEALEGAATRLHLFEMDLLKYDTVSAAVNGCSGVFHLASPCIVDEVQDPQKQLLDPAVKGTLNVLTAAKEAGVKRVVVTSSISAITPSPNWPADKIKNEDCWADEDFCKQNGLWYPLSKTLAKKAAWEFAEEKGLDVVVVNPGTVMGPVIPPSINASMLMLQRLLEGCTETYENFFMGSVHFKDVALAHILVYENPSAKGRHLCVEAISHYGDFVAKVAELYPNYSVPKLPRETQPGLLRAKNAAKKLMELGLEFSSMEVIIKDGVESLKSKGFIS

SEQ ID NO: 2037 - protein, 319 aa, Acacia mangium x Acacia auriculiformis
  misc_feature (5)..(248): Pfam Name: Epimerase Pfam Description: NAD dependent epimerase/dehydratase fam
  misc_feature: Public GI ID no. 68159360
  misc_feature: Bit score of 836.1 for HMM based on sequences of Figure 43
  misc_feature: Functional Homolog Of SEQ ID NO. 2028
  misc_feature: in Figure 43
MSKVVCVTGASGAIGSWLVRLLLDRGYTIHATVQNLKDENETKHLEVMEGAKSRLRLFEMDLLDEDSIMATVKGCAGVFHLACPNVIGQVQDPEKEIVEPAVKGTVNVLKAAREAGVERVVATSSISAIIPSPNWPSDRIKNEDCWCDLDYCKRKGLWYPIAKTLAEKAGWEFAKETGYDVVMINPGTALGPLIPPRLNSSMAVLLGVLKGDTETYEDFFMGMAHFKDVAMAHILAFEKKEASGRNLCVEAIRHYGDFVEKVAELYPQYHVAKVPKDTQPGLLRATDASKKLINLGMKFTPIEQIITDAVESLKSLGFL

SEQ ID NO: 2038 - protein, 322 aa, Picea sitchensis
  misc_feature (7)..(252): Pfam Name: Epimerase Pfam Description: NAD dependent epimerase/dehydratase fam
  misc_feature: Public GI ID no. 116786528
  misc_feature: Bit score of 830.3 for HMM based on sequences of Figure 43
  misc_feature: Functional Homolog Of SEQ ID NO. 2028
  misc_feature: in Figure 43
MGSKETVCVTGASGFIGSWIVRLLLERGYSVQGTVQDLGNEKETKHLEAMEGAKERLKLFQMDLLDYGSIEAAINGSVGVFHLASPNIIEEVENPQAQLLDPAVKGTKHVLQAAQKAKVKRLVLTSSTSAIIPSPNWPANVPKDENCWTDLDYCKENGIWYPVSKTLAEKTAGDFAKETGLDVVVINPGPVMGPILPPAINASMTMFRQLLQGGTEGYQNIYMGCVHVKDVAEGHILLYETSSASGRHLCIEAITHWSDFAEMVAKLYPEYKIHRFTEVTQPGLLRVQNASKKLMDLGLVFTPMEQVIKDSLSSLKEKGFLN

SEQ ID NO: 2039 - DNA, 945 bp, Sorghum bicolor
  misc_feature: Ceres Annot ID no. 8669367
  misc_feature: Encodes the peptide sequence at SEQ ID NO. 2040
atggcggcagccggggacgccggcggcctcctcgtctgcgtgacgggcgccagcggcttcattggctcctggctcgtccgctgcctccttgaccgcggctacaccgtccacgccaccgtcaagaacctccaagatgagggcgagacgaagcacttgcaggccatgggcggcgccgacgcgcgtctccggctgttccagatggacctcgtcgaccctgcttccgttcagccagcgatcgaaggcgcccacggcgcagaagatccggagaaggagctgctggaacctgcggtgaagggcacgctcaacgtgctgcgagcagcgaaagattgtggagtcggccgcgttgtgctcatgtcgtcacaggcggccatggtgcccaatcccaactggcctccgggtaaggtcatagatgatgactgttgggcagacgttgagctgctcaagaagcttcagctctggtacagcgtttctaaaacactggcagagaaggctgcatgggattttgccgaaaaggaggagttgcagatagctgtgctcaatccagggatggtattgggcccaatgttaacaccatcagtgaacgccagcctgcgtctcttgctgcaaattctgggaggcgagaggattgacttggacgacatctacatgggttgtgttgatgtgagagacgtcgcgcactctctgataatgttgtacgagaacccatcagcacaaggacgccacttatgcatggaatccgctgaacgcctggttgatttggccaataagattgctgatctttaccctgaacacccagttcagagaatccgggaggacaagcaagggtgggtggtgagagcaaaggacccttccaagaaattgatcaaattgggtgttcgtttcactccactggacaaaaccatcagggacaccgtggattgttttaggagcaaaggactcatctag

SEQ ID NO: 2040 - protein, 314 aa, Sorghum bicolor
  misc_feature (12)..(254): Pfam Name: Epimerase Pfam Description: NAD dependent epimerase/dehydratase fam
  misc_feature: Ceres Annot ID no. 8669367
  misc_feature: Bit score of 681.9 for HMM based on sequences of Figure 43
  misc_feature: Functional Homolog Of SEQ ID NO. 2028
MAAAGDAGGLLVCVTGASGFIGSWLVRCLLDRGYTVHATVKNLQDEGETKHLQAMGGADARLRLFQMDLVDPASVQPAIEGAHGAEDPEKELLEPAVKGTLNVLRAAKDCGVGRVVLMSSQAAMVPNPNWPPGKVIDDDCWADVELLKKLQLWYSVSKTLAEKAAWDFAEKEELQIAVLNPGMVLGPMLTPSVNASLRLLLQILGGERIDLDDIYMGCVDVRDVAHSLIMLYENPSAQGRHLCMESAERLVDLANKIADLYPEHPVQRIREDKQGWVVRAKDPSKKLIKLGVRFTPLDKTIRDTVDCFRSKGLI

SEQ ID NO: 2041 - protein, 352 aa, Oryza sativa subsp. japonica
  misc_feature (12)..(283): Pfam Name: Epimerase Pfam Description: NAD dependent epimerase/dehydratase fam
  misc_feature: Public GI ID no. 56202090
  misc_feature: Bit score of 681.6 for HMM based on sequences of Figure 43
  misc_feature: Functional Homolog Of SEQ ID NO. 2028
MAATGDSSGALVCVTGGSGFIGSWLVRLLLDRGYTVHATVKNLQDDGETRHLQALDGADTRLRLFQMDLLDPASITPAVDGAHGVFHLASPLTLHPTQDPEATNSPFTIAQLQLQYCLHTCTNAVLSGELLKPAVSGTLNVLRAAKDCGVARVMLMASQVAIVPNPEWPADKVIDDDSWADVELLKKHQHWYNVSKTLAEKAAWDFAAKEGLQLVALNPGLVLGPMLMPSPTSSLHMLLQILGGQRFDIDDFYIGCVDVRDVAQSAVVIYENTSAQGRHLCIESIERLIDFHDKLAELYPEFPIHRIQEDKQGWVVRSKAASKKLIDLGVHFIPFEKTIRDSVDCLRSKGYI

SEQ ID NO: 2042 - protein, 373 aa, Oryza sativa subsp. japonica
  misc_feature (12)..(304): Pfam Name: Epimerase Pfam Description: NAD dependent epimerase/dehydratase fam
  misc_feature: Public GI ID no. 115440809
  misc_feature: Bit score of 651.7 for HMM based on sequences of Figure 43
  misc_feature: Functional Homolog Of SEQ ID NO. 2028
MAATGDSSGALVCVTGGSGFIGSWLVRLLLDRGYTVHATVKNLHHDYTEPYAGSSRSPVFSSLVEDDGETRHLQALDGADTRLRLFQMDLLDPASITPAVDGAHGVFHLASPLTLHPTQDPEATNSPFTIAQLQLQYCLHTCTNAVLSGELLKPAVSGTLNVLRAAKDCGVARVMLMASQVAIVPNPEWPADKVIDDDSWADVELLKKHQHWYNVSKTLAEKAAWDFAAKEGLQLVALNPGLVLGPMLMPSPTSSLHMLLQILGGQRFDIDDFYIGCVDVRDVAQSAVVIYENTSAQGRHLCIESIERLIDFHDKLAELYPEFPIHRIQEDKQGWVVRSKAASKKLIDLGVHFIPFEKTIRDSVDCLRSKGYI

SEQ ID NO: 2043 - protein, 324 aa, Solanum tuberosum
  misc_feature (9)..(254): Pfam Name: Epimerase Pfam Description: NAD dependent epimerase/dehydratase fam
  misc_feature: Public GI ID no. 76573313
  misc_feature: Bit score of 864.3 for HMM based on sequences of Figure 43
  misc_feature: Functional Homolog Of SEQ ID NO. 2028
MANGEGEVVCVTGGSGFIGSWLVSSLLERGYTVHATVKDLNDEKETKHLLALDGAESRLRLYQIDLLDYDSIVSAITGAVGVFHLASPCTVDEVKDPENDLLSPAIKGTSNVLTASKELGVKRVVVTSSVSSITPNPNWPADRIMNEDCWTDIEYCKQNGVWYPLSKTLAEKDAWKFAEEKDLDIVVVNPGTVMGPIIPPSLNASMQMILRLLQGCTDTYQDFFMGLVHVKDVALAHILVYENKSAKGRHMCVEAITHYGDFAAKVAELYPEYNIPRLPKDTQPGLLRAKDGAKKLMDLGLEFIEMEQIIRDAVESLKIKGYIS

SEQ ID NO: 2044 - protein, 324 aa, Arabidopsis thaliana
  misc_feature (9)..(254): Pfam Name: Epimerase Pfam Description: NAD dependent epimerase/dehydratase fam
  misc_feature: Public GI ID no. 15237678
  misc_feature: Bit score of 840.7 for HMM based on sequences of Figure 43
  misc_feature: Functional Homolog Of SEQ ID NO. 2028
MLTDEREVVCVTGASGCIGSWLVHQLLLRGYSVHATVKNLQDEKETKHLEGLEGAATRLHLFEMDLLQYDTVSAAINGCSGVFHLASPCIVDEVQDPQKQLLDPAVKGTINVLTAAKEASVKRVVVTSSISAITPSPNWPADKIKNEECWAAEDYCRQNGLWYPLSKTLAEKAAWEFAEEKGLDVVVVNPGTVMGPVIPPSLNASMHMLLRLLQGCTETYENFFMGSVHFKDVALAHILVYEDPYSKGRHLCVEAISHYGDFVAKVAELYPNYNVPKLPRETQPGLLRDKNASKKLIDLGLKFISMEEIIKEGVESLKSKGFIS

SEQ ID NO: 2045 - DNA, 1150 bp, Arabidopsis thaliana
  misc_feature: Ceres Clone ID no. 30064
  misc_feature: Encodes the peptide sequence at SEQ ID NO. 2046
gaaacttagagagacagagagagagaaagctcaaattcaatcatcaatgttaacggacgagagagaagtagtctgtgtcaccggcgccagtggctgcatcggctcgtggctggtccatcagctcctcctccgcggctactccgtccacgccaccgtgaaaaacctccaggatgagaaagagacgaaacatctagaaggtctcgaaggtgcagccacacgcctccatctattcgagatggatctcstacaatacgacaccgtttccgccgccatcaatggttgctccggcgtattccacctcgcatcaccttgtatcgtcgatgaagtccaagatccccagaagcaactacttgacccggcggttaaaggaaccataaatgttctgacggcggcaaaagaagccagtgttaagagagttgttgtgacgtcttcgatatcggcgattactccaagtcccaactggcctgctgataagatcaagaatgaggaatgttgggctgctgaagactactgcaggcaaaatggattgtggtatccactgtcgaagacgcttgctgagaaggcagcttgggaatttgcagaggagaaaggattggatgtggttgtggtgaatccaggcactgtcatggggcctgtgattcctccgtctcttaacgctagcatgcacatgcttctacgccttcttcaggggtgcacggagacatacgagaacttctttatggggtctgtgcatttcaaggatgtggctttagctcatattcttgtatacgaggatccatattcgaaaggaaggcacttgtgcgttgaggctatctctcactacggtgattttgtagccaaagttgctgagctctatcccaattacaatgtccccaagttaccgagagagactcaaccgggtttacttcgagataagaatgcatcaaagaagctcatagatttggggttaaagttcatttccatggaggaaatcatcaaggaaggtgtggagagtcttaaaagcaaaggatttatctcttaatacctacctctgtaactcagtttgattgagcaattaacacaatctctaggcagcagaaacatttcatatgatatacgattttgcacttttgtaataaataagctggcctatggtatggtatgaacatcc

SEQ ID NO: 2046 - protein, 324 aa, Arabidopsis thaliana
  misc_feature (9)..(254): Pfam Name: Epimerase Pfam Description: NAD dependent epimerase/dehydratase fam
  misc_feature: Ceres Clone ID no. 30064
  misc_feature: Bit score of 835.9 for HMM based on sequences of Figure 43
  misc_feature: Functional Homolog Of SEQ ID NO. 2028
  misc_feature (67)..(67): Xaa is any aa, unknown, or other
MLTDEREVVCVTGASGCIGSWLVHQLLLRGYSVHATVKNLQDEKETKHLEGLEGAATRLHLFEMDLXQYDTVSAAINGCSGVFHLASPCIVDEVQDPQKQLLDPAVKGTINVLTAAKEASVKRVVVTSSISAITPSPNWPADKIKNEECWAAEDYCRQNGLWYPLSKTLAEKAAWEFAEEKGLDVVVVNPGTVMGPVIPPSLNASMHMLLRLLQGCTETYENFFMGSVHFKDVALAHILVYEDPYSKGRHLCVEAISHYGDFVAKVAELYPNYNVPKLPRETQPGLLRDKNASKKLIDLGLKFISMEEIIKEGVESLKSKGFIS

SEQ ID NO: 2047 - protein, 334 aa, Oryza sativa subsp. japonica
  misc_feature (14)..(267): Pfam Name: Epimerase Pfam Description: NAD dependent epimerase/dehydratase fam
  misc_feature: Public GI ID no. 115456211
  misc_feature: Bit score of 702.5 for HMM based on sequences of Figure 43
  misc_feature: Functional Homolog Of SEQ ID NO. 2028
MASGGGGGGEGETVLVTGASGFIGSCLVRRLLARGYSVHAAVLNPDDKAETDHLHALAAAGGGEGRRLRVFPGDLLDGAALLAAARGCSGVFHLASPCIVDRVLDPQAQLMVPAVEGTLNVLRAAKDAGGVRRVVVTSSISAIVPSPGWPAGEVRDERCWTDLDYCEKNGVWYPASKTLAEKAAWKFAEENGLDVVVVNPGTVMGLVIPPTINASMAMLVRLLEGCTEEYADFYMGPVHVEDVALAHILLYENPSASGRHLCVQSIAHWSDFASKVAELYPEYKVPKLPKETQPGLVRAEAASKKLIALGLQFSPMEKIIRDSVESLKSRGFIS

SEQ ID NO: 2048 - protein, 334 aa, Oryza sativa subsp. japonica
  misc_feature (14)..(267): Pfam Name: Epimerase Pfam Description: NAD dependent epimerase/dehydratase fam
  misc_feature: Public GI ID no. 125588404
  misc_feature: Bit score of 702.9 for HMM based on sequences of Figure 43
  misc_feature: Functional Homolog Of SEQ ID NO. 2028
MASGGGGGGEGETVLVTGASGFIGSCLVRRLLARGYSVHAAVLNPDDKAETDHLHALAAARGGEGRRLRVFPGDLLDGAALLAAARGCSGVFHLASPCIVDRVLDPQAQLMVPAVEGTLNVLRAAKDAGGVRRVVVTSSISAIVPSPGWPAGEVRDERCWTDLDYCEKNGVWYPASKTLAEKAAWKFAEENGLDVVVVNPGTVMGLVIPPTINASMAMLVRLLEGCTEEYADFYMGPVHVEDVALAHILLYENPSASGRHLCVQSIAHWSDFASKVAELYPEYKVPKLPKETQPGLVRAEAASKKLIALGLQFSPMEKIIRDSVESLKSRGFIS

SEQ ID NO: 2049 - protein, 321 aa, Glycine max
  misc_feature (5)..(250): Pfam Name: Epimerase Pfam Description: NAD dependent epimerase/dehydratase fam
  misc_feature: Public GI ID no. 166080305
  misc_feature: Bit score of 749.8 for HMM based on sequences of Figure 43
  misc_feature: Functional Homolog Of SEQ ID NO. 2028
MSKVVCVTGASGAIGSWVALLLLQRGYTVHATVQDIKDENETKHLEEMEGAKSRLHFFEMDLLDIDSIAAAIKGCSGVIHLACPNIIGHVEDPEKQILEPAIKGTVNVLKAAKEAGVERVVATSSISSIMPSPNWPADKIKAEECWTDLEYRKQKGLYYPIAKTLAEKAGWEFAKETGFDVVMINPGTALGPLLPPRINSSMEMLVSVLKGGKETYEDFFMGMAHFKDIALAHILALENKKAAGRHLCVESIRHFSDLVDKVSELYPEYDVVKLPKDTQPGLLRASTKDASTKLIDLGLEFTPVDQIIKDAVESLKSKGYV

SEQ ID NO: 2050 - DNA, 1383 bp, Triticum aestivum
  misc_feature: Ceres Clone ID no. 931114
  misc_feature: Encodes the peptide sequence at SEQ ID NO. 2051
atcgtctcttcctcacccacgtggggtggtcagtcactcagtccccagtcgacccgcaacaccacgccccacgccacacacacaccaccggacacggaggagatggcgacaggagttggggaggccaggggggagacggtgctggtcaccggcgccagcggcttcatcggctcctggaccgtgcgcctcctcctcgcccgcggctacgacgtccacgccgccgtcctcaaccccgatgacaaggccgagacggagcacctcctggcgctcgccggcggcgacgagggccgcgtccgcttcttcccgtgcgacctcctcgacggcgccgccatgctcgccgccgcgcgcggctgctccggcgtcttccacctcgcctcgccctgcaccgtcgaccgcgtcctcgacccccagaaggagctggtggtgccggccgtggaggggacgctcaacgtgctgcgcgccgccaaggaggccgggggcgtgcgccgggtggtggtgacctcgtccgtctccgccgtcgtgcccagccccgggtggcccgccggcgaggtcctcgacgagcgctgctggaccgacatcgactactgcgacaagaacggggtttggtaccctgcttcaaagacactggctgagaaggcagcatggaagtttgcagaggagaatggactggatgtggttgtggtcaatccagggactgttttgggcccgatgattccgccgaggatcaatgctagcatggccatgtttcttcgcttgcttgaaggctgcacagaggagtataaggatttcttcatcgggccagtccacgtggaagacgtcgcattagcccatatcacgctgttcgagaacccgtctgcatccgggaggcacctctgcgtggagcccatctgtcactggagcgatttcgcgtcgaaagtcgccgagctctaccccaactacaaggtccccaagttccccgaggacacgcagccggtgctggtgagagcggagacggtgccgaagaagctgatggcgctgggcctgcagttcactccgttggagaagatcatcagggacgccgtggagagcctccggagcagaggatgcatcgcctgatggtgatggctggattattattaggtgtactgtattgcttcccctctgttgctggctcatgatcaaaccttgcttcagagatgtgttgtgcccagcccagtgctagaccttatagttgcttgctgtatgattgtgcaataacggctggttgatctgctggtacactgtaatggttctcttgctagattgttccgacaaatctttgcgtgttgcgaggaagatcaccgttgaataattgtccaggataagagagaagaaaacagtactctcgtaatcgagccaataatg

SEQ ID NO: 2051 - protein, 330 aa, Triticum aestivum
  misc_feature (13)..(260): Pfam Name: Epimerase Pfam Description: NAD dependent epimerase/dehydratase fam
  misc_feature: Ceres Clone ID no. 931114
  misc_feature: Bit score of 682.1 for HMM based on sequences of Figure 43
  misc_feature: Functional Homolog Of SEQ ID NO. 2028
MATGVGEARGETVLVTGASGFIGSWTVRLLLARGYDVHAAVLNPDDKAETEHLLALAGGDEGRVRFFPCDLLDGAAMLAAARGCSGVFHLASPCTVDRVLDPQKELVVPAVEGTLNVLRAAKEAGGVRRVVVTSSVSAVVPSPGWPAGEVLDERCWTDIDYCDKNGVWYPASKTLAEKAAWKFAEENGLDVVVVNPGTVLGPMIPPRINASMAMFLRLLEGCTEEYKDFFIGPVHVEDVALAHITLFENPSASGRHLCVEPICHWSDFASKVAELYPNYKVPKFPEDTQPVLVRAETVPKKLMALGLQFTPLEKIIRDAVESLRSRGCIA

SEQ ID NO: 2052 - DNA, 1187 bp, Zea mays
  misc_feature: Ceres Clone ID no. 257394
  misc_feature: Encodes the peptide sequence at SEQ ID NO. 2053
acactcggaacctcagctcagaggatcggaagaacggacggcgagatggcaagcggggaagaaggcaagggcgagacggtgctggtcaccggggccagcggcttcatcggctcgaccctcgtccgcggcctcctcggccscggctacaacgtccgcgccggcgtcctcgaccccgacgacagggcggagacggaccacctcctcgcgctcgccgccggcgccggcgccggccgcctcagcttcttccgctgcgacctcctggacggcgccgcgctgctcgacgcggcaagggggtgctcgggcgtcttccacctcgcgtcaccctgcaccgtcgaccccgtcaaggacccccagaatcagctgatggtgcctgcggtggaagggacgctgaacgtggtgcgcgcggccaaggacgccggcggagtgcggcgggtggtcgtgacctcgtccatctcggccgtcgtgcccaaccccgggtggcccgccggcgaggtcgtcgacgagcgttgctgggccgacatcgactactgcgagaagaacggggtttggtaccctgcttccaagacgctggcggagaaggcggcgtggaagtttgcagaggagaacgggctggatgtggttgtggttaacccggggactgtgctgggcccgatgattccaccagccatcaacgctagcatggccatgttttgtcgcctccttcaaggctgcacggaggagtacgccgatttcttcctagggccagtgcacgtggaagacgtcgccatggcgcatatcctggtgttcgagagcgcatcggcgtcggggaggcacctgtgcgtccactccatctgccactggagcgacttcgccgccaaagtcgccgagctctaccccgactacaaagtgcccaagttccccaaggacacccagcctgggctggtgagacaggaggtggggtccaagaagctcatcgcgctggggcttcagatcacccccatggagaagatcatcagggatgccgtcgagagcctcaagagccgaggccacatctcctgaatcctgatggatggcaggatgggtagtgcttgtcatgcgtgaggccgtacgtcatggaccttgctaagttgctagcgtggcttgtgtaactagtagtaataatgatgtaaccagacgacgacgacgaacctgagaaggaaaactgagcc

SEQ ID NO: 2053 - protein, 330 aa, Zea mays
  misc_feature (12)..(263): Pfam Name: Epimerase Pfam Description: NAD dependent epimerase/dehydratase fam
  misc_feature: Ceres Clone ID no. 257394
  misc_feature: Bit score of 657.6 for HMM based on sequences of Figure 43
  misc_feature: Functional Homolog Of SEQ ID NO. 2028
  misc_feature (32)..(32): Xaa is any aa, unknown, or other
MASGEEGKGETVLVTGASGFIGSTLVRGLLGXGYNVRAGVLDPDDRAETDHLLALAAGAGAGRLSFFRCDLLDGAALLDAARGCSGVFHLASPCTVDPVKDPQNQLMVPAVEGTLNVVRAAKDAGGVRRVVVTSSISAVVPNPGWPAGEVVDERCWADIDYCEKNGVWYPASKTLAEKAAWKFAEENGLDVVVVNPGTVLGPMIPPAINASMAMFCRLLQGCTEEYADFFLGPVHVEDVAMAHILVFESASASGRHLCVHSICHWSDFAAKVAELYPDYKVPKFPKDTQPGLVRQEVGSKKLIALGLQITPMEKIIRDAVESLKSRGHIS

SEQ ID NO: 2054 - DNA, 1245 bp, Zea mays
  misc_feature: Ceres Clone ID no. 339107
  misc_feature: Encodes the peptide sequence at SEQ ID NO. 2055
acacacacagacagtgacattgacacacttaagagctcgagatctcactctcctcacctcagctctcagagaggaaggacactgcggccgggcgatggcgagcgtggagggcaagagggagacggtgctggtcaccggcgccagcggcttcatcggatcgaccctcgtcggcctcctcctcgaccgcggctacaacgtccatgccagcgtcctcaaccccgatgacaaggcggagacggagcacctggtcgccctgggcgccggcgccggcgaaggccggctgcgcgtcttcccgggcgacctcctcgacggcgccgcgctcatggccgccgcgcggggctgctcgggcgtgttccacctcgccaccccctgcaccgtctaccccgtgagcgacccgcaggggcagatggtggtcccggcggtggagggcacgctcaacgtcctgcgcgccgccaaggaggcccgcaccgtgcggcgggtggtggtcacctcgtccagctccgccatcatacccagccccgcgtggcccgccggcgagccccgcgacgagcggtgctgggccgacgtcgactactgcaagaagaacgaggtctggtaccctgtttccaagacgctggcagagaaggcggcttggaggtttgcggaggagaacggggtagacgtggttgtcgtcaacccggtgactgccatgggccccatgattccgcccaccatcaactgcagcatgaccgtgctcctacgcctgctacaaggttgcacggaggagtacagggacatctggatgggggcggtgcatgtgcacgacgccgccgtggcgcatgtcctggtgttcgagagcccggcggcgtccgggaggcacatctgcgctcagtccatctcccactggagcgacttcgcggccaaggtcgccgagctgtaccctgagtacaaggtgcccaagttccccaaggatacccagcctgggctggtgcgacagggagccgaggaggggtccaagaagctcgtcgcgttggggctgcacttcagccctctggagaagatcatcacggacgctgtggaggctctcaagagcagaggctacatttcgtagctagccgtccgtcggcagctatatagtggagtagtatgcctgtcgaatttcgattcccaagtggcaaatcctgcaaaacgaggtcgccaatatgaacaataaataaataacggtgtgataaaataaagcagattttctggtgcatttggcccttc

SEQ ID NO: 2055 - protein, 331 aa, Zea mays
  misc_feature (11)..(258): Pfam Name: Epimerase Pfam Description: NAD dependent epimerase/dehydratase fam
  misc_feature: Ceres Clone ID no. 339107
  misc_feature: Bit score of 639.0 for HMM based on sequences of Figure 43
  misc_feature: Functional Homolog Of SEQ ID NO. 2028
MASVEGKRETVLVTGASGFIGSTLVGLLLDRGYNVHASVLNPDDKAETEHLVALGAGAGEGRLRVFPGDLLDGAALMAAARGCSGVFHLATPCTVYPVSDPQGQMVVPAVEGTLNVLRAAKEARTVRRVVVTSSSSAIIPSPAWPAGEPRDERCWADVDYCKKNEVWYPVSKTLAEKAAWRFAEENGVDVVVVNPVTAMGPMIPPTINCSMTVLLRLLQGCTEEYRDIWMGAVHVHDAAVAHVLVFESPAASGRHICAQSISHWSDFAAKVAELYPEYKVPKFPKDTQPGLVRQGAEEGSKKLVALGLHFSPLEKIITDAVEALKSRGYIS

SEQ ID NO: 2056 - protein, 331 aa, Zea mays
  misc_feature (11)..(258): Pfam Name: Epimerase Pfam Description: NAD dependent epimerase/dehydratase fam
  misc_feature: Public GI ID no. 212275195
  misc_feature: Bit score of 641.9 for HMM based on sequences of Figure 43
  misc_feature: Functional Homolog Of SEQ ID NO. 2028
MASVEGKRETVLVTGASGFIGSTLVGLLLDRGYNVHASVLNPDDKAETEHLVALGAGAGEGRLRVFPGDLLDGAALMAAARGCSGVFHLATPCTVYPVSDPQGQMVVPAVEGTLNVLRAAKEARTVRRVVVTSSSSAIIPSPAWPAGEPRDERCWADVDYCKKNEVWYPVSKTLAEKAAWRFAEENGVDVVVVNPVTAMGPMIPPTINCSMIVLLRLLQGCTEEYRDIWMGAVHVHDAAMAHILVFESPAASGRHICAQSISHWSDFAAKVAELYPEYKVPKFPKDTQPGLVRQGAEEGSKKLVALGLHFSPLEKIIRDAVEALKSRGYIS

SEQ ID NO: 2057 - DNA, 1308 bp, Panicum virgatum
  misc_feature: Ceres Clone ID no. 1986400
  misc_feature: Encodes the peptide sequence at SEQ ID NO. 2058
gagaggggaacatcggggcatggcgagcggggaagccaagggggagacggtgctggtcaccggcgccagcggcttcatcggctcgacgctcgtccgcggcctcctcgaccgcggctacaccgtccgcgccggcgtcctcaaccccgatgacagggcggagacggaccacctcctggcgctcgccgccggcgccggcgagggccgcctcagcatcttccgctgcgacctcctcgacggcgccgcgctcgccgacgccgcgcggggctgctcgggcgtcttccacctcgcctccccctgcaccgtcgaccccgtcaaggatcacctgaatcagctgatggtgccagccgtggaggggacgcggaacgtgctgcgcgccgccaaggcggccgggggcgtgcggcgggtggtggtgacctcgtcgatctcggccatcgtgcccagccccgggtggcccgccggcgaggtccgcgacgagcgctgctggaccgacatcgactactgcgagaagaacggggtgtggtaccctgcttccaagacactggcagagaaggcagcgtggaagtttgcagaggagaacggcctagatgtggttgtggttaacccggggacagttctggggccgatgattccaccaaccatcaacgctagcatggccatgtttcgtcgcctcctggaaggttgcatagaggagtacgcggatttcttcatgggaccagtccatgtggaagacgttgccttggctcatatccttgtgttcgagaacccgtcagcgtccgggaggcacatctgcgtggagtccatctgtcactggagcgacttcgcggccaaagtcgcggagatctatcccaattacaaagtgcccaagttgcccaaggatacgcagcctgggctggtgagagcggaggtggggtcgaagaagctcatcgcgctagggctgcaggtcagccccatggagaagatcattagggatgccgtggagagcctcaagagcagagggttcatctcctaatgggtgatggctggttgtaatgtgataagtaaaaaaaaaaaggtactgtgatgtcttcctgggccttgctagtactacaaaacagtaataagggtggcaacataagacaccgttggaatcgtgcaatctagcgcggggctgggcaaaaaatgctgaaacgtttgcaagatgtccattctcaagcatgtagtttcaagcaccaaatgatgcgcatagcttgttctgactgttctaatggttgacgtgacagtatggggccatgccattttgctcgttcttatctaaacgaaaaggttcgg

SEQ ID NO: 2058 - protein, 329 aa, Panicum virgatum
  misc_feature (11)..(259): Pfam Name: Epimerase Pfam Description: NAD dependent epimerase/dehydratase fam
  misc_feature: Ceres Clone ID no. 1986400
  misc_feature: Bit score of 663.7 for HMM based on sequences of Figure 43
  misc_feature: Functional Homolog Of SEQ ID NO. 2028
MASGEAKGETVLVTGASGFIGSTLVRGLLDRGYTVRAGVLNPDDRAETDHLLALAAGAGEGRLSIFRCDLLDGAALADAARGCSGVFHLASPCTVDPVKDHLNQLMVPAVEGTRNVLRAAKAAGGVRRVVVTSSISAIVPSPGWPAGEVRDERCWTDIDYCEKNGVWYPASKTLAEKAAWKFAEENGLDVVVVNPGTVLGPMIPPTINASMAMFRRLLEGCIEEYADFFMGPVHVEDVALAHILVFENPSASGRHICVESICHWSDFAAKVAEIYPNYKVPKLPKDTQPGLVRAEVGSKKLIALGLQVSPMEKIIRDAVESLKSRGFIS

SEQ ID NO: 2059 - DNA, 987 bp, Sorghum bicolor
  misc_feature: Ceres Annot ID no. 8631946
  misc_feature: Encodes the peptide sequence at SEQ ID NO. 2060
atggcgggggagacggtgctggtcaccggcgccagcggcttcatcggctccaccctcgtccgcctcctcctcggccgtggctacaacgtccacgccggcgttctcaaccccgatgacaaggcggagacggagcacctgctcgccctggccgccggcgccggcgagggcgagggccgcctccgcatcttccgcggcgacctcctcgacggcgccgcgctgatcgacgccgcgcggggctgctcgggtgtcttccacctcgcctcgccctgcatcgtcgacgccgtcagcgacccccagaagcaactgatagtgccggcggtggaagggacgctgaacgtgctgcgcgccgccaaggaggccgggagcgtgcggcgggtggtggtcacctcgtccagctgcgccatcatgcccagccccgggtggcccgccggcgaggtccgggacgagcgctgctggactgacatcgactacagcgagaagaacggggtttggtaccctgtttccaagacgctggcagagaaggcagcgtggaaatttgcagaggagaacggagtagatgtggttgtggttaatccaacgtctgtcctgggcacgataatcccaccaaccatcaattctagcatgtccgtgcttctacgcctccttcaaggttgcacagaggagtacaaggacatatggatgggggcagtccatgtggaagacgttgccttggcccatctcctggtgttcgagaacccatcagcttccgggaggcacatctgcgccgagtccatcaatcacttgagcgacttcgcggccaaactcgccgagctctaccccagctacaaagtgcccaagttccccaaggatacccagcctgggcttgtgagagcagaagcggaggtggcggcgaaaaagctcgttgcactagggctgcagttcaggcccctggagaagatcatcagggatgccgtggagagcctcaagagcagaggttacatttcgtag

SEQ ID NO: 2060 - protein, 328 aa, Sorghum bicolor
  misc_feature (6)..(255): Pfam Name: Epimerase Pfam Description: NAD dependent epimerase/dehydratase fam
  misc_feature: Ceres Annot ID no. 8631946
  misc_feature: Bit score of 636.2 for HMM based on sequences of Figure 43
  misc_feature: Functional Homolog Of SEQ ID NO. 2028
MAGETVLVTGASGFIGSTLVRLLLGRGYNVHAGVLNPDDKAETEHLLALAAGAGEGEGRLRIFRGDLLDGAALIDAARGCSGVFHLASPCIVDAVSDPQKQLIVPAVEGTLNVLRAAKEAGSVRRVVVTSSSCAIMPSPGWPAGEVRDERCWTDIDYSEKNGVWYPVSKTLAEKAAWKFAEENGVDVVVVNPTSVLGTIIPPTINSSMSVLLRLLQGCTEEYKDIWMGAVHVEDVALAHLLVFENPSASGRHICAESINHLSDFAAKLAELYPSYKVPKFPKDTQPGLVRAEAEVAAKKLVALGLQFRPLEKIIRDAVESLKSRGYIS

SEQ ID NO: 2061 - DNA, 993 bp, Sorghum bicolor
  misc_feature: Ceres Annot ID no. 8631947
  misc_feature: Encodes the peptide sequence at SEQ ID NO. 2062
atggcaagcggggaacaaggcaagggggagacggtgctggtcaccggcgccagcggcttcatcggctcgaccctcgtccgaggcctccttggccgcggctacaacgtccgcgccggcgtcctcaaccccgatgacagggcggagacggaccacctcctcgatctcgccgccggcgccggcgacggccgcctcagcttcttccgctgcgacctcctggacggcgccgcgctgctcgacgccgcgcgcgggtgctcgggtatcttccacctcgcgtcgccctgcaccgtcgaccccgtcaaggacccccagaatcagctgatggtgcccgcggtggaagggacgcggaacgtggtgcgcgcggccaaggacgccggcggagtgcggcgggtggtggtgacctcgtccatctcggccatggtgcccagccccgggtggcccgccggggaggtcctcgacgagcgttgctggaccgacatcgactactgcgagaagaacggggtttggtaccctgcttcgaaagcactggcagagaaggcagcgtggaagtttgcagaggagaacgggctagatgtggttgtggttaaccctgggactgtgctgggcccgatgattccaccagccatcaacgctagcatggccatgttttgtcgcctccttcaaggctgcacagaggagtatgccgatttcttcataggaccagtacacgtggaagacgttgccatggcgcatatcatggtgttcgagaacccatcggcgtcggggaggcatatgtgcgtccagtccatctgtcactggagcgacttcgcggtcaaggtcgccgagctctaccccaactacaaagtgcccaagttccctaaggacacccagcctgggctggtgagacaagaggtaggctccaagaagctcatcgcgctggggcttcagatcactcccatggagaagatcatcagggatgccgtggagagcctcgagagcagaggccacatctcctga

SEQ ID NO: 2062 - protein, 330 aa, Sorghum bicolor
  misc_feature (12)..(260): Pfam Name: Epimerase Pfam Description: NAD dependent epimerase/dehydratase fam
  misc_feature: Ceres Annot ID no. 8631947
  misc_feature: Bit score of 648.3 for HMM based on sequences of Figure 43
  misc_feature: Functional Homolog Of SEQ ID NO. 2028
MASGEQGKGETVLVTGASGFIGSTLVRGLLGRGYNVRAGVLNPDDRAETDHLLDLAAGAGDGRLSFFRCDLLDGAALLDAARGCSGIFHLASPCTVDPVKDPQNQLMVPAVEGTRNVVRAAKDAGGVRRVVVTSSISAMVPSPGWPAGEVLDERCWTDIDYCEKNGVWYPASKALAEKAAWKFAEENGLDVVVVNPGTVLGPMIPPAINASMAMFCRLLQGCTEEYADFFIGPVHVEDVAMAHIMVFENPSASGRHMCVQSICHWSDFAVKVAELYPNYKVPKFPKDTQPGLVRQEVGSKKLIALGLQITPMEKIIRDAVESLESRGHIS

SEQ ID NO: 2063 - DNA, 1134 bp, Zea mays
  misc_feature: Ceres Clone ID no. 100845730
  misc_feature: Encodes the peptide sequence at SEQ ID NO. 2064
gcggccgggcgatggcgagcgtggagggcaagagggagacggtgctggtcaccggcgccagcggcttcatcggatcgaccctcgtcggcctcctcctcgaccgcggctacaacgtccacgccagcgtcctcaaccccgatgacaaggcggagacggagcacctggtcgccctgggcgccggcgccggcgagggccggctgcgagtcttcccgggcgacctcctcgacggcgccgcgctcatggccgccgcgcggggctgctcgggcgtgttccacctcgccaccccctgcaccgtctaccccgtgagcgacccgcaggggcagatggtggtgccggcggtggagggcacgctcaacgtcctgcgcgccgccaaggaggcccgcaccgtgcggcgggtggtggtcacctcgtccagctccgccatcatacccagccccgcgtggcccgccggcgagccccgcgacgagcggtgctgggccgacgtcgactactgcaagaagaacgaggtctggtaccctgtttccaagacgctggcagagaaggcggcgtggaggtttgcggaggagaacggggtagacgtggttgtcgtcaacccggtgactgccatgggcccaatgattccgcccaccatcaactgcagcatgatcgtgctcctacgcctgctacaaggttgcacggaggagtacagggacatctggatgggggcggtgcatgtgcacgacgccgccatggcgcatatcctggtgttcgagagcccggcagcgtccgggaggcacatctgcgcccagtccatctcccactggagcgacttcgcggccaaggtcgccgagctgtaccctgagtacaaggtgcccaattgcgtacgttgcaggttccccaaggatacccagcctgggctggtgcgacagggagccgaggaggggtccaagaagctcgtcgcgttggggctgcacttcagccctctggagaagatcatcagggacgctgtggaggccctcaagagcagaggctacatttcgtagctagccgaccgacggcagctatagtggagtagtatgcctgtcgaatttcgattcccaagtggcaaattctgcaaaacgagttcgccaatatgaacaataaataaagaacgtt

SEQ ID NO: 2064 - protein, 336 aa, Zea mays
  misc_feature (11)..(258): Pfam Name: Epimerase Pfam Description: NAD dependent epimerase/dehydratase fam
  misc_feature: Ceres Clone ID no. 100845730
  misc_feature: Bit score of 629.6 for HMM based on sequences of Figure 43
  misc_feature: Functional Homolog Of SEQ ID NO. 2028
MASVEGKRETVLVTGASGFIGSTLVGLLLDRGYNVHASVLNPDDKAETEHLVALGAGAGEGRLRVFPGDLLDGAALMAAARGCSGVFHLATPCTVYPVSDPQGQMVVPAVEGTLNVLRAAKEARTVRRVVVTSSSSAIIPSPAWPAGEPRDERCWADVDYCKKNEVWYPVSKTLAEKAAWRFAEENGVDVVVVNPVTAMGPMIPPTINCSMIVLLRLLQGCTEEYRDIWMGAVHVHDAAMAHILVFESPAASGRHICAQSISHWSDFAAKVAELYPEYKVPNCVRCRFPKDTQPGLVRQGAEEGSKKLVALGLHFSPLEKIIRDAVEALKSRGYIS

SEQ ID NO: 2065 - DNA, 993 bp, Populus balsamifera subsp. trichocarpa
  misc_feature: Ceres Annot ID no. 1543142
  misc_feature: Encodes the peptide sequence at SEQ ID NO. 2066
atggccaagcaaaaggaagcagtgtgtgtgactggagccaacgggttcattggctcatggctggttcgtaccttattagaccaaggctacaccaaaatccacgcctctatatacccaggctctgacccatctcatctcttcgaaatccccggtgccaccgatgctagcgtaagtctggaggttttcgaagccgacgtgcttgaccacgacgccatttgtaaggccgtggaaggctgccaaggggttttccacgttgcatctccctgtactctagaggacccaaaggacccacaagaggaacttgtgatgcctgcggtgcaaggcactcttaatgttcttgaggctgctaagaagttcaaggttaggcgcgtggttgtgacgtcctctatatcggctttggttcctaatccgtcgtggccgagggagaaggtgtttgatgagtcgtcctggactgatcttgattactgcaagtctcgccagaaatggtatccggtgtcaaagacactggcagagaaagcagcatgggagtttgcagggaggaatggaatggatgtggtggcaatccatcctgcgacgtgccttggccctctcttgcagcctgcattgaacgctagctgtgctgtgttacagcaactgttgcaaggatcaagagacactcaggaataccactggctgggagctgtgcatgtaagagatgtggcaagggcacaggttttgttatttgagacccctactgcttctggtagatatctttgcaccaatggaatctaccagtttggtgattttgctgcgacggtttccagactcttccccgagtttcctcttcacaggtttagtggggaaactcaaccaggtctgagaggttgcaaggatgcatccaagaaattaattgacctcgggctagtcttcactccagttgaagattctgtacgagaaacggtggaaagtctgaaagctaaaggcttcctcaggaatgaaatgtctcaatcttag

SEQ ID NO: 2066 - protein, 330 aa, Populus balsamifera subsp. trichocarpa
  misc_feature (8)..(260): Pfam Name: Epimerase Pfam Description: NAD dependent epimerase/dehydratase fam
  misc_feature: Ceres Annot ID no. 1543142
  misc_feature: Bit score of 533.2 for HMM based on sequences of Figure 43
  misc_feature: Functional Homolog Of SEQ ID NO. 2028
MAKQKEAVCVTGANGFIGSWLVRTLLDQGYTKIHASIYPGSDPSHLFEIPGATDASVSLEVFEADVLDHDAICKAVEGCQGVFHVASPCTLEDPKDPQEELVMPAVQGTLNVLEAAKKFKVRRVVVTSSISALVPNPSWPREKVFDESSWTDLDYCKSRQKWYPVSKTLAEKAAWEFAGRNGMDVVAIHPATCLGPLLQPALNASCAVLQQLLQGSRDTQEYHWLGAVHVRDVARAQVLLFETPTASGRYLCTNGIYQFGDFAATVSRLFPEFPLHRFSGETQPGLRGCKDASKKLIDLGLVFTPVEDSVRETVESLKAKGFLRNEMSQS

SEQ ID NO: 2067 - protein, 318 aa, Arabidopsis thaliana
  misc_feature (6)..(248): Pfam Name: Epimerase Pfam Description: NAD dependent epimerase/dehydratase fam
  misc_feature: Public GI ID no. 15226955
  misc_feature: Bit score of 528.1 for HMM based on sequences of Figure 43
  misc_feature: Functional Homolog Of SEQ ID NO. 2028
MAKETVCVTGANGFIGSWIIRTLIEKGYTKIHASIYPGSDPTHLLQLPGSDSKIKIFEADLLDSDAISRAIDGCAGVFHVASPCTLDPPVDPEKELVEPAVKGTINVLEAAKRFNVRRVVITSSISALVPNPNWPEKVPVDESSWSDLDFCKSRQKWYPISKTLAEKAAWEFSEKHGTNIVTIHPSTCLGPLLQPNLNASCAVLLQLLQGSTETQEHHWLGVVHVKDVAKGHVMLFETPDASGRFLCTNGIYQFSEFAALVSKLFPEFAVHKFDKETQPGLTSCNDAAKRLIELGLVFTAVEDAVKETVQSLRDKGFL

SEQ ID NO: 2068 - DNA, 1222 bp, Arabidopsis thaliana
  misc_feature: Ceres Clone ID no. 114042
  misc_feature: Encodes the peptide sequence at SEQ ID NO. 2069
aattttttacgtgtaagaaaaaaacaaaggatccttttttactggaaagatgtttttttttttcttatcttctgagataaattgcgatagagagagagaacaaaaaaattctcagtgagcgcttattgatcaacaatggcgaaagagacagtgtgtgtaaccggagctaacggtttcatcggatcttggataatccgaacgttaattgagaaaggatatactaaaatccacgcttcgatttacccaggatccgaccggactcatcttctgcaactacccggatccgattctaagatcaagatcttcgaagcggatctcttagactctgatgcaatctccagagctattgatggatgtgcgggagtgttccacgtggcgtcaccttgtacgttggatccaccggtaaatccagagaaggagctggtcgaaccggcggttaagggaacgatcaatgtgttggaagctgctaagaggtttaatgtgagacgcgtggtgatcacgtcatctatctccgcattggttcctaaccctaattggccggaaaaagttcccgtcgatgagtcgtcgtggtccgatcttgatttttgcaagtcgaggcagaaatggtatccaatttcgaagacattggctgagaaagcagcttgggaattttcgaacaagcatggaaccaacattgtgacgattcatccatcaacatgtctcggaccacttctgcaaccgaacctaaacgcaagctgtgctgttctgctacagcttttacaaggctcgaccgagacgcaagagcatcactggctcggtgtggttcacgtgaaagatgtggctaaaggtcatgtgatgctattcgaaacaccggaagcttctggacggtttttatgcactaatgggatttatcagttcagtgagtttgctgctcttgtgtccaagctctttcctgagtttgctgttcacaagtttgataaagagactcaacctgggcttgcgtcgtgtaatgatgcggctaagagattgattgagctcgggttggtttttactgcggttgaagatgcggttaaggagacggtccagagtcttagagacaaaggcttcctctgagaacgtatgatatatctttgcaaattttaaactctgtgagtaagatgtaactggtttatatgataaaagtagaggaactaagatgtaactggtttatatgatacatgtacgagtacaaggtattactctc

SEQ ID NO: 2069 - protein, 318 aa, Arabidopsis thaliana
  misc_feature (6)..(248): Pfam Name: Epimerase Pfam Description: NAD dependent epimerase/dehydratase fam
  misc_feature: Ceres Clone ID no. 114042
  misc_feature: Bit score of 525.8 for HMM based on sequences of Figure 43
  misc_feature: Functional Homolog Of SEQ ID NO. 2028
MAKETVCVTGANGFIGSWIIRTLIEKGYTKIHASIYPGSDRTHLLQLPGSDSKIKIFEADLLDSDAISRAIDGCAGVFHVASPCTLDPPVNPEKELVEPAVKGTINVLEAAKRFNVRRVVITSSISALVPNPNWPEKVPVDESSWSDLDFCKSRQKWYPISKTLAEKAAWEFSNKHGTNIVTIHPSTCLGPLLQPNLNASCAVLLQLLQGSTETQEHHWLGVVHVKDVAKGHVMLFETPEASGRFLCTNGIYQFSEFAALVSKLFPEFAVHKFDKETQPGLASCNDAAKRLIELGLVFTAVEDAVKETVQSLRDKGFL

SEQ ID NO: 2070 - protein, 333 aa, Vitis vinifera
  misc_feature (13)..(256): Pfam Name: Epimerase Pfam Description: NAD dependent epimerase/dehydratase fam
  misc_feature: Public GI ID no. 157354338
  misc_feature: Bit score of 520.5 for HMM based on sequences of Figure 43
  misc_feature: Functional Homolog Of SEQ ID NO. 2028
MAELEADKKKEAVCVTGANGFIGSWLVRTLVEHGYTTIHASIFPGSDASHLFSLPGAAAADIVVYEADLLDAEAVARAVEGCTGVFHVASPCSLEDPKDPEKELLMPAVEGTKNVLEAARRFQVRRVVLTSSISALVPNPSWPPNIPFNETSWTDLHYCKSRQKWYPVSKTLAEKAAWEFAGKHGIDVVAIHPATCLGELLQPRLNASCAVLQQLLEGSTETQEYHWLGAVHVKDVAKAQVLLFETPAASGRYLCTDGIYQFADFAERVSKLFPEFPVHRFIGETQPGMMACKDAAKRLIDLGLVFTPVEDAVKDAVESLKAKGFLEQGKKQS

SEQ ID NO: 2071 - DNA, 1360 bp, Glycine max
  misc_feature: Ceres Clone ID no. 625502
  misc_feature: Encodes the peptide sequence at SEQ ID NO. 2072
tggtattacattgtagcttgagatgagagttgagaggcagcgtcttcttcatcaacggtggcgtagggatcaatccgtttgatagaaaaaccatttccatttccaatggctaacgaaatccctcacgatgaggtagtgtgcgttaccggcgccaacggtttcatcggttcgtggctggtccgaaccctcttggagaaggagaacccacgctacaccatccacgccaccatcttccccggctccgacgcctcccacctcttcaacctccacccctccgccgccagccgcctcaccctcttccccgccgacctcctcgacgccgccgccctctcccgcgccatcaccgcctgctccggcgtcttccacgtggcctccccctgcaccctcgaggaccccacagacccccaaagagaccttctcgaacccgcggttcagggcaccctgaacgtcctaaccgccgcaaggcgcgtgggcgtgcggcgcgtggtgctcacctcctcgatctccgcgatggtgccgaacccggggtggccggcggggcgggccgcggacgaggcgtcgtggacggacgtggagtactgtaagggaagggggaagtggtacccggtggcgaagacggaggcggagagggcggcgtgggcgttcgacggcgtggaagttgtggcggttctcccggcgacgtgtttagggccgcttctgcagccggatctcaacgcgagctccgccgtgctgcgggagctgatgatggggtcgagggagacgcaggagtatcactggttgggtgcggtgcatgtgaaggacgttgctaaagctcatgttttgttatatgaaacccccactgctgctggtagatacctctgcaccaatggtatctaccagttttctagttttgctgccatggtctctgaattgtaccccgaattccctattcacaggttcccagaagaaacgcaacctggcctgacagcatgtaaagatgcagcaaagagactaatagacttgggtcttgtcctcacaccaattcaagatgctgtgagagaagcagtggagagcctcatagctaaaggcttcctgcaatgcacaccctcacagagttagtatttagatttcatttagtttttctcgtaggcataaataaccactggtttattttcttttccccctttgatacaaggtagaagtaataatgaatataaatatgccaagtttattgaggtagaagtagagtaattaatctcttcttttgttatatttatcggcttcgtttggaaagtaacattcattatcacttgtcaagttgtcctgacatggtattgttgtgactgctcattttatgtacaagagttatggttgagactcg

SEQ ID NO: 2072 - protein, 330 aa, Glycine max
  misc_feature (11)..(253): Pfam Name: Epimerase Pfam Description: NAD dependent epimerase/dehydratase fam
  misc_feature: Ceres Clone ID no. 625502
  misc_feature: Bit score of 498.9 for HMM based on sequences of Figure 43
  misc_feature: Functional Homolog Of SEQ ID NO. 2028
MANEIPHDEVVCVTGANGFIGSWLVRTLLEKENPRYTIHATIFPGSDASHLFNLHPSAASRLTLFPADLLDAAALSRAITACSGVFHVASPCTLEDPTDPQRDLLEPAVQGTLNVLTAARRVGVRRVVLTSSISAMVPNPGWPAGRAADEASWTDVEYCKGRGKWYPVAKTEAERAAWAFDGVEVVAVLPATCLGPLLQPDLNASSAVLRELMMGSRETQEYHWLGAVHVKDVAKAHVLLYETPTAAGRYLCTNGIYQFSSFAAMVSELYPEFPIHRFPEETQPGLTACKDAAKRLIDLGLVLTPIQDAVREAVESLIAKGFLQCTPSQS

SEQ ID NO: 2073 - protein, 325 aa, Malus x domestica
  misc_feature (9)..(253): Pfam Name: Epimerase Pfam Description: NAD dependent epimerase/dehydratase fam
  misc_feature: Public GI ID no. 2981475
  misc_feature: Bit score of 413.1 for HMM based on sequences of Figure 43
  misc_feature: Functional Homolog Of SEQ ID NO. 2028
MSSGAGKVVCVTGASGYIASWLVKLLLQRGYTVKASIRDPNDPTKTEHLHALDGAQDRLQLFKANLLEEGSFDSAVEGCEGVFHTASPFYHDVTDPKAELLEPAVKGTLNVLNSCAKSPSIKRVVLTSSIAAVAYNGKPRTPDVVVDETWFTDPDVCKESKLWYVLSKTLAEDAAWKFVKEKGIDLVTINPAMVIGPLLQPTLNTSAAAVLNVIKGARTFPNASFGWINVKDVANAHIQAFERPTASGRYCLVERVAHFSEVVRILRELYPTLQLPEKCADDKPFVPTYQVSKEKAKSLGVEFIPLDVSLKETVESLKEKGFVNF

SEQ ID NO: 2074 - protein, 324 aa, Pinus taeda
  misc_feature (13)..(251): Pfam Name: Epimerase Pfam Description: NAD dependent epimerase/dehydratase fam
  misc_feature: Public GI ID no. 17978649
  misc_feature: Bit score of 448.0 for HMM based on sequences of Figure 43
  misc_feature: Functional Homolog Of SEQ ID NO. 2028
MTAGKQTEEGQTVCVTGAGGFIASWLVKLLLERGYTVRGTVRNPEDQKNAHLKQLEGAEERLTLVKADLMDYNSLLNAINGCQGVFHVASPVTDDPEEMVEPAVNGTKNVLDACAVAGVRRVVFTSSIGAVYMDPSRDYDALVDENCWSNLDYCKETKNWYCYGKTVAEKAAWERAKDKGLDLVVVNPCVVLGPVLQSSINSSIIHILKYLTGSAKTYANSVQAYVHVRDVAEAHILVYESPSASGRYLCAESVLHRGDVVDSLASMFPQYPIPTKVKEDGKPRVKPWKVSNQKLKDLGLEFTPAKQCLYETVISLQEKGHISK

SEQ ID NO: 2075 - protein, 361 aa, Oryza sativa subsp. japonica
  misc_feature (28)..(267): Pfam Name: Epimerase Pfam Description: NAD dependent epimerase/dehydratase fam
  misc_feature: Public GI ID no. 115476626
  misc_feature: Bit score of 399.1 for HMM based on sequences of Figure 43
  misc_feature: Functional Homolog Of SEQ ID NO. 2028
MTVIDGAVAADAGGAAAAVVQPGNGQTVCVTGAAGYIASWLVKLLLEKGYTVKGTVRNPDDPKNAHLKALDGAGERLVLCKADLLDYDAICRAVAGCHGVFHTASPVTDDPEQMVEPAVRGTEYVINAAAEAGTVRRVVFTSSIGAVTMDPNRGPDVVVDESCWSDLDYCKETRNWYCYGKAVAEQAAWEAARRRGVELVVVNPVLVIGPLLQPTVNASVAHILKYLDGSASKFANAVQAYVDVRDVAAAHLLVFESPSAAGRFLCAESVLHREGVVRILAKLFPEYPVPTRCSDEKNPRKQPYKMSNQKLRDLGLEFRPASQSLYETVKCLQEKGHLPVLAAEKTEEEAGEVQGGIAIRA

SEQ ID NO: 2076 - protein, 322 aa, Rosa x damascena
  misc_feature (6)..(250): Pfam Name: Epimerase Pfam Description: NAD dependent epimerase/dehydratase fam
  misc_feature: Public GI ID no. 170286897
  misc_feature: Bit score of 400.7 for HMM based on sequences of Figure 43
  misc_feature: Functional Homolog Of SEQ ID NO. 2028
MSNKVVCVTGASGYIASWLVKLLLQRGYTVKASVRNPNDPTKTEHLLALDGAKERLQLFKADLLEEGSFDSAVEGCEGVFHTASPFYHDVTDPKAELLDPAVKGTLNVLNSCSKSPSIKRVVLTSSIAAVAYNGKPRTPDVVVDETWFTDPDVCKESKLWYVLSKTSAEDAAWKFVKEKGIDMVTINPAMVIGPLLQPTLNTSAAAILNIIKGARTYPNASFGWINVKDVANAHVQAFEIPSASGRYCLVERVAHFTEVLQIIHELYPDLQLPEKCSDDKPFVPTYQVSKEKAKSLGIEFIPLDISLKETIESLKEKSIVSF

SEQ ID NO: 2077 - protein, 346 aa, Zea mays
  misc_feature (22)..(260): Pfam Name: Epimerase Pfam Description: NAD dependent epimerase/dehydratase fam
  misc_feature: Public GI ID no. 162458118
  misc_feature: Bit score of 384.7 for HMM based on sequences of Figure 43
  misc_feature: Functional Homolog Of SEQ ID NO. 2028
MPTAEATTPVPPELSSGQGRTVCVTGAGGFIASWLVKRLLEKGYTVRGTVRNPVDPKNDHLRALDGAVDRLVLLRADLLDPQSLAEAFSGCDGVFHAASPVTDDPEMMIEPAIRGTRYVMAAADDAGVKRVVFTSSIGTVYMNPYRDPSKPVDDTCWSDLEYCKNTQNWYCYAKTVAEQGAWEVARKRGLDLVVVNPVLVLGPLLQPTVNASTDHVMKYLTGSATTYVNAAQAYVHVRDVAEAHVRVYEAPHAHGRYICAESTLHRGDLCRVLAKLFPEYPVPTKCKDQVNPPVVGYKFTNQRLKDLGMDFVPVLQCLYETVTSLQEKGMLPVLPTKQDHDQLGKS

SEQ ID NO: 2078 - protein, 346 aa, Zea mays
  misc_feature (22)..(260): Pfam Name: Epimerase Pfam Description: NAD dependent epimerase/dehydratase fam
  misc_feature: Public GI ID no. 28544965
  misc_feature: Bit score of 384.6 for HMM based on sequences of Figure 43
  misc_feature: Functional Homolog Of SEQ ID NO. 2028
MPTAEATTPVPPELSSGQGRTVCVTGAGGFIASWLVKRLLEKGYTVRGTVRNPVDPKNDHLRALDGAVDRLVLLRADLLDPQSLAEAFSGCDGVFHAASPVTDDPEMMIEPAIRGTRYVMAAAADAGVKRVVFTSSIGTVYMNPYRDPSKPVDDTCWSDLEYCKNTQNWYCYAKTVAEQGAWEVARKRGLDLVVVNPVLVLGPLLQPTVNASTDHVMKYLTGSATTYVNAAQAYVHVRDVAEAHVRVYEAPHAHGRYICAESTLHRGDLCRVLAKLFPEYPVPTKCKDQVNPPVVGYKFTNQRLKDLGMDFVPVLQCLYETVTSLQEKGMLPVLPTKQDHDQLGKS

SEQ ID NO: 2079 - protein, 341 aa, Zea mays
  misc_feature (22)..(260): Pfam Name: Epimerase Pfam Description: NAD dependent epimerase/dehydratase fam
  misc_feature: Public GI ID no. 28544959
  misc_feature: Bit score of 385.3 for HMM based on sequences of Figure 43
  misc_feature: Functional Homolog Of SEQ ID NO. 2028
MPTAEATTPVPPELSSGQGRTVCVTGAGGFIASWLVKRLLEKGYTVRGTVRNPVDPKNDHLRSLDGADDRLVLLRADLLDPESLAEAFSGCDGVFHAASPVTDDPEMMIEPAIRGTRYVMAAADDAGVKRVVFTSSIGTVYMNPYRDPSKPVDDTCWSDLEYCKNTQNWYCYAKTVAEQGAWEVARKRGLDLVVVNPVLVLGPLLQPTVNASTDHVMKYLTGSATTYVNAAQAYVHVRDVAEAHVRVYEAPHAHGRYICAESTLHRGDLCRVLAKLFPEYPVPTKCKDQVNPPVVGYKFTNQRLKDLGMDFVPVLQCLYETVTSLQEKGMLPVLPTKHDHA

SEQ ID NO: 2080 - DNA, 1543 bp, Panicum virgatum
  misc_feature: Ceres Clone ID no. 2023103
  misc_feature: Encodes the peptide sequence at SEQ ID NO. 2081
gcatacatatcccagcactgtaatcgcctttctcttctagagcatacctggagaacagtttttcaccaagagtacctgtctcaggctaactggtaggcaccatttcacatcacacaaacacacaccttccttttgacttggaggccgggatactacaccatgccgattgagacgcccatgccggccctctccggccacggcctgacggtctgcgtgaccggcgccggaggattcatcgcctcctggctcgtcaagcgcctcctggagaagggctacactgtccgcggcacggtccggaaccctgttgatcccaagaacgaccacctgagggcgcttgaaggtgccgccgaccgccttactctcgtccgcgccgacttgctggatcccgacagccttctcgcggccttctccggctgcgagggtgtcttccatactgcctccccggtcaccgatgatcccgagaagatgatcgagccggcgatccgcggcacaaggcacgtgatgacggtggccgcggacaccggcgtgaagcgcgtcgtgttcacgtcctccatcggcacggtgtacatgaacccataccgcgaccccaacgagcccgtcgacgacacctgctggagcgacctcgagtactgcaagaagaccgagaactggtactgctacgcgaagacggtggcggagcagggcgcgtgggaggtggcgcggaagcgcgggctggacctggtagttgtgaacccggtgctggtgctgggtccgctgctgcagccgacggtgaacgcgagcacggaccacgtgatgaagtacctgacggggtcggccaagacgtacgtgaacgcggcgcaggcctacgtgcacgtcaaggacgtcgccgaggcgcacgtccgggtgtacgaggccgcccacgcgcacggccgctacatctgcgccgagagcaccctccaccgcggcgagctctgccgtatcctcgccaagctcttcccggagtaccccatacccaccaagtgtaaggacgaggtgaatcctccggtggccggatacaagttcagcaaccagcggctcaaggatctagggatcgagttcgtgccggtgctgcagtgcctgtacgagacggtgaagagcctccaggagaaagggatgctgcccgtcctcccgccaaacgacgaccaccacctcgaccaactgatgacatcatgatcatcccaaggttcactactgatggtctacggcatgctgccacgcatatcatgagctagctgattaatatattataagcaaacctttttatcaacataatatatggcaactttcatggttgcatgcatgtacgcgtggcagccactgcaccgaccgacccaaatgttagtgctgtatgacgtacacatgcaacacatctttgtggaatatatatgattgtaatttatataactgctgtgagcaataactgggctcctttttagctgccctatgccacacacttggcccttggccctttgcttgtcctcgagtagagattgaaggaccaaataaagtggatgcaactcctttg

SEQ ID NO: 2081 - protein, 343 aa, Panicum virgatum
  misc_feature (17)..(255): Pfam Name: Epimerase Pfam Description: NAD dependent epimerase/dehydratase fam
  misc_feature: Ceres Clone ID no. 2023103
  misc_feature: Bit score of 387.1 for HMM based on sequences of Figure 43
  misc_feature: Functional Homolog Of SEQ ID NO. 2028
MPIETPMPALSGHGLTVCVTGAGGFIASWLVKRLLEKGYTVRGTVRNPVDPKNDHLRALEGAADRLTLVRADLLDPDSLLAAFSGCEGVFHTASPVTDDPEKMIEPAIRGTRHVMTVAADTGVKRVVFTSSIGTVYMNPYRDPNEPVDDTCWSDLEYCKKTENWYCYAKTVAEQGAWEVARKRGLDLVVVNPVLVLGPLLQPTVNASTDHVMKYLTGSAKTYVNAAQAYVHVKDVAEAHVRVYEAAHAHGRYICAESTLHRGELCRILAKLFPEYPIPTKCKDEVNPPVAGYKFSNQRLKDLGIEFVPVLQCLYETVKSLQEKGMLPVLPPNDDHHLDQLMTS

SEQ ID NO: 2082 - DNA, 978 bp, Populus balsamifera subsp. trichocarpa
  misc_feature: Ceres Annot ID no. 1514866
  misc_feature: Encodes the peptide sequence at SEQ ID NO. 2083
atgagcagtggagccggaaagatcgtgtgcgtgactggagcttcgggttacatagcatcatggcttgtgaagctcctcctctcgcgtggttacactgtcaaggcctctgttcgtgacccaaatgatcccaaaaagacagaacacttacgtgcacttaatggagctcaggagagacttcagctgttcaaagcaaatttactggaagaaggttcctttgattctattgtagaagggtgtgaaggtgttttccacactgcatctccgttttatcatgatgtgaaggacccacaggtagaattgctggatcctgcagtgaaaggaacactcaatgttcttggctcatgtgcaaaacacccgtcaatcagacgagttgttttaacatcttctgttgctgcagttgcttacaatgggaaacctcgaaccccagatgtagtagtggatgaaacttggttttctgatccaaacttgtgcagagaatctaaggtttggtatgtgctctcaaagactttggccgaggatgctgcatggaaatttgcaaaagaaaaggatatggacatggttgcaataaatccagcaatggtaattggtcctctcttgcagccaacactaaatacaagtgctgcggcaattttaagcctaattaaaggagcacaaactttccccaatgcatcttttggatggataaatgttaaagatgttgccaatgcacacattcaagcatttgagctgtcatcagctagtgggagatattgtttggttgagagagtggcacactactcagaagtagtgaagattctgcatgagctttaccccgatctccaactcccagaaaagtgtgccgatgataagccatatgtaccaatctatcaagtttccaaggaaaaagcaaaaagcttgggtgttgaattcattcctttggaagcaagcgttaaggaaacagttgaaagcttgaaggagaaaggatttgtcagtttttaa

SEQ ID NO: 2083 - protein, 325 aa, Populus balsamifera subsp. trichocarpa
  misc_feature (9)..(253): Pfam Name: Epimerase Pfam Description: NAD dependent epimerase/dehydratase fam
  misc_feature: Ceres Annot ID no. 1514866
  misc_feature: Bit score of 415.0 for HMM based on sequences of Figure 43
  misc_feature: Functional Homolog Of SEQ ID NO. 2028
MSSGAGKIVCVTGASGYIASWLVKLLLSRGYTVKASVRDPNDPKKTEHLRALNGAQERLQLFKANLLEEGSFDSIVEGCEGVFHTASPFYHDVKDPQVELLDPAVKGTLNVLGSCAKHPSIRRVVLTSSVAAVAYNGKPRTPDVVVDETWFSDPNLCRESKVWYVLSKTLAEDAAWKFAKEKDMDMVAINPAMVIGPLLQPTLNTSAAAILSLIKGAQTFPNASFGWINVKDVANAHIQAFELSSASGRYCLVERVAHYSEVVKILHELYPDLQLPEKCADDKPYVPIYQVSKEKAKSLGVEFIPLEASVKETVESLKEKGFVSF

SEQ ID NO: 2084 - DNA, 1480 bp, Panicum virgatum
  misc_feature: Ceres Clone ID no. 1724312
  misc_feature: Encodes the peptide sequence at SEQ ID NO. 2085
tcaggaaggatcctaccaaacctaccaactcctcctccatcgatcgcccgcgcaaaggggaaacctaaaaactaactctcgccattcgccaactagctagctttctctctccgcttcggcgccgctgcggctccaccgcgttcgagcgagaggtttcgtgaagaaaccagagagtagcgtcgaggaactgatcgtcgatcgtgaagacgatgaccgtggtcgacgccgtgtccgcgggcgccggcgacgccgccgccgcggtgccgcagccggcggggaacgggcagaccgtgtgcgtcaccggcgcggccgggtacatcgcgtcgtggctcgtcaagctgctgctcgagaaggggtacactgtcaagggcaccgtcaggaacccagatgacccgaagaacgcgcacctcaaggcgctggacggcgccgccgagcggctcatcctctgcaaggccgacctcctggactacgacgccatctgccgcgccgtggagggctgccacggcgtcttccacaccgcctcccccgtcaccgacgaccccgagcaaatggtggagccggcggtgcgcggcacggagtacgtgatcagcgcggcggcggaggccggcacggtacggcgggtggtgttcacgtcctccatcggcgccgtgaccatggaccccaaccgcgggcccgacgtggtggtcgacgagtcctgctggagcgacctcgacttctgcaagaaaaccaggaactggtactgctacggcaaggcggtggcggagcaggcggcgtgggaggcggcgcggcagcgcggcgtggacctggtggtggtgaacccggtgctggtggtgggcccgctgctgcagccgacggtgaacgccagcatcgcgcacatcctcaagtacctggacggctccgcccgcaccttcgccaacgccgtgcaggcctacgtcgacgtccgcgacgtcgccgccgcgcacctccgcgtcttcgagagccccgccgcctccggccgccacctctgcgccgagcgcgtcctccaccgcgaggacgtcgtccgcatcctcgccaagctcttccccgagtaccccgtccccaccaggtgctccgacgaggtgaacccgcggaagcaggcgtacaagtttacgaaccagaagctccgggacctggggctggagttccggccggtgagccagtcgctgtacgacacggtgaagagcctccaggagaagggccacctgccggtgctcgccgacgagcaggcgccggaggccgcccccggcgccgaggcgcagcagggcgggatcgccatccgtgcgtgaggtccaggccgatggcgccacgaatgaacagaatgcaagcgatgttcatatactgcccctgatgtgtaacccaagtagtgtttgttgcctgtctgatgtccctagcaagacttgaaacgtcgtgctcgtccttgtgaactacatggtgggtgaataaatatggttaatgttcgttc

SEQ ID NO: 2085 - protein, 364 aa, Panicum virgatum
  misc_feature (28)..(267): Pfam Name: Epimerase Pfam Description: NAD dependent epimerase/dehydratase fam
  misc_feature: Ceres Clone ID no. 1724312
  misc_feature: Bit score of 404.8 for HMM based on sequences of Figure 43
  misc_feature: Functional Homolog Of SEQ ID NO. 2028
MTVVDAVSAGAGDAAAAVPQPAGNGQTVCVTGAAGYIASWLVKLLLEKGYTVKGTVRNPDDPKNAHLKALDGAAERLILCKADLLDYDAICRAVEGCHGVFHTASPVTDDPEQMVEPAVRGTEYVISAAAEAGTVRRVVFTSSIGAVTMDPNRGPDVVVDESCWSDLDFCKKTRNWYCYGKAVAEQAAWEAARQRGVDLVVVNPVLVVGPLLQPTVNASIAHILKYLDGSARTFANAVQAYVDVRDVAAAHLRVFESPAASGRHLCAERVLHREDVVRILAKLFPEYPVPTRCSDEVNPRKQAYKFTNQKLRDLGLEFRPVSQSLYDTVKSLQEKGHLPVLADEQAPEAAPGAEAQQGGIAIRA

SEQ ID NO: 2086 - DNA, 1210 bp, Gossypium hirsutum
  misc_feature: Ceres Clone ID no. 1850477
  misc_feature: Encodes the peptide sequence at SEQ ID NO. 2087
gcaattgacagccacagaatagagcaaaaatcaccaaaaataaaaaagaaatattagtaaagggaggaaaatgagcagcggtgcaggaaaaaccgtgtgtgtaaccggagcctctggctacatcgcgtcatggcttgtgaagcagcttctacttcgtggttacactgtcaaagcctctgttcgtgacccaaatgatccaaggaagacacaacacttgcttggacttgagggtgctgagagcaggctcatgttgttaaaagcagacctattggaacaaggttcctttgatcctgtggttgaaggttgtgtaggtgttttccacactgcatctccattctatcacgatgtccttgacccagaggcagaattacttgatcccgctgtgaaaggaacactgaatgttttgagctcatgcgctaagaccccttccgttaaacgagtggtattgacatcttctatagctgcagtcgcatataacggaaaacctcgaactcccgatgttgtggttgacgagaattggtttagcgatcctgattactgtaaggacttaaagctatggtacgtagtctcaaaaacaatggccgaggattctgcctggaaattttcaaaggagaagggcattgacatggttgccataaaccctgcaatggtgattggccctcttttacagccaacacttaacaccagtgctgcagcaattttaaacttgattaaaggagcagaaacttttcccaatgcaacttttggttgggtgaatgttaaggatgttgcaactgcacatatccaggcatttgagattccattagctagtggtagatattgtttagttgagagggttgtacattactcagaaattgtcaacatcttacaccacctctatccttctttgcaacttccacaaaaatgtgcaggtgacaagccgtatgtgccaacatatcaggtgtcaaaggaaaaagcaaaaagcgtgggtatagaattcattcctttggatgccagcctcaaggaaacagtagaaagcctgaaggagaagggatttgtccatttgtcctctctttattagcttcttctacacgctattataatacaaatattagcgttgtttctggttttgatgtcacacttttcttgttttcgttttacttgaatggagaattctgaaaagaactgtgtaatcagctatgttatccaggttcaatcttttctagttttc

SEQ ID NO: 2087 - protein, 329 aa, Gossypium hirsutum
  misc_feature (9)..(253): Pfam Name: Epimerase Pfam Description: NAD dependent epimerase/dehydratase fam
  misc_feature: Ceres Clone ID no. 1850477
  misc_feature: Bit score of 404.5 for HMM based on sequences of Figure 43
  misc_feature: Functional Homolog Of SEQ ID NO. 2028
MSSGAGKTVCVTGASGYIASWLVKQLLLRGYTVKASVRDPNDPRKTQHLLGLEGAESRLMLLKADLLEQGSFDPVVEGCVGVFHTASPFYHDVLDPEAELLDPAVKGTLNVLSSCAKTPSVKRVVLTSSIAAVAYNGKPRTPDVVVDENWFSDPDYCKDLKLWYVVSKTMAEDSAWKFSKEKGIDMVAINPAMVIGPLLQPTLNTSAAAILNLIKGAETFPNATFGWVNVKDVATAHIQAFEIPLASGRYCLVERVVHYSEIVNILHHLYPSLQLPQKCAGDKPYVPTYQVSKEKAKSVGIEFIPLDASLKETVESLKEKGFVHLSSLY

SEQ ID NO: 2088 - protein, 332 aa, Solanum tuberosum
  misc_feature (9)..(247): Pfam Name: Epimerase Pfam Description: NAD dependent epimerase/dehydratase f
  misc_feature: Public GI ID no. 25140434
  misc_feature: Bit score of 434.8 for HMM based on sequences of Figure 43
  misc_feature: Functional Homolog Of SEQ ID NO. 2028
MPSESGKVVCVTGAGGFIASWLVKLLLEKGYTVRGTVRNPDDPKNGHLKELEGAKERLILLRADLLDYQSLREAIYGCDGVFHTASPVTDDPEQMVEPAVIGTKNVITAAAEAKVGRVVFTSSIGTVYMDPNRAPDKVVDETCWSDLGFCKNTKNWYCYGKTVAEKTAWDEAREKGVDLVVINPVLVLGPLLQPTVNASVLHILKYLTGSAKTYANSIQAYVHVKDVALAHILLYEAPSASGRYICAESVLHRGDVVEILAKFFPEYPIPTKCSDETRPRAKPYKFTNQKLKDLGLGFTPVKQCLYETVKSLQEKGHLPIPTQNDEPIKIHS

SEQ ID NO: 2089 - DNA, 1763 bp, Panicum virgatum
  misc_feature: Ceres Clone ID no. 1817100
  misc_feature: Encodes the peptide sequence at SEQ ID NO. 2090
tccccacccaggcacccaagacccagcagccaccaccacactaccacaggaaggaaggcgagagctttccgtcccctcccctcccgcagaggctgtaaagggcagctccctcgtggcctgtcgccgcccgcctccactcctctcctctccggactcgccggcctggatctgccgcggggctctcatctctcctgccctcaagagagaccgccgccgccgccgcagatgctgcccaccaaccgcggcaggccgcagcagaggccgccgccgcccagatcttggtccttcctctcagagatggtggacttctccgatcccaagcgcaggccgcgctacctcaccaagctcgtcatggccgcgctcctcaccgccatgtgcgtcctcatgctcacccagccgccctgccacaggagggccagccccagcgtgttctccacccgtcaacctggggtcacgcacgtgctgctcaccgggggcgccggctacattggctcgcacgccgcccttcggctgctcaaggactccttcagagtcaccatagtggataatctttcgagaggaaatattggcgcgatcaaggttcttcagaacttgttcccagagcctgggcggctgcagttcatacaagctgatttaggagatccaaaagcagttaacagaatatttgcagagaatgcatttgatgctgtcatgcactttgctgctgtcgcttatgttggagagagcacacttgaacctctgaggtactatcataacatcactgcaaacactttagtggtgctggaagctatggcaacacacaatgtgaaaactctgatctactctagcacatgtgctacttacggagaacctgacaagatgcctatcactgaagaaactccccagtttccgatcaacccatatggtaaggccaagaagatggcagaggatatcattttggatttctcaaagtccaagaaagcagatatggctgtcatgattctaagatacttcaatgtcattggctctgacccggaaggaaggctgggtgaggctcctagacctgaattgcgtgagcatggtcgcatatcaggtgcatgcttcgacgcagcactgggtataatcccaggtttgaaggttaagggtaccgactacgaaactcctgatggcacttgtgtaagggattacattgatgtcactgacctggtcgacgcccatgttaaggcactcaacaaggcagaaagaggcagagttggcatatacaatgttggcacgggaaaaggtcggtcagtaaaggagttcgttgaggcctgcaagaaggcgaccggagtcgatatcaaggttgactacttcccccgcagaccaggtgactatgccgaggtgtacagcgaccccgccaagatcaaccgggagctgaactggacggcacaacacaccgacctccacgagagcctcagggtggcgtggacatggcagaaggcgcaccggagtgggtacgagccaccccaggccatgattttgtgaagatggtgatgggcctcgtagcaagcaaccagctggctggagcataggtgaacataaaagtattattagagacttctccttgaggacccatagtcgctcgctcacatatggtgaattatatacacatagtgttcatggtcattcgttcgattcttgagggttcatatttattgaaggctttagctgatcattgtaatagcataatactccatattcattgtaagttatagaataaaattccaataagctcgttttgagat

SEQ ID NO: 2090 - protein, 425 aa, Panicum virgatum
  misc_feature (79)..(342): Pfam Name: Epimerase Pfam Description: NAD dependent epimerase/dehydratase fam
  misc_feature: Ceres Clone ID no. 1817100
  misc_feature: Bit score of 1108.3 for HMM based on sequences of Figure 40
  misc_feature: Functional Homolog Of SEQ ID NO. 2090
  misc_feature: in Figure 40
MLPTNRGRPQQRPPPPRSWSFLSEMVDFSDPKRRPRYLTKLVMAALLTAMCVLMLTQPPCHRRASPSVFSTRQPGVTHVLLTGGAGYIGSHAALRLLKDSFRVTIVDNLSRGNIGAIKVLQNLFPEPGRLQFIQADLGDPKAVNRIFAENAFDAVMHFAAVAYVGESTLEPLRYYHNITANTLVVLEAMATHNVKTLIYSSTCATYGEPDKMPITEETPQFPINPYGKAKKMAEDIILDFSKSKKADMAVMILRYFNVIGSDPEGRLGEAPRPELREHGRISGACFDAALGIIPGLKVKGTDYETPDGTCVRDYIDVTDLVDAHVKALNKAERGRVGIYNVGTGKGRSVKEFVEACKKATGVDIKVDYFPRRPGDYAEVYSDPAKINRELNWTAQHTDLHESLRVAWTWQKAHRSGYEPPQAMIL

SEQ ID NO: 2091 - protein, 421 aa, Oryza sativa subsp. japonica
  misc_feature (75)..(338): Pfam Name: Epimerase Pfam Description: NAD dependent epimerase/dehydratase fam
  misc_feature: Public GI ID no. 115470521
  misc_feature: Bit score of 1130.5 for HMM based on sequences of Figure 40
  misc_feature: Functional Homolog Of SEQ ID NO. 2090
  misc_feature: in Figure 40
MLPTNRNRPQQRPARSWYFISDMDFSDPKRKPRYLSKILMVALLTAMCVVMLTQPPCHRRTPSVFSIHEPGVTHVLVTGGAGYIGSHAALRLLKDSFRVTIVDNLSRGNMGAIKVLQNLFSEPGRLQFIYADLGDPKAVNRIFAENAFDAVMHFAAVAYVGESTLEPLRYYHNITSNTLVVLEAMAAHNVRTLIYSSTCATYGEPEKMPITEGTPQFPINPYGKAKKMAEDIILDFSKSKKADMAVMILRYFNVIGSDPEGRLGEAPKPELREHGRISGACFDAALGIIPGLKVKGTDYETPDGTCVRDYIDVTDLVDAHVKALNKAERGKVGIYNVGTGKGRSVKEFVEACKKATGVDIKVDYFPRRPGDYAEVYSDPAKINSELNWTAQHTDLLESLRVAWTWQKKHRSGYGPPQAMVL

SEQ ID NO: 2092 - protein, 421 aa, Hordeum vulgare
  misc_feature (75)..(338): Pfam Name: Epimerase Pfam Description: NAD dependent epimerase/dehydratase fam
  misc_feature: Public GI ID no. 84873492
  misc_feature: Bit score of 1119.7 for HMM based on sequences of Figure 40
  misc_feature: Functional Homolog Of SEQ ID NO. 2090
  misc_feature: in Figure 40
MLPTGRSRPQPRPAPRSWSFSDMDFSDPKRKSRYLSKIIMVALLTAMCVVMLTQPPCHRKAPSVFSIHELGVTHVLVTGGAGYIGSHAALRLLNDSFRVTIVDNLSRGNIGAVKVLQNLFPDPGRLQFIHADLGDAKAVNRIFAENAFDAVMHFAAVAYVGESTLEPLRYYHNITANTLVVLEAMAMHNVKTLIYSSTCATYGEPEKMPITEETPQFPINPYGKAKKMAEDIILDFSKSRKSDMSVMILRYFNVIGSDPEGRLGEAPPPELREHGRISGACFDAALGIIPGLKVKGTDYETPDGTCVRDYIDVTDLVDAHVKALNKAERGKVGIYNVGTGRGRSVKEFVEACKKATGVDIKVDYFPRRPGDYAEVYSNPARINRELNWTAQHTELQESLRVAWTWQKKHRSGYADSGRYIL

SEQ ID NO: 2093 - protein, 418 aa, Vitis vinifera
  misc_feature (73)..(334): Pfam Name: Epimerase Pfam Description: NAD dependent epimerase/dehydratase f
  misc_feature: Public GI ID no. 157351651
  misc_feature: Bit score of 1142.0 for HMM based on sequences of Figure 40
  misc_feature: Functional Homolog Of SEQ ID NO. 2090
  misc_feature: in Figure 40
MLNFTRSRNQPRPSRSMPFGGMEYADPKRKSNVVGKILLAATLTALCILMLKQSSNFNTPSPFSRHEPGVTHVLVTGGAGYIGSHAALRLLKDSHRVTIVDNLSRGNLGAIKVLQEQFPEPGRLQFIYADLGDAKAVNKIFSENAFDAVMHFAAVAYVGESTLEPLRYYHNITSNTLVVLEAMAAHGVNTLIYSSTCATYGEPEKMPITEQTPQVPINPYGKAKKMAEDIILDFSKNSEMAVMILRYFNVIGSDPEGRLGEAPRPELREHGRISGACFDAASGVIPGLKVKGTDYKTPDGTCVRDYIDVTDLVDAHVKALNKAAPGKVGIYNVGTGKGRSVKEFVEACKKATGVNIKVEYLARRPGDYAEVFSDPSKIDHELNWTAKYTDLQESLRVAWRWQKAHRNGYGTTPLAMAS

SEQ ID NO: 2094 - DNA, 1804 bp, Gossypium hirsutum
  misc_feature: Ceres Clone ID no. 1971052
  misc_feature: Encodes the peptide sequence at SEQ ID NO. 2095
aatttattctaaagtttctttgcattacatatttgcatgtattacaaatgtgatgtttagatccttttgctgatgccaagttcatccctctttcccttgcctttttccattgttttgttttttcttttgttttttcttggccttcttcaaagtctcattaatgttcttttgtttttattttctgagcagatttgccacaaagccatttccaaggaaggctctttgattgatccttgaaattgaaacataaattgtgttcatatcacaagaagttttcttcaaatgctaaattttgcaagagggagaagccagccaaggcctactagatccatgccgttgtccggaatggaatatcctgatcccaagaggaagagcaattttgtaggtaaaatccttatggctgcaacccttacagccttatgcattatcatgctcaagcaatccccaaacttcaatactctaagtcggttctccgaacatgaagaaggtgtaacacatgttcttgtaactggtggtgctggctatattggttcacatgctgctttacgacttctgaaggagtcataccgtgtaactattgtggacaatctttcacgtggaaacataggtgctgtcagggttctacaaaaattatttccggagcctggacagcttcaattcgtttatgctgacttgggggatgcaaaagcagtaaacaaaatattttcagaaaatgcatttgacgctgtaatgcactttgcagctgttgcatatgttggggaaagcacacttgatcctctcaagtattatcacaacattacttcaaacaccttggtgatcttagagtcaatggctgcacatgatgttaggactttgatatattctagtacatgtgccacatatggagagcctgaaaagatgccaatcactgaagaaaccccacaggttccaatcaatccatatggaaaagctaagaagatggcagaggatatcatcctggattactctaagaactcagacatggcagtaatgatcctaagatacttcaatgtgattggatcagatcctgaaggaagattaggtgaggctcccaaacctgagttgcgtgagcatggacgaatttcaggtgcttgttttgatgcagcacatggtgttattcctggtctaaaggtcaagggaacagactacaaaacacatgatgggacttgcatacgtgattatattgatgttaccgacctggttgatgctcatgtgaaagctcttaaaaaggcaaagcccggtgaagtgggaatctacaatgttggcactggaagaggtagatcagtgaaggagtttgtggaagcatgtaagaaagccactggggtggagatcaaagttgactatctgccccgccgacctggagattatgctgaagtgtttagtgatccaactaagatcaggcttgagctgaattggacagctcagcttactgatctccaggaaagtttacagattgcatggcgatggcaaaaggcacatcgtgatggatacgcagcagcctcttaggtgatggttacctctctagagtctactcacaactattttatttgttatggcaattggcatattgaagactacccctaggtggctccaattttaagctgtttatggaggggagggaaaatggagatgaaaattcactttttcagtacttggctagtgatatatatatatatatagagagagagagagagagagagagagagtaagcagctaattcattatatatgtgtatttgaagacccagctcaggctcagttttattgattttctttttctttctccc

SEQ ID NO: 2095 - protein, 413 aa, Gossypium hirsutum
  misc_feature (73)..(334): Pfam Name: Epimerase Pfam Description: NAD dependent epimerase/dehydratase fam
  misc_feature: Ceres Clone ID no. 1971052
  misc_feature: Bit score of 1127.6 for HMM based on sequences of Figure 40
  misc_feature: Functional Homolog Of SEQ ID NO. 2090
  misc_feature: in Figure 40
MLNFARGRSQPRPTRSMPLSGMEYPDPKRKSNFVGKILMAATLTALCIIMLKQSPNFNTLSRFSEHEEGVTHVLVTGGAGYIGSHAALRLLKESYRVTIVDNLSRGNIGAVRVLQKLFPEPGQLQFVYADLGDAKAVNKIFSENAFDAVMHFAAVAYVGESTLDPLKYYHNITSNTLVILESMAAHDVRTLIYSSTCATYGEPEKMPITEETPQVPINPYGKAKKMAEDIILDYSKNSDMAVMILRYFNVIGSDPEGRLGEAPKPELREHGRISGACFDAAHGVIPGLKVKGTDYKTHDGTCIRDYIDVTDLVDAHVKALKKAKPGEVGIYNVGTGRGRSVKEFVEACKKATGVEIKVDYLPRRPGDYAEVFSDPTKIRLELNWTAQLTDLQESLQIAWRWQKAHRDGYAAAS

SEQ ID NO: 2096 - DNA, 1239 bp, Populus balsamifera subsp. trichocarpa
  misc_feature: Ceres Annot ID no. 1520551
  misc_feature: Encodes the peptide sequence at SEQ ID NO. 2097
atgctaaactttggcaggaccagagctcagacaaggtccaatagatctatatctcttggagatccaaaaaggaaaaacaacgttgtaggaaagattcttttggctgctaccctcacagctttatgtataattatgctaaagcaatctccgaccttttattctccaagcccgttctctttgcatgaagaaggggtgatccatgtcctagtgacaggtggtgctggctacattggttcccatgctgcattgcgacttttgaaggatggttaccgagtaaccatagtggacaacctttctcgaggaaacataggtgcagtcaaggttttacaagaattatttccagagcccgggaggcttcagtttatatatgctgacctgggagatcctaaaactgttaacattatcttctcacaaaatgcatttgatgctgtgatgcattttgcggcagttgcatatgttggggaaagcaccatggaacccctgaagtactatcacaatatcacatcaaataccttggtagttttggaggcaatggctgcaaatgatgtaaagactttgatatattcaagtacatgtgcaacatatggggagcctgaaaagatgccgattactgaagtaactccacaggtacccattaatccatatggaaaagctaagaagatggcagaagatatcatccttgatttttctaaaaactcagacatggcaattatgatattgagatacttcaatgtgattggatcagatccagatggcaggttaggtgaggctcctagacctgaactgcgtgagcatggacgaatttccggtgcttgtttcgatgcagctcgtggtattattgctgggctgaaggttaaaggaacagactataagacgcatgatggaacttgtataagagattatattgacgttactgatcttgttgatgctcatgttaaagcacttgaaaaggcaatgcctggtaaagtaggaatctacaatgttggcactggaaagggtagatcagtcaaggagtttgttaaggcatgtaaaaaggcaactggtgtagatatcaaagttgactatttacctcgccgtcctggtgactacgctgaagtattcagtgacccatcaaaaatttaccgcgagctgaactggacagcgcaatacacggatctccagaagagcttacagactgcatggagatggcaaaaatcacatcaaaatgggtatggatcccctttggtgatggcttcttga

SEQ ID NO: 2097 - protein, 412 aa, Populus balsamifera subsp. trichocarpa
  misc_feature (68)..(329): Pfam Name: Epimerase Pfam Description: NAD dependent epimerase/dehydratase f
  misc_feature: Ceres Annot ID no. 1520551
  misc_feature: Bit score of 1113.4 for HMM based on sequences of Figure 40
  misc_feature: Functional Homolog Of SEQ ID NO. 2090
  misc_feature: in Figure 40
MLNFGRTRAQTRSNRSISLGDPKRKNNVVGKILLAATLTALCIIMLKQSPTFYSPSPFSLHEEGVIHVLVTGGAGYIGSHAALRLLKDGYRVTIVDNLSRGNIGAVKVLQELFPEPGRLQFIYADLGDPKTVNIIFSQNAFDAVMHFAAVAYVGESTMEPLKYYHNITSNTLVVLEAMAANDVKTLIYSSTCATYGEPEKMPITEVTPQVPINPYGKAKKMAEDIILDFSKNSDMAIMILRYFNVIGSDPDGRLGEAPRPELREHGRISGACFDAARGIIAGLKVKGTDYKTHDGTCIRDYIDVTDLVDAHVKALEKAMPGKVGIYNVGTGKGRSVKEFVKACKKATGVDIKVDYLPRRPGDYAEVFSDPSKIYRELNWTAQYTDLQKSLQTAWRWQKSHQNGYGSPLVMAS

SEQ ID NO: 2098 - protein, 417 aa, Arabidopsis thaliana
  misc_feature (72)..(333): Pfam Name: Epimerase Pfam Description: NAD dependent epimerase/dehydratase f
  misc_feature: Public GI ID no. 93172441
  misc_feature: Bit score of 1116.8 for HMM based on sequences of Figure 40
  misc_feature: Functional Homolog Of SEQ ID NO. 2090
  misc_feature: in Figure 40
MLNLGRARTGRQNRSMSFEGLDFADPKKNNNYMGKIVLVMTLTAMCILLLNQSPTFNTPSVFSRSEPGVTHVLVTGGAGYIGSHAALRLLKDSYRVTIVDNLSRGNLGAVKILQQLFPEPGKLQFIYADLGDANAVNKIFSENAFDAVMHFAAVAYVGESTQFPLKYYHNITSNTLVVLETMAAHGVKTLIYSSTCATYGEPEKMPITEETPQVPINPYGKAKKMAEDIILDFSKNSIMAVMILRYFNVIGSDPEGRLGEAPRPELSEHGRISGACFDAARGIIPGLQIKGTDYKTVDGTCVRDYIDVTDLVDAHVKALEKAKPRKVGIFNVGTGKGSSVKEFVEACKKATGVDIKVDYLERRAGDYAEVYSDPRKIKEELNWTAKHTNLQESLKMAWRWQKLHRSGYGSSSLVSAY

SEQ ID NO: 2099 - DNA, 1767 bp, Triticum aestivum
  misc_feature: Ceres Clone ID no. 913922
  misc_feature: Encodes the peptide sequence at SEQ ID NO. 2100
aaatagaaactccccgacgacttgctcctcctccccctcacttccctcccccatcttggaccgttgcacaccgatctcgcgccggcccccaaatcgccggcgaagcccgcctccgcctccgtcccccgccgcgccgatctgctcgcaagattcgtaggccggaggaggaggacgaggaagggaggaagttgagttcttgttggtttcttccgcgggagccgaccgcacatgccaacaaccccccggagcagaagccaagctaggaccaccaggtcttggatcttgtcaggcatggacttcggtgacacgagacgcaagcctaatttcgccggaaagatcgcggtggctgctgccctcactgttatgtgcatacttgtgttgaagcagtctcctggttttggcggcactagcgtgttctctcgccatgaaactggggtgactcatgtgctggtgactggaggtgctggatacattggctcacatgctactcttcgtctccttacggacaactaccgagttaccattgtggataacctttcgagagggaacatgggagctgtcagagctctccagaggttgtttccagagcctgggaggcttcagtttatatacactgatttaggcgatccgaaagctgtgaacaaaatgttttcggagaacgcgtttgatgctgttatgcacttcgctgctgttgcttatgttggtgagagcacgcaggagccactaaggtactaccacaacataacatcaaatacgttgacagtgcttgaggcaatggcagcacataatgtaaaaactctgatttactcgagtacttgtgcaacatatggtgaacctgacacaatgcctattgtagaaacaactcctcagatacctatcaatccatacgggaaggcaaaaaagatgtccgaggacatcattctagatttctcaaagaaatcgaacatggctgtgatgatcttaagatacttcaatgtgattggatcggaccctgaggggcgccttggggaagctccaaggcctgaactgcgtgagcatggaaggatttctggtgcgtgttttgatgcagcatcaggaatcattccagggctaaaggttcgaggaacggactaccctaccgctgatggaacttgcgtaagggactacatcgatgtcacagatcttgttgatgcccatgtcaaagctcttggtaaagctgagcctagcaaagttggaatctacaatgtcggcacagggaaaggtaggtcagtgaaggagtttgtagaagcgtgcaagaaggcgactggagcaaccatcaaggttgactacctcgatcggagagctggggattacgccgaagtatacagcaacccggccaagatccgcgatgagctgaactggacagcccaacacacggacctccgtgagagccttgcgacggcctggaaatggcagaaggcgcacccgggcggatacgggtcggcctgatcccgtgctcggtaggttcaacgcaagttcgccaacacagacccacaggtccatgtgcagtgatatggccttgagaacactggtccttcaccgtagacacgtagcaggcagccacagaagtgtagtgatgttatttcgcagcacctggaagaagatacagagagaatggcctgcctggcttagaagaaatcatatatagttttcttttttcttttcttttcgtcagtgacatttaatttattttgctgttcgttggctgaggcataatatatgacacaaatacggagttgtgctgtagac

SEQ ID NO: 2100 - protein, 412 aa, Triticum aestivum
  misc_feature (73)..(334): Pfam Name: Epimerase Pfam Description: NAD dependent epimerase/dehydratase fam
  misc_feature: Ceres Clone ID no. 913922
  misc_feature: Bit score of 1096.3 for HMM based on sequences of Figure 40
  misc_feature: Functional Homolog Of SEQ ID NO. 2090
  misc_feature: in Figure 40
MPTTPRSRSQARTTRSWILSGMDFGDTRRKPNFAGKIAVAAALTVMCILVLKQSPGFGGTSVFSRHETGVTHVLVTGGAGYIGSHATLRLLTDNYRVTIVDNLSRGNMGAVRALQRLFPEPGRLQFIYTDLGDPKAVNKMFSENAFDAVMHFAAVAYVGESTQEPLRYYHNITSNTLTVLEAMAAHNVKTLIYSSTCATYGEPDTMPIVETTPQIPINPYGKAKKMSEDIILDFSKKSNMAVMILRYFNVIGSDPEGRLGEAPRPELREHGRISGACFDAASGIIPGLKVRGTDYPTADGTCVRDYIDVTDLVDAHVKALGKAEPSKVGIYNVGTGKGRSVKEFVEACKKATGATIKVDYLDRRAGDYAEVYSNPAKIRDELNWTAQHTDLRESLATAWKWQKAHPGGYGSA

SEQ ID NO: 2101 - DNA, 1699 bp, Glycine max
  misc_feature: Ceres Clone ID no. 1659137
  misc_feature: Encodes the peptide sequence at SEQ ID NO. 2102
ctctctctctctctcacaagccacaatttcaacgccacaccaaaaattccactgcaccaccaccctccccatttgtacttttcttctcattctctttccactcccctgcattctgcacacaatctagctttacgtgcttctgggcaaccgcataaggttaaactgttaagcatatcattgaaatccttttgggattggaacttgatatgatcatttgtattggggagtaagaccttgttacttttgcaaatgctaaattttaataggatcagaagtcagcccaggacaaccagatctatgtctttgggaggcatggattacgtggatccaaaaaggaaaggcaattttgttggaaaagtttttcttgctgcagcattaacggcattatgcattatcatgatcaagagatctccatctttgaatcccccgagtccgttttccatccatgaaccaggtgtcactcatgttttagtgataggaggtgcaggctatatcggctcacatgctaccctacgacttctgagggaaaattatcgtgtcaccatagtggataacctgtcacgaggaaatttgggtgctgtcagggttcttcaagacttatttccagaacctggaaggcttcaatttatatatgctgacttgggagataaagaatctgtaaataaaatattttcagagaataaatttgatgccgtgatgcactttgctgccgttgcatacgtgggagagagcacacttgaccctcttaagtattatcacaatattacatcgaataccttgttggtattggagtctatggctaaatatggtgtgaagacattaatatattctagtacgtgtgcaacatatggggaacctgaaaagatgcctattatagaaacaacagaacagaaaccaattaatccatacggaaaagccaagaagatggcagaagatatcatccttgatttttccaaaaattctaagatggcagtaatgattctgagatacttcaatgtgattggatcagacccagagggcagattgggtgaggctccaagacctgaacttcgtgaacatggccgaatttctggtgcctgctttgatgcagctcgtggtattacaactggcttaaaggttagaggaactgactacaagacaccggatggaacatgcatacgagactacattgatgtaactgatttggttgatgctcacgtgaaggctcttgagaaggcacaacctgctaaagtagggatctacaatgttggaactggaaagggtagatcagtgaaggagtttgtgaatgcttgcaaaaaggccacaggggtggacatcaaagtagactaccttccacgtcgacccggcgattatgccgaggtgtatagtgacccttctaagatcaacagggaactgaattggaccgcacaatacactgaccttgagaagagtttgcaggttgcatggaaatggcaaaaagctcatcgtaacggttacggtatttcatctgcaatctgagtttctagccattcagccaagcagttggccatcaactgctcttttacatggtgctcaggattttttttttctttttctttttggtcgtccttagggagtttggtagttgattcgttatacttacatgtgtattcaacatacaatgagtcaataataataaataatataatgcccagcctctggttggtatagcttttcttct

SEQ ID NO: 2102 - protein, 415 aa, Glycine max
  misc_feature (73)..(334): Pfam Name: Epimerase Pfam Description: NAD dependent epimerase/dehydratase fam
  misc_feature: Ceres Clone ID no. 1659137
  misc_feature: Bit score of 1117.5 for HMM based on sequences of Figure 40
  misc_feature: Functional Homolog Of SEQ ID NO. 2090
  misc_feature: in Figure 40
MLNFNRIRSQPRTTRSMSLGGMDYVDPKRKGNFVGKVFLAAALTALCIIMIKRSPSLNPPSPFSIHEPGVTHVLVIGGAGYIGSHATLRLLRENYRVTIVDNLSRGNLGAVRVLQDLFPEPGRLQFIYADLGDKESVNKIFSENKFDAVMHFAAVAYVGESTLDPLKYYHNITSNTLLVLESMAKYGVKTLIYSSTCATYGEPEKMPIIETTEQKPINPYGKAKKMAEDIILDFSKNSKMAVMILRYFNVIGSDPEGRLGEAPRPELREHGRISGACFDAARGITTGLKVRGTDYKTPDGTCIRDYIDVTDLVDAHVKALEKAQPAKVGIYNVGTGKGRSVKEFVNACKKATGVDIKVDYLPRRPGDYAEVYSDPSKINRELNWTAQYTDLEKSLQVAWKWQKAHRNGYGISSAI

SEQ ID NO: 2103 - DNA, 1752 bp, Panicum virgatum
  misc_feature: Ceres Clone ID no. 2010819
  misc_feature: Encodes the peptide sequence at SEQ ID NO. 2104
acaggaaggaaggcgagagcttcccgtcccctcccctcccgcagaggctgtaaagggcagctccctcgtggcctgtcgccgcccgcctccactccactcctctccggactcgccggcctggatctgccgctgggctctcatcgctcctgccctgaggggagaccgccgccgcagatgctgcccaccaaccgcggcaggccgcagcagaggccgccgccgcccagatcttggtccttcctctcagagatggtggacttctccgatcccaagcgcaggccgcgctacctcaccaagctcgtcatggccgcgctcctcaccgccatgtgcgtcctcatgctcacccagccgccatgccacaggagggccagccccagcgtgttctccatccgtcaacctggggtcacgcacgtgctgctcaccgggggcgccggctacattggctcgcacgccgctcttcggctgctcaaggactccttcagagtcaccatagtggacgcttacaatacaaactttgggcatcccactctccaggataatctttcgagaggaaatattggcgcgatcaaggttcttcagaacttgttcccagagcctgggcggctgcagttcatacaagctgatttaggagatccaaaagcagttaacagaatatttgcagagaatgcatttgatgctgtcatgcactttgctgctgtcgcttatgttggagagagcacacttgaacctctgaggtactatcataacatcactgcaaacactttagtggtgctggaagctatggcaacacacaatgtgaaaactctgatctactctagcacatgtgctacttacggagaacctgacaagatgcctatcactgaagaaactccccagtttccgatcaacccatatggtaaggccaagaagatggcagaggatatcattttggatttctcaaagtccaagaaagcagatatggctgtcatgattctaagatacttcaatgtcattggctctgacccggaaggaaggctgggtgaggctcctagacctgaattgcgtgagcatggtcgcatatcaggtgcatgcttcgacgcagcactgggtataatcccaggtttgaaggttaagggtaccgactacgaaactcctgatggcacttgtgtaagggattacattgatgtcactgacctggtcgacgcccatgttaaggcactcaacaaggcagaaagaggcagagttggcatatacaatgttggcacgggaaaaggtcggtcagtaaaggagttcgttgaggcctgcaagaaggcgaccggagtcgatatcaaggttgactacttcccccgcagaccaggtgactatgccgaggtgtacagcgaccccgccaagatcaaccgggagctgaactggacggcacaacacaccgacctccacgagagcctcagggtggcgtggacatggcagaaggcgcaccggagtgggtacgagccaccccaggccatgattttgtgaagatggtgatgggcctcgtagcaagcaaccagctggctggagcataggtgaacataaaagtattattagagacttctccttgaggacccatagtcgctcgctcacatatggtgaattatatacacatagtgttcatggtcattcgttcgattcttgagggttcatatttattgaaggctttagctgatcattgtaatagcataatactccatattcattgtaagttatagaataaaattccaataagctcgttttgagatg

SEQ ID NO: 2104 - protein, 438 aa, Panicum virgatum
  misc_feature (79)..(355): Pfam Name: Epimerase Pfam Description: NAD dependent epimerase/dehydratase fam
  misc_feature: Ceres Clone ID no. 2010819
  misc_feature: Bit score of 1089.3 for HMM based on sequences of Figure 40
  misc_feature: Functional Homolog Of SEQ ID NO. 2090
MLPTNRGRPQQRPPPPRSWSFLSEMVDFSDPKRRPRYLTKLVMAALLTAMCVLMLTQPPCHRRASPSVFSIRQPGVTHVLLTGGAGYIGSHAALRLLKDSFRVTIVDAYNTNFGHPTLQDNLSRGNIGAIKVLQNLFPEPGRLQFIQADLGDPKAVNRIFAENAFDAVMHFAAVAYVGESTLEPLRYYHNITANTLVVLEAMATHNVKTLIYSSTCATYGEPDKMPITEETPQFPINPYGKAKKMAEDIILDFSKSKKADMAVMILRYFNVIGSDPEGRLGEAPRPELREHGRISGACFDAALGIIPGLKVKGTDYETPDGTCVRDYIDVTDLVDAHVKALNKAERGRVGIYNVGTGKGRSVKEFVEACKKATGVDIKVDYFPRRPGDYAEVYSDPAKINRELNWTAQHTDLHESLRVAWTWQKAHRSGYEPPQAMIL

SEQ ID NO: 2105 - protein, 421 aa, Oryza sativa subsp. japonica
  misc_feature (75)..(338): Pfam Name: Epimerase Pfam Description: NAD dependent epimerase/dehydratase fam
  misc_feature: Public GI ID no. 25553524
  misc_feature: Bit score of 1126.4 for HMM based on sequences of Figure 40
  misc_feature: Functional Homolog Of SEQ ID NO. 2090
MLPTNRNRPQQRPARSWYFISDMDFSDPKRKPRYLSKILMVALLTAMCVVMLTQPPCHRRTPSVFSIHEPGVTHVLVTGGAGYIGSHAALRLLKDSFRVTIVDNLSRGNMGAIKVLQNLFSEPGRLQFIYADLGDPKAVNRIFAENAFDAVMHFAAVAYVGESTLEPLRYYHNITSNTLVVLEAMAAHNVRTLIYSSTCATYGEPEKMPITEGTPQFPISPYGKAKKMAEDIILDFSKSKKADMAVMILRYFNVIGSDPEGRLGEAPKPELREHGRISGACFDAALGIIPGLKVKGTDYETPDGTCVRDYIDVTDLVDAHVKALNKAERGKVGIYNVGTGKGRSVKEFVEACKKATGVDIKVDYFPRRPGDYAEVYSDPAKINSELNWTAQHTDLLESLRVAWTWQKKHRSGYGPPQAMVL

SEQ ID NO: 2106 - protein, 399 aa, Oryza sativa subsp. japonica
  misc_feature (53)..(316): Pfam Name: Epimerase Pfam Description: NAD dependent epimerase/dehydratase fam
  misc_feature: Public GI ID no. 27260937
  misc_feature: Bit score of 1064.6 for HMM based on sequences of Figure 40
  misc_feature: Functional Homolog Of SEQ ID NO. 2090
MDFSDPKRKPRYLSKILMVALLTAMCVVMLTQPPCHRRTPSVFSIHEPGVTHVLVTGGAGYIGSHAALRLLKDSFRVTIVDNLSRGNMGAIKVLQNLFSEPGRLQFIYADLGDPKAVNRIFAENAFDAVMHFAAVAYVGESTLEPLRYYHNITSNTLVVLEAMAAHNVRTLIYSSTCATYGEPEKMPITEGTPQFPINPYGKAKKMAEDIILDFSKSKKADMAVMILRYFNVIGSDPEGRLGEAPKPELREHGRISGACFDAALGIIPGLKVKGTDYETPDGTCVRDYIDVTDLVDAHVKALNKAERGKVGIYNVGTGKGRSVKEFVEACKKATGVDIKVDYFPRRPGDYAEVYSDPAKINSELNWTAQHTDLLESLRVAWTWQKKHRSGYGPPQAMVL

SEQ ID NO: 2107 - DNA, 1710 bp, Panicum virgatum
  misc_feature: Ceres Clone ID no. 1754251
  misc_feature: Encodes the peptide sequence at SEQ ID NO. 2108
ccctcgctctctctctcgttcacctctctctctctctctctctctctctctctctctgcttgcggcgacgactgggagagcgccgccgcccttcgccgggtcgtcgcccggcggcgagcaccaccagttgatcttctggctggaaaatcgcgttgacggtggcggagtaggtgttctaccatcagcagcttcatctcaaggagcagaattcttacatgatccctttaaaccggagggcaagcctgcctagggctgggatggagtacttcgatgcaaggcggaagcctcataatgttgggaaaatcattgcagccctgatcctcacagctctctgtatatttgttctgaagcaatctcctagttttggtggcaatagtgtgttttctcgccatgaacctggtgttacccacgtcttagtaacaggaggagctggttatattggatcacatgcctctttaaggctcttaaaggataactatcgagttaccattgtggataatctctctagaggaaacatgggagcagtaaaggctctgcagaagttatttccgcagcctgggaggctacaattcatctttgctgatctgggggaccagaaatctgtcaacaagatatttgctgaaaatgcatttgatgctgtaatgcattttgcagctgttgcttacgtgggtgagagcacactggaaccccttaggtactatcacaatattacatcaaacaccttactgattttggaggctatggcatcccatggagtcaagacccttatctattccagtacatgtgctacctatggagaaccagagaagatgcctattacagaagccacgcctcagttccctatcaatccatatggaaaagctaagaaaatggcagaggatatcatattagatttctcaaagtcgaagggagctgatatggctgtcatgattttaagatatttcaatgttattggatctgaccctgagggaagattaggtgaagctcccaggccagaactacgagagcatggtcggatatctggggcatgctttgatgcagcattaggagtcattccaggattaaaggttaaaggaacagattatcctacagctgatggaacctgcataagagactacattgatgtcacagatctagttgacgctcatgtgaaagcactcaacaaggcagaacctagaaaagttggcatttataatgttggaaccggaagaggccgctcggttagagagtttgtggatgcctgcaagaaggcaactggggttgacatcaaagttgagtacctcaacagaaggccaggagactatgcagaagtatacagcgacccaacaaagatcaacaaggagctcaactggacggctcaatacacggacctcaaggagagcctgtcagtcgcatggaggtggcaaaagtcacatccacacggctatgggacaaactaaatatagcctgctgatcaataatttcactgaatcgtcgatacatattgattctttagttagtggtataagatcttctcaaaatcactcattgttgtattcttctcaccctcattcttttcttttcttttttcaaaggttggttttttggctagcaaagacaaacaatgatttgggtatgctgtaaatcctggatgcattcctgtaagagcaaactacattgtttctgacatgaagtgttgattaaaaaaatgtacatttattcagccagtcc

SEQ ID NO: 2108 - protein, 407 aa, Panicum virgatum
  misc_feature (66)..(329): Pfam Name: Epimerase Pfam Description: NAD dependent epimerase/dehydratase fam
  misc_feature: Ceres Clone ID no. 1754251
  misc_feature: Bit score of 1028.9 for HMM based on sequences of Figure 40
  misc_feature: Functional Homolog Of SEQ ID NO. 2090
MIPLNRRASLPRAGMEYFDARRKPHNVGKIIAALILTALCIFVLKQSPSFGGNSVFSRHEPGVTHVLVTGGAGYIGSHASLRLLKDNYRVTIVDNLSRGNMGAVKALQKLFPQPGRLQFIFADLGDQKSVNKIFAENAFDAVMHFAAVAYVGESTLEPLRYYHNITSNTLLILEAMASHGVKTLIYSSTCATYGEPEKMPITEATPQFPINPYGKAKKMAEDIILDFSKSKGADMAVMILRYFNVIGSDPEGRLGEAPRPELREHGRISGACFDAALGVIPGLKVKGTDYPTADGTCIRDYIDVTDLVDAHVKALNKAEPRKVGIYNVGTGRGRSVREFVDACKKATGVDIKVEYLNRRPGDYAEVYSDPTKINKELNWTAQYTDLKESLSVAWRWQKSHPHGYGTN

SEQ ID NO: 2109 - DNA, 1224 bp, Sorghum bicolor
  misc_feature: Ceres Annot ID no. 8641586
  misc_feature: Encodes the peptide sequence at SEQ ID NO. 2110
atgatccctttaaaccggagggcaagcctgcccagggctgggatggagtactttgatgcaaggcggaagcctcataatgttgggaaaatcattgcagccctggtcctcacaacagtctgtatatttgttctgaagcaatctcctggttttggtggcaatagcgtgttttctcgccatgaacctggggttacccatgtcttagttacaggaggagctggttatattggttcacatgccgctttaaggctcttaaaggataattatcgagttaccattgtggataatctatctagaggaaacatgggagcagtaaaggttctgcagggcttatttccgcagcctgggagactacaattcatctttgctgatcttggggaccagaaatctgtcaacaagatatttgctgaaaatgcatttgatgctgtgatgcactttgcagctgttgcttatgtgggagagagcacattggaaccccttaggtactatcacaatattacatcgaacactttattgattttggaggctatggcatctcatggagtcaaaaccctcatctactctagtacatgtgctacctatggagaaccagagaagatgcctattacagaagccacacctcagttccctatcaatccatatggaaaagctaagaaaatggcagaggatatcatattagatttctcaaagtcgaagggagctgacatggctgtcatgattttaagatatttcaatgttattggctctgaccctgagggaagattaggtgaggctcctaggccagaactccgagagcatggtcggatatctggggcatgcttcgatgcagcattaggagtcattccaggattgaaggttaaaggaacagattatcccacagctgatggaacctgcataagagattatattgatgtcacagatttagttgatgctcatgtgaaagcactcaacaaggcagagcctagaaaagtcggcatttacaatgttggaacaggaagaggtcgctcggttaatgagtttgttgatgcctgcaagaaagcaactggggttaacatcaaaattgaatacctcagcagaaggccaggagattatgcagaagtatacagcgatccaacaaagatcaacaaggagctcaactggacagctcaatataccgatctcaaagagagcctgtcagtcgcatggaggtggcaaaagtcgcatccgcacggctacgggccaaactaa

SEQ ID NO: 2110 - protein, 407 aa, Sorghum bicolor
  misc_feature (66)..(329): Pfam Name: Epimerase Pfam Description: NAD dependent epimerase/dehydratase fam
  misc_feature: Ceres Annot ID no. 8641586
  misc_feature: Bit score of 1021.8 for HMM based on sequences of Figure 40
  misc_feature: Functional Homolog Of SEQ ID NO. 2090
MIPLNRRASLPRAGMEYFDARRKPHNVGKIIAALVLTTVCIFVLKQSPGFGGNSVFSRHEPGVTHVLVTGGAGYIGSHAALRLLKDNYRVTIVDNLSRGNMGAVKVLQGLFPQPGRLQFIFADLGDQKSVNKIFAENAFDAVMHFAAVAYVGESTLEPLRYYHNITSNTLLILEAMASHGVKTLIYSSTCATYGEPEKMPITEATPQFPINPYGKAKKMAEDIILDFSKSKGADMAVMILRYFNVIGSDPEGRLGEAPRPELREHGRISGACFDAALGVIPGLKVKGTDYPTADGTCIRDYIDVTDLVDAHVKALNKAEPRKVGIYNVGTGRGRSVNEFVDACKKATGVNIKIEYLSRRPGDYAEVYSDPTKINKELNWTAQYTDLKESLSVAWRWQKSHPHGYGPN

SEQ ID NO: 2111 - DNA, 1788 bp, Panicum virgatum
  misc_feature: Ceres Clone ID no. 1985329
  misc_feature: Encodes the peptide sequence at SEQ ID NO. 2112
gcaggcgggcaagcgcgcgcattacttgcagcgcggggacacgccccggcaagccaagccagccaaggaaccgccactcctctctctctctctctctctgcttgcggcgacgactgggagagcgccgccgcccttcgccgggtcgtcgcccggcggcgagaaccaccagttgatcttctggctggaaaatcgcgttgacggtggcggagtaggtgttctaccatcggcagcttcatctcaaggagcagaattcttacatgatccctttaaaccggagggcaagcctgcctagggctgggatggagtacttcgatgcaaggcggaagcctcataatgttgggaaaatcattgcagccctggtcctcacagctctctgtatatttgttctgaagcaatctcctagttttggtggcaatagtgtgttttctcgccatgaacctggtgttacccacgtcttagtaacaggaggagctggttatattggatcacatgcctctttaaggctcttaaaggataactatcgagttaccattgtggataatctctctagaggaaacatgggagcagtaaaggctctgcagaagttatttccgcagcctgggaggctacaattcatctttgctgatctgggggaccagaaatctgtcaacaagatatttgctgaaaatgcatttgatgctgtgatgcattttgcagctgttgcttacgtgggtgagagcacactggaaccccttaggtactatcacaatattacatcaaacaccttactgattttggaggctatggcatcccatggagtcaagacccttatctattccagtacatgtgctacctatggagaaccagagaagatgcctattacagaagccacacctcagttccctatcaatccatatggaaaagctaagaaaatggcagaggatatcatattagatttctcaaagtcgaagggagctgatatggctgtcatgattttaagatatttcaatgttattggatctgaccctgagggaagattaggtgaagctcccaggccagaactacgagagcatggtcggatatctggggcatgctttgatgcagcattaggagtcattccaggattaaaggttaaaggaacagattatcctacagctgatggaacctgcataagagactacattgatgtcacagatctagttgacgctcatgtgaaagcactcaacaaggcagaacctagaaaagttggcatttataatgttggaaccggaagaggccgctcggttagagagtttgtggatgcctgcaagaaggcaattggggttgacatcaaagttgagtacctcaacagaaggccaggagactatgcagaagtatacagcaacccaacaaagatcaacaaggagctcaactggacggctcaatacacagacctcaaggagagcctgtcagtcgcatggaggtggcaaaagtcacatccacacggctatgggacaaactaaatatagcctgctgatcaataatttcactgaatcgtcgatacatattgattctttagttagtggtataagatcttgctgcaatactcttctcaaaatcactcattgttgtattcttctcaccctctttcttttcttttcttttttcaaaggttggttttttggctagcaaagacaaacaatgatttgggtatgctgtaaatcctggatgcattcctgtaagagcaaactacattgtttctgacatgaagtgttgattaaaaaaatgtacatttattcagccagtccaagctgcaaagctatttgaccg

SEQ ID NO: 2112 - protein, 407 aa, Panicum virgatum
  misc_feature (66)..(329): Pfam Name: Epimerase Pfam Description: NAD dependent epimerase/dehydratase fam
  misc_feature: Ceres Clone ID no. 1985329
  misc_feature: Bit score of 1024.0 for HMM based on sequences of Figure 40
  misc_feature: Functional Homolog Of SEQ ID NO. 2090
MIPLNRRASLPRAGMEYFDARRKPHNVGKIIAALVLTALCIFVLKQSPSFGGNSVFSRHEPGVTHVLVTGGAGYIGSHASLRLLKDNYRVTIVDNLSRGNMGAVKALQKLFPQPGRLQFIFADLGDQKSVNKIFAENAFDAVMHFAAVAYVGESTLEPLRYYHNITSNTLLILEAMASHGVKTLIYSSTCATYGEPEKMPITEATPQFPINPYGKAKKMAEDIILDFSKSKGADMAVMILRYFNVIGSDPEGRLGEAPRPELREHGRISGACFDAALGVIPGLKVKGTDYPTADGTCIRDYIDVTDLVDAHVKALNKAEPRKVGIYNVGTGRGRSVREFVDACKKAIGVDIKVEYLNRRPGDYAEVYSNPTKINKELNWTAQYTDLKESLSVAWRWQKSHPHGYGTN

SEQ ID NO: 2113 - protein, 419 aa, Arabidopsis thaliana
  misc_feature (73)..(334): Pfam Name: Epimerase Pfam Description: NAD dependent epimerase/dehydratase f
  misc_feature: Public GI ID no. 22329866
  misc_feature: Bit score of 1106.9 for HMM based on sequences of Figure 40
  misc_feature: Functional Homolog Of SEQ ID NO. 2090
MFSFGRARSQGRQNRSMSLGGLDYADPKKKNNYLGKILLTASLTALCIFMLKQSPTFNTPSVFSRHEPGVTHVLVTGGAGYIGSHAALRLLKESYRVTIVDNLSRGNLAAVRILQELFPEPGRLQFIYADLGDAKAVNKIFTENAFDAVMHFAAVAYVGESTQFPLKYYHNITSNTLVVLETMAAHGVKTLIYSSTCATYGEPDIMPITEETPQVPINPYGKAKKMAEDIILDFSKNSDMAVMILRYFNVIGSDPEGRLGEAPRPELREHGRISGACFDAARGIMPGLQIKGTDYKTADGTCVRDYIDVTDLVDAHVKALQKAKPRKVGIYNVGTGKGSSVKEFVEACKKATGVEIKIDYLPRRAGDYAEVYSDPSKIRKELNWTAKHTNLKESLETAWRWQKLHRNGYGLTTSSVSVY

SEQ ID NO: 2114 - DNA, 1248 bp, Sorghum bicolor
  misc_feature: Ceres Annot ID no. 8702875
  misc_feature: Encodes the peptide sequence at SEQ ID NO. 2115
atgccaacaaccccaagaagcagaagccaggctaggaccactaggccttggatcttgtcagggatggactttgctgattcgcgacggaagcctaatttcacggggaagattgccgtggcagctgcactcacggtgatgtgcataatcgtgttgaaacagtcccccagtttcagcggtaccagcgtgttctctcgccgtgaaactggggtgacccatgtgttagtaacagggggagctgggtatattggctcacatgctactcttcgtctccttagtgacaactaccgagttaccattgtggataacttatcaagagggaacatgggagctgttagagttcttcaacggctatttccagaacctggaaggcttcaatttatttatgctgatttgggcgatgccaaagctgtgaacaaaatattttcggagaatgcatttgatgctgttatgcactttgctgctgttgcttatgttggtgagagcacaatggagccactcaggtactaccacaacataacatcaaacacattgacagttcttgaggcaatggcagcacacaatgtaaatactctgatttactcgagtacatgtgcaacctacggtgaacctgatacgatgcctattgtagaaacaactcctcagaatcctatcaatccatatggtaaggcaaagaagatggcagaggacatcatcttagattttacaaaatcaaagaaacaatcaaacatggctgtcatgattttaagatacttcaatgtgattggatcagacccagagggacgtctaggagaagctccaaggccagagcttcgtgagcatggacggatatctggtgcttgctttgatgcagctctgggaatcattccagggctaaaggttcgtggaactgattaccccactgcagatggaacttgcattagggactacatcgatgtcacagatcttgtagatgcccatgtcaaagctcttggtaaagctgagccaggcaaagttggaatctacaatgtcggaacaggacaaggtagatcagtgaatgagtttgtgaaagcttgcatgaaggcaacaggagcttccatcaaggttgaatatcttgcccgtagacccggagattatgctgaggtatacagtgatccatcgaaaatctacaaggacctcaactggacagcccaatacactgatcttggccaaagccttgcccaggcatggaaatggcagaaagcgcacccaaacggatatggatcagcctga

SEQ ID NO: 2115 - protein, 415 aa, Sorghum bicolor
  misc_feature (73)..(337): Pfam Name: Epimerase Pfam Description: NAD dependent epimerase/dehydratase f
  misc_feature: Ceres Annot ID no. 8702875
  misc_feature: Bit score of 1062.3 for HMM based on sequences of Figure 40
  misc_feature: Functional Homolog Of SEQ ID NO. 2090
MPTTPRSRSQARTTRPWILSGMDFADSRRKPNFTGKIAVAAALTVMCIIVLKQSPSFSGTSVFSRRETGVTHVLVTGGAGYIGSHATLRLLSDNYRVTIVDNLSRGNMGAVRVLQRLFPEPGRLQFIYADLGDAKAVNKIFSENAFDAVMHFAAVAYVGESTMEPLRYYHNITSNTLTVLEAMAAHNVNTLIYSSTCATYGEPDTMPIVETTPQNPINPYGKAKKMAEDIILDFTKSKKQSNMAVMILRYFNVIGSDPEGRLGEAPRPELREHGRISGACFDAALGIIPGLKVRGTDYPTADGTCIRDYIDVTDLVDAHVKALGKAEPGKVGIYNVGTGQGRSVNEFVKACMKATGASIKVEYLARRPGDYAEVYSDPSKIYKDLNWTAQYTDLGQSLAQAWKWQKAHPNGYGSA

SEQ ID NO: 2116 - DNA, 1239 bp, Populus balsamifera subsp. trichocarpa
  misc_feature: Ceres Annot ID no. 1495011
  misc_feature: Encodes the peptide sequence at SEQ ID NO. 2117
atgctaagttttggcaggaccagaactcagccaaggtccaatagatctatgtcccttggagatccaaaaagaaaaaataatgttgtaggaaagattcttttggccgcttccctaacagctgtatgtataattatgctgaaacaatctccaacctttaattctccaagcccgttctctttgcgtgaagatggggtgatccatgtccttgtgacaggtggtgctggctacattggttcccatgcagcattgcgacttttgaaggatggttaccgagtaaccatagtggacaacctttctcgaggaaacttaggtgcagtcaaggttttacaagagttatttcctgagcctgggaggcttcagtttatatatgctgacttgggagagcctaaaactgttaacagcatcttttcacaaaatgcatttgatgctgtgatgcattttgcagcagttgcatatgttggggaaagcaccgtgtacccccttaagtactatcacaacattacatcaaataccttggtagtgttggagtcaatggctgcaaatgatgtaaagactttgatatattcaagcacatgtgcaacatatggggagcctgaaaagatgcctattactgaagacactccacaggtacccattaatccatatggaaaagctaagaagatggcagaagatatcatccttgacttctctaaaaattcagacatggcaattatgatattgagatacttcaatgtgattggatcagatccagatggaaggttaggtgaggctcctagacctgaactgcgtgagcacggacgaatttctggtgcttgttttgatgctgctcgtggtattgttgctggactaaaggttaaaggaacggactataagacacacgatggaacttgtataagagattatatcgatgttactgatcttgttgatgctcatgttaaagcacttgaaaaggcaatgcctgggaaagttggaatctacaatgttggcactggaatgggtagatcagtcaacgagtttgtacatgcatgtaaaaaggcaaccggtgtagatatcaaagtagactatttacctcgccggcctggtgactatgctgaagtgtttagtgacccatcaaaaattaaccgtgagctgaactggacagcacaatacactgatctccaaaagagtttacaggttgcatggagatggcaaaaatcacatcaaaatgggtatggatcccctttggtgatggcttcttga

SEQ ID NO: 2117 - protein, 412 aa, Populus balsamifera subsp. trichocarpa
  misc_feature (68)..(329): Pfam Name: Epimerase Pfam Description: NAD dependent epimerase/dehydratase fam
  misc_feature: Ceres Annot ID no. 1495011
  misc_feature: Bit score of 1093.2 for HMM based on sequences of Figure 40
  misc_feature: Functional Homolog Of SEQ ID NO. 2090
MLSFGRTRTQPRSNRSMSLGDPKRKNNVVGKILLAASLTAVCIIMLKQSPTFNSPSPFSLREDGVIHVLVTGGAGYIGSHAALRLLKDGYRVTIVDNLSRGNLGAVKVLQELFPEPGRLQFIYADLGEPKTVNSIFSQNAFDAVMHFAAVAYVGESTVYPLKYYHNITSNTLVVLESMAANDVKTLIYSSTCATYGEPEKMPITEDTPQVPINPYGKAKKMAEDIILDFSKNSDMAIMILRYFNVIGSDPDGRLGEAPRPELREHGRISGACFDAARGIVAGLKVKGTDYKTHDGTCIRDYIDVTDLVDAHVKALEKAMPGKVGIYNVGTGMGRSVNEFVHACKKATGVDIKVDYLPRRPGDYAEVFSDPSKINRELNWTAQYTDLQKSLQVAWRWQKSHQNGYGSPLVMAS

SEQ ID NO: 2118 - protein, 419 aa, Arabidopsis thaliana
  misc_feature (73)..(334): Pfam Name: Epimerase Pfam Description: NAD dependent epimerase/dehydratase f
  misc_feature: Public GI ID no. 24417398
  misc_feature: Bit score of 1102.0 for HMM based on sequences of Figure 40
  misc_feature: Functional Homolog Of SEQ ID NO. 2090
MFSFGRARSQGRQNRSMSLGGLDYADPKKKNNYLGKILLTASLTALCIFMLKQSPTFNTPSVFSRHEPGVTHVLVTGGAGYIGSHAALRLLKESYRVTIVDNLSRGNLAAVRILQELFPEPGRLQFIYADLGDAKAVNKIFTENAFDAVMHFAAGAYVGESTQFPLKYYHNITSNTLVVLETMAAHGVKTLIYSSTCATYGEPDIMPITEETPQVPINPYGKAKKMAEDIILDFSKNSDMAVMILRYFNVIGSDPEGRLGEAPRPELREHGRISGACFDAARGIMPGLQIKGTDYKTADGTCVRDYIDVTDLVDAHVKALQKAKPRKVGIYNVGTGKGSSVKEFVEACKKATGVEIKIDYLPRRAGDYAEVYSDPSKIRKELNWTAKHTNLKESLETAWRWQKLHRNGYGLTTSSVSVY

SEQ ID NO: 2119 - protein, 406 aa, Oryza sativa subsp. japonica
  misc_feature (66)..(328): Pfam Name: Epimerase Pfam Description: NAD dependent epimerase/dehydratase family
  misc_feature: Public GI ID no. 115474641
  misc_feature: Bit score of 1026.9 for HMM based on sequences of Figure 40
  misc_feature: Functional Homolog Of SEQ ID NO. 2090
MIPLNRRASQTRGGMEYFDARRKPHNVGKVIAALVLTTLCIFILKQSPGFGGSSVFSRHEPGVTHVLVTGGAGYIGSHASLRLLKDNYRVTIVDNLSRGNMGAVKVLQELFPQPGRLQFIYADLGDQKTVNKIFAENAFDAVMHFAAVAYVGESTLEPLRYYHNITSNTLLILEAMASHGVKTLIYSSTCATYGEPEKMPIVETTRQLPINPYGKAKKMAEDIILDFTKGRKDMAVMILRYFNVIGSDPEGRLGEAPRPELREHGRISGACFDAALGIIPGLKVKGTDYPTTDGTCIRDYIDVTDLVDAHVKALNKAEPSKVGIYNVGTGRGRSVKEFVDACKKATGVNIKIEYLSRRPGDYAEVYSDPTKINTELNWTAQYTDLKESLSVAWRWQKSHPRGYGSN

SEQ ID NO: 2120 - protein, 392 aa, Oryza sativa subsp. japonica
  misc_feature (52)..(314): Pfam Name: Epimerase Pfam Description: NAD dependent epimerase/dehydratase family
  misc_feature: Public GI ID no. 42408459
  misc_feature: Bit score of 994.8 for HMM based on sequences of Figure 40
  misc_feature: Functional Homolog Of SEQ ID NO. 2090
MEYFDARRKPHNVGKVIAALVLTTLCIFILKQSPGFGGSSVFSRHEPGVTHVLVTGGAGYIGSHASLRLLKDNYRVTIVDNLSRGNMGAVKVLQELFPQPGRLQFIYADLGDQKTVNKIFAENAFDAVMHFAAVAYVGESTLEPLRYYHNITSNTLLILEAMASHGVKTLIYSSTCATYGEPEKMPIVETTRQLPINPYGKAKKMAEDIILDFTKGRKDMAVMILRYFNVIGSDPEGRLGEAPRPELREHGRISGACFDAALGIIPGLKVKGTDYPTTDGTCIRDYIDVTDLVDAHVKALNKAEPSKVGIYNVGTGRGRSVKEFVDACKKATGVNIKIEYLSRRPGDYAEVYSDPTKINTELNWTAQYTDLKESLSVAWRWQKSHPRGYGSN

SEQ ID NO: 2121 - protein, 392 aa, Oryza sativa subsp. indica
  misc_feature (52)..(314): Pfam Name: Epimerase Pfam Description: NAD dependent epimerase/dehydratase family
  misc_feature: Public GI ID no. 125560032
  misc_feature: Bit score of 995.0 for HMM based on sequences of Figure 40
  misc_feature: Functional Homolog Of SEQ ID NO. 2090
MEYFDARRKPHNVGKVIAALVLTTLCIFVLKQSPGFGGSSVFSRHEPGVTHVLVTGGAGYIGSHASLRLLKDNYRVTIVDNLSRGNMGAVKVLQELFPQPGRLQFIYADLGDQKTVNKIFAENAFDAVMHFAAVAYVGESTLEPLRYYHNITSNTLLILEAMASHGVKTLIYSSTCATYGEPEKMPIVETTRQLPINPYGKAKKMAEDIILDFTKGRKDMAVMILRYFNVIGSDPEGRLGEAPRPELREHGRISGACFDAALGIIPGLKVKGTDYPTTDGTCIRDYIDVTDLVDAHVKALNKAEPSKVGIYNVGTGRGRSVKEFVDACKKATGVNIKIEYLSRRPGDYAEVYSDPTKINTELNWTAQYTDLKESLSVAWRWQKSHPRGYGSN

SEQ ID NO: 2122 - protein, 418 aa, Arabidopsis thaliana
  misc_feature (72)..(333): Pfam Name: Epimerase Pfam Description: NAD dependent epimerase/dehydratase f
  misc_feature: Public GI ID no. 145324086
  misc_feature: Bit score of 1097.8 for HMM based on sequences of Figure 40
  misc_feature: Functional Homolog Of SEQ ID NO. 2090
MFSFGRARSQGRQNRSMSLGGLDYADPKKKNNYLGKILLTASLTALCIFMLKQSPTFNTPSFSRHEPGVTHVLVTGGAGYIGSHAALRLLKESYRVTIVDNLSRGNLAAVRILQELFPEPGRLQFIYADLGDAKAVNKIFTENAFDAVMHFAAVAYVGESTQFPLKYYHNITSNTLVVLETMAAHGVKTLIYSSTCATYGEPDIMPITEETPQVPINPYGKAKKMAEDIILDFSKNSDMAVMILRYFNVIGSDPEGRLGEAPRPELREHGRISGACFDAARGIMPGLQIKGTDYKTADGTCVRDYIDVTDLVDAHVKALQKAKPRKVGIYNVGTGKGSSVKEFVEACKKATGVEIKIDYLPRRAGDYAEVYSDPSKIRKELNWTAKHTNLKESLETAWRWQKLHRNGYGLTTSSVSVY

SEQ ID NO: 2123 - DNA, 1607 bp, Glycine max
  misc_feature: Ceres Clone ID no. 522841
  misc_feature: Encodes the peptide sequence at SEQ ID NO. 2124
atatttccattttccactatttctctccaccgtctcatctggatgtctctcaagatctgtctggggagtggagcttgatttgattattgatattaaggaataaaatctcattcaacacactaaacaatagggattttgcaaatgctaaattttggaaggtccagaagtcagtcaagggcagccagagctacaacaatgggaggcatggattatgcagattcaaaaaagaagggcaattttgttgggaaagtatttcttgctgctgcattaacaacactgtgcataatcatgatcaagcgatctccatctttgaattcccctagcccgttttctgttcgtgaacctggggtcactcatgttttagtaacagggggtgcaggatatattggttcacatgctgctctacgacttctgaaggagaactatcgtgtcaccatagtagacaatctgtcacgtggaaatttgggggccgtcaaggttcttcaagacttatttccagaacctggaaggcttcaatttatttatgctgacttgggagatccacaatctgttaataaaatatttttggagaacaaatttgatgccgtgatgcactttgctgctgttgcatatgtgggagaaagcactgctgatcctcttaagtattatcacaatattacatcaaacaccgtgttggtattggagtctatggctaaacatgatgtgaagacattgatatattccagtacatgtgcaacatatggggaacctgagaagatgcccattacagaagaaacaaagcaggtcccaataaatccatacgggaaagccaagaagatggcagaagagatcattcttgatttatctaaaaactcagacatggcagtaatgattctgagatacttcaacgtgattggatcagatcctgagggaagattgggtgaggctcctaggcctgaactgcgagagcaaggtcgaatatcaggtgcctgctttgatgctgctcgtggtattgtacctggtttgaaggtaagaggagcagactataagacggctgatggaacttgtgtacgagattatattgatgtaactgacctggttgatgctcatgtaaaagctctggaaaaggcacaacctagtaatgttgggatctacaatgttggcactggaaagggtagttcagtgaaggagtttgtggaagcttgtaaaaaggccacaggggtggacattaaagtggactaccttccgcgtcgtccaggcgattatgctgaggtgtacagtgacccatcaaagatcaaacgtgaattgaattgggttgctaagcacactgatcttcaacagagtttgaaggttgcatggagatggcagaaatctcatcgtgatggttacggggtttcaaatgcattattttgaattacatagaattctaacataacagcagaagactagaagaaaccccggcagcatccatttcagctgcacttctatgatatcttagaataggggttgatattatttttttcttcttttactccattggggaatttgttcttagggagcatgttgtccattcgatacatgtattgaccgcataatatgattcaataatataatgcagaggctctatt

SEQ ID NO: 2124 - protein, 416 aa, Glycine max
  misc_feature (73)..(334): Pfam Name: Epimerase Pfam Description: NAD dependent epimerase/dehydratase fam
  misc_feature: Ceres Clone ID no. 522841
  misc_feature: Bit score of 1073.8 for HMM based on sequences of Figure 40
  misc_feature: Functional Homolog Of SEQ ID NO. 2090
MLNFGRSRSQSRAARATTMGGMDYADSKKKGNFVGKVFLAAALTTLCIIMIKRSPSLNSPSPFSVREPGVTHVLVTGGAGYIGSHAALRLLKENYRVTIVDNLSRGNLGAVKVLQDLFPEPGRLQFIYADLGDPQSVNKIFLENKFDAVMHFAAVAYVGESTADPLKYYHNITSNTVLVLESMAKHDVKTLIYSSTCATYGEPEKMPITEETKQVPINPYGKAKKMAEEIILDLSKNSDMAVMILRYFNVIGSDPEGRLGEAPRPELREQGRISGACFDAARGIVPGLKVRGADYKTADGTCVRDYIDVTDLVDAHVKALEKAQPSNVGIYNVGTGKGSSVKEFVEACKKATGVDIKVDYLPRRPGDYAEVYSDPSKIKRELNWVAKHTDLQQSLKVAWRWQKSHRDGYGVSNALF

SEQ ID NO: 2125 - DNA, 1302 bp, Populus balsamifera subsp. trichocarpa
  misc_feature: Ceres Annot ID no. 1467188
  misc_feature: Encodes the peptide sequence at SEQ ID NO. 2126
atgctaaactttggcaggaccagagctcagacaaggtccaatagatctatatctcttggaggcatggattattcagatccaaaaaggaaaaacaacgttgtaggaaagattcttttggctgctaccctcacagctttatgtataattatgctaaagcaatctccgaccttttattctccaagcccgttctctttgcatgaagaaggggtgatccatgtcctagtgacaggtggtgctggctacattggttcccatgctgcattgcgacttttgaaggatggttaccgagtaaccatagtggacaacctttctcgaggaaacataggtgcagtcaaggttttacaagaattatttccagagcccgggaggcttcagtttatatatgctgacctgggagatcctaaaactatagctgaacttggatgttgcaacatgtttccttcaccaaaatcccaggttaacattatcttctcacaaaatgcatttgatgctgtgatgcattttgcggcagttgcatatgttggggaaagcaccatggaacccctgaagtactatcacaatatcacatcaaataccttggtagttttggaggcaatggctgcaaatgatgtaaagactttgatatattcaagtacatgtgcaacatatggggagcctgaaaagatgccgattactgaagtaactccacaggtacccattaatccatatggaaaagctaagaagatggcagaagatatcatccttgatttttctaaaaactcagacatggcaattatgatattgagatacttcaatgtgattggatcagatccagatggcaggttaggtgaggctcctagacctgaactgcgtgagcatggacgaatttccggtgcttgtttcgatgcagctcgtggtattattgctgggctgaaggttaaaggaacagactataagacgcatgatggaacttgtataagagattatattgacgttactgatcttgttgatgctcatgttaaagcacttgaaaaggcaatgcctggtaaagtaggaatctacaatgttggcactggaaagggtagatcagtcaaggagtttgttaaggcatgtaaaaaggcaactggtgtagatatcaaagttgactatttacctcgccgtcctggtgactacgctgaagtattcagtgacccatcaaaaatttaccgcgagctgaactggacagcgcaatacacggatctccagaagagcttacagactgcatggagatggcaaaaatcacatcaaaatgggtatggatcccctttggtgatggcttcttga

SEQ ID NO: 2126 - protein, 433 aa, Populus balsamifera subsp. trichocarpa
  misc_feature (73)..(350): Pfam Name: Epimerase Pfam Description: NAD dependent epimerase/dehydratase fam
  misc_feature: Ceres Annot ID no. 1467188
  misc_feature: Bit score of 1110.9 for HMM based on sequences of Figure 40
  misc_feature: Functional Homolog Of SEQ ID NO. 2090
MLNFGRTRAQTRSNRSISLGGMDYSDPKRKNNVVGKILLAATLTALCIIMLKQSPTFYSPSPFSLHEEGVIHVLVTGGAGYIGSHAALRLLKDGYRVTIVDNLSRGNIGAVKVLQELFPEPGRLQFIYADLGDPKTIAELGCCNMFPSPKSQVNIIFSQNAFDAVMHFAAVAYVGESTMEPLKYYHNITSNTLVVLEAMAANDVKTLIYSSTCATYGEPEKMPITEVTPQVPINPYGKAKKMAEDIILDFSKNSDMAIMILRYFNVIGSDPDGRLGEAPRPELREHGRISGACFDAARGIIAGLKVKGTDYKTHDGTCIRDYIDVTDLVDAHVKALEKAMPGKVGIYNVGTGKGRSVKEFVKACKKATGVDIKVDYLPRRPGDYAEVFSDPSKIYRELNWTAQYTDLQKSLQTAWRWQKSHQNGYGSPLVMAS

SEQ ID NO: 2127 - DNA, 1885 bp, Zea mays
  misc_feature: Ceres Clone ID no. 1396123
  misc_feature: Encodes the peptide sequence at SEQ ID NO. 2128
gcacctgcctctgcctctgcctgcctccatctcctccaccgcccttccctcccttcctctccgcatcgctcgccgtcccatctttggcctggacacctggcctgcccccccttcgcggacgcgccgggtcgccggccgaatccgccctcccgccgctgccaacgtcgatctgcgcccgcccgcccgcccaagggagattcaaaggtaggacgacgggggggtcgagttattgtcggtttcattcctggccgccgacttcacatgtcaacaaccccaaggagcagaagccagggtagtaggaccactaggccgtggatcttgtcagggatggactttgctggttccagacggaagcctaatctcacggggaagattgccgtggctgctgccctcacggtcatgtgcataatcgtgttgaaacagtcccctagtttcagcggtaccagcgtgttctctcgccatgaaactggggtgacccatgtgttagtaacagggggtgctgggtatattggctcacatgctactcttcgtctccttagtgacaagtaccgagttaccattgtggataacctatccagaggaaacatgggagctgttagagttcttcaacagctatttccagaacccggaaggctccaatttatttatgctgatttaggcgatgccaaagctgtgaacaaaatattttcggagaacgcatttgatgctgttatgcactttgctgctgttgcttatgttggtgagagcacaatggagccactcaggtactaccacaacataacgtcaaacacattgacagttcttgaggcaatggcagcacataatgtaaatactctgatttactcgagtacgtgtgcaacctatgttgaacctgatacaatgccaattgtagaaacaactcctcagaatcctatcaatccatatggtaaggcaaagaagatggcggaggacatcatcttagattttacaaaatcaaagaagcaatcaaatatggctgtcatgatcttaagatacttcaacgtgattggatcagacccagagggacggctaggagaagctccaaggccagagctacgcgagcatggacggatatccggtgcttgttttgatgcagctttgggaatcattccagggctaaaggttcgtggaaccgattactccactgcagatggaacttgcgttagagactacatcgatgtcacagatcttgtagatgctcacgtaaaagctcttggtaaagctcagcgaggcaaagttggaatctacaatgtcggaacaggccaaggtagatcagtgactgagtttgtagaagcttgcaagaaggcaacaggagcttctatcaaggtcgaatatcttgcacgtagacccggagattatgccgaggtatacagcgatccgtcgaaaatccacatggaactcaactggacagcccagtacactgatcttggccaaagcctcgcccaggcgtggaaatggcagaaagcgcacccgaacggatatggaccagcctgattcagagttcaaagattgagagagactcgtcacgcagatccaaagggtccatgtgcagtcatgtagccttcagacagttggttcttcatcaccatagaaagatagcaaagagcaacagaagagtccttattcttttattgcagcgctcgaagaaggaaaaaagtatcacagagaaccccctacctgctccttgattagtttcaaatatatatataggtcctcgttgttgacattttaatataatttgatgtgtgctgaggcgctatataataacacaaacgaagttttgttgtagacagggtagatcgatctcgtgtatcaacttttgtggtggtagaatgaaaggatataaataagttgatgtaagtttttg

SEQ ID NO: 2128 - protein, 394 aa, Zea mays
  misc_feature (52)..(316): Pfam Name: Epimerase Pfam Description: NAD dependent epimerase/dehydratase f
  misc_feature: Ceres Clone ID no. 1396123
  misc_feature: Bit score of 992.5 for HMM based on sequences of Figure 40
  misc_feature: Functional Homolog Of SEQ ID NO. 2090
MDFAGSRRKPNLTGKIAVAAALTVMCIIVLKQSPSFSGTSVFSRHETGVTHVLVTGGAGYIGSHATLRLLSDKYRVTIVDNLSRGNMGAVRVLQQLFPEPGRLQFIYADLGDAKAVNKIFSENAFDAVMHFAAVAYVGESTMEPLRYYHNITSNTLTVLEAMAAHNVNTLIYSSTCATYVEPDTMPIVETTPQNPINPYGKAKKMAEDIILDFTKSKKQSNMAVMILRYFNVIGSDPEGRLGEAPRPELREHGRISGACFDAALGIIPGLKVRGTDYSTADGTCVRDYIDVTDLVDAHVKALGKAQRGKVGIYNVGTGQGRSVTEFVEACKKATGASIKVEYLARRPGDYAEVYSDPSKIHMELNWTAQYTDLGQSLAQAWKWQKAHPNGYGPA

SEQ ID NO: 2129 - protein, 411 aa, Arabidopsis thaliana
  misc_feature (72)..(333): Pfam Name: Epimerase Pfam Description: NAD dependent epimerase/dehydratase f
  misc_feature: Public GI ID no. 82592627
  misc_feature: Bit score of 1023.5 for HMM based on sequences of Figure 40
  misc_feature: Functional Homolog Of SEQ ID NO. 2090
MSLCNILDDQSFSFDFDNSGMEYLEPKRKSNVMGKIILVVSLTALCIFMLKHAPSFTSPTAFSRSEEGVTHVLVTGGAGYIGSHAALRLLKDSYRVTIVDNLSRGNLGAVKVLQGLFPEPGRLQFIYADLGDAKAVDKIFSENAFDAVMHFAAVAYVGESTLDPLKYYHNITSNTLVVLEAVARHKVKKLIYSSTCATYGEPDKMPIVEVTPQVPINPYGKAKKMAEDMILDFSKNSDMAVMILRYFNVIGSDPEGRLGEAPKPELREHGRISGACFDAARGVIPGLQVKGTDYKTGDGTCVRDYIDVTDLVDAHVKALEKAKPRNVGIYNVGTGKGRSVKEFVEACKKATGVDIKVDFLPRRPGDYAEVYSDPAKILRDLNWSARYTNLQESLEVAWKWQKTHPHGYASS

SEQ ID NO: 2130 - protein, 405 aa, Hordeum vulgare
  misc_feature (66)..(327): Pfam Name: Epimerase Pfam Description: NAD dependent epimerase/dehydratase f
  misc_feature: Public GI ID no. 84873496
  misc_feature: Bit score of 1020.7 for HMM based on sequences of Figure 40
  misc_feature: Functional Homolog Of SEQ ID NO. 2090
MIPVNRRGTQPRAGMEYFDARRKPHNIGKVIVALLFLALCIFVLKQSPGFGGNSVFSRHEPGVTHVLVTGGAGYIGSHASLRLLKDNYRVTIVDNLSRGNKGAVKVLQELFPEPGRLQFIYADLGDQKSVNKIFSENAFDAVMHFAAVAYVGESTMEPLRYYHNITSNTLLILEAMASHGVKTLIYSSTCATYGEPEKMPIIETTPQLPINPYGKAKKMAEDIILDFSKRTDMSVMILRYFNVIGSDPEGRLGEAPRPELREHGRISGACFDAALGVISGLKVKGIDYPTADGTCIRDYIDVTDLVDAHVKALNKAKPSKVGIYNVGTGRGRSVKEFVDACKQATGVDIKIEYLSRRPGDYAEVFSDPTKINNELNWTAQHTDLKESLSVAWRWQKSHPRGYGAN

SEQ ID NO: 2131 - DNA, 1257 bp, Populus balsamifera subsp. trichocarpa
  misc_feature: Ceres Annot ID no. 1442125
  misc_feature: Encodes the peptide sequence at SEQ ID NO. 2132
atgtcccttggaggcatggatttttcagatccaaaaagaaaaaataatgttgtaggaaagattcttttggccgcttccctaacagctgtatgtataattatgctgaaacaatctccaacctttaattctccaagcccgttctctttgcgtgaagatggggtgatccatgtccttgtgacaggtggtgctggctacattggttcccatgcagcattgcgacttttgaaggatggttaccgagtaaccatagtggacaacctttctcgaggaaacttaggtgcagtcaaggttttacaagagttatttcctgagcctgggaggcttcagtttatatatgctgacttgggagagcctaaaactgttaacagcatcttttcacaaaatgcatttgatgctgtgatgcattttgcagcagttgcatatgttggggaaagcaccgtgtacccccttaagtactatcacaacattacatcaaataccttggtagtgttggagtcaatggctgcaaatgatgtaaagactttgatatattcaagcacatgtgcaacatatggggagcctgaaaagatgcctattactgaagacactccacaggtacccattaatccatatggaaaagctaagaagatggcagaagatatcatccttgacttctctaaaaattcagacatggcaattatgatattgagatacttcaatgtgattggatcagatccagatggaaggttaggtgaggctcctagacctgaactgcgtgagcacggacgaatttctggtgcttgttttgatgctgctcgtggtattgttgctggactaaagatcaaaattgcaacttcactgttgagttgtttcaaggctatgctgcagttggttaaaggaacggactataagacacacgatggaacttgtataagagattatatcgatgttactgatcttgttgatgctcatgttaaagcacttgaaaaggcaatgcctgggaaagttggaatctacaatgttggcactggaatgggtagatcagtcaacgagtttgtacatgcatgtaaaaaggcaaccggtgtagatatcaaagtagactatttacctcgccggcctggtgactatgctgaagtgtttagtgacccatcaaaaattaaccgtgagctgaactggacagcacaatacactgatctccaaaagagtttacaggttgcatggagatggcaaaaatcacatcaaaatgggtatggatcccctttggtgatggcttcttga

SEQ ID NO: 2132 - protein, 413 aa, Populus balsamifera subsp. trichocarpa
  misc_feature (52)..(330): Pfam Name: Epimerase Pfam Description: NAD dependent epimerase/dehydratase fam
  misc_feature: Ceres Annot ID no. 1442125
  misc_feature: Bit score of 1018.5 for HMM based on sequences of Figure 40
  misc_feature: Functional Homolog Of SEQ ID NO. 2090
MDFSDPKRKNNVVGKILLAASLTAVCIIMLKQSPTFNSPSPFSLREDGVIHVLVTGGAGYIGSHAALRLLKDGYRVTIVDNLSRGNLGAVKVLQELFPEPGRLQFIYADLGEPKTVNSIFSQNAFDAVMHFAAVAYVGESTVYPLKYYHNITSNTLVVLESMAANDVKTLIYSSTCATYGEPEKMPITEDTPQVPINPYGKAKKMAEDIILDFSKNSDMAIMILRYFNVIGSDPDGRLGEAPRPELREHGRISGACFDAARGIVAGLKIKIATSLLSCFKAMLQLVKGTDYKTHDGTCIRDYIDVTDLVDAHVKALEKAMPGKVGIYNVGTGMGRSVNEFVHACKKATGVDIKVDYLPRRPGDYAEVFSDPSKINRELNWTAQYTDLQKSLQVAWRWQKSHQNGYGSPLVMAS

SEQ ID NO: 2133 - protein, 396 aa, Vitis vinifera
  misc_feature (52)..(313): Pfam Name: Epimerase Pfam Description: NAD dependent epimerase/dehydratase f
  misc_feature: Public GI ID no. 157352102
  misc_feature: Bit score of 1010.3 for HMM based on sequences of Figure 40
  misc_feature: Functional Homolog Of SEQ ID NO. 2090
MDLADSRRKSNVTGKVLMAISLITLCIIILKRSPNFSSPSPFSHRQPGVTHVLVTGGAGYIGSHAALRLLKDSHRVTIVDNLSRGNLGAVKVLQQLFPDPAQLQFIYADLGDAKAVNKIFSENEFDAVMHFAAVAYVGESTMDPLRYYHNITSNTLMVLKAMAAHGVKTLIYSSTCATYGEPKKMPITEGTPQVPINPYGKAKKMAEDMIIDFSKNSDMAVMVLRYFNVIGSDPEGRLGEAPRPELREHGRISGACFDAALGIIPGLKVKGTDYKTADGTCVRDYIDVTDLVDAHVKALAHAKPKKVGIYNVGTGKGRSVKEFVEACKKATGVDIKVEYLDRRPGDYAEVYSDPSKILRELNWTAQYTNLQESLQTAWRWQKSHRNGYGTRMSLHS

SEQ ID NO: 2134 - DNA, 1173 bp, Populus balsamifera subsp. trichocarpa
  misc_feature: Ceres Annot ID no. 1453370
  misc_feature: Encodes the peptide sequence at SEQ ID NO. 2135
atggatttcctggattcaagaagaaagagcaattctgctggaaaagttattgcagttgcattcttcattgcagtatgcattgtcatgctcaagcaagtgtactcacctagttataccagccccgacatgttctcccaacatgagctaggcgtaacgcatgtgttggtgaccggaggtgctggttacataggttctcacgctgcacttcgactcttgaaggattcataccgagtaactatagtggacaatctctctcgagggaatctcggtgcggttaaagttcttcaagagctatttccagagcctgggagattgcagttcatatatgctgacctaggagatgcaaaagctgtaaacaaaatctttgccgaaaatgcatttgatgctgtgatgcattttgctgctgttgcatatgttggtgaaagtacaatagagccccttagatattatcacaatatcacatcaaataccttggttgtcttggaagcaatggctgcacataatgtgaagacattaatctattcgagcacttgtgcaacgtacggagaacctattaagatgccgattagagaagaaactcctcagcttccaatcaacccctatggaaaagccaagaaaatggcagaagatatcataattgacttctccaacaccactgacatggctgtcatgatcctaagatacttcaatgttattgggtctgacccggaaggaagattaggggaagctccacgacctgagcttcgtgagcatggccgaatctctggtgcttgttttgatgcagctcgagggataacacctggactcaaggttaaagggacagactataaaacagctgatggcacatgtgtacgcgactatatcgatgtcactgacctggttgatgcccatgtgaaagctcttgcccacgcaaaacctcggaaagttggcatttacaatgttggaactggaaaaggcagatcagtgaaggagtttgttgatgcgtgtaagaaggcaacaggcgtggacataaaggttgaataccttgatcgccggccaggagactatgctgaggtcttcagtgatccttccaaaataaaacaagagctaagctggacagctcaatatactgaccttcagaagagtttacagattgcttggaaatggcagaagtcacatttgaatggttattga

SEQ ID NO: 2135 - protein, 390 aa, Populus balsamifera subsp. trichocarpa
  misc_feature (54)..(315): Pfam Name: Epimerase Pfam Description: NAD dependent epimerase/dehydratase f
  misc_feature: Ceres Annot ID no. 1453370
  misc_feature: Bit score of 977.1 for HMM based on sequences of Figure 40
  misc_feature: Functional Homolog Of SEQ ID NO. 2090
MDFLDSRRKSNSAGKVIAVAFFIAVCIVMLKQVYSPSYTSPDMFSQHELGVTHVLVTGGAGYIGSHAALRLLKDSYRVTIVDNLSRGNLGAVKVLQELFPEPGRLQFIYADLGDAKAVNKIFAENAFDAVMHFAAVAYVGESTIEPLRYYHNITSNTLVVLEAMAAHNVKTLIYSSTCATYGEPIKMPIREETPQLPINPYGKAKKMAEDIIIDFSNTTDMAVMILRYFNVIGSDPEGRLGEAPRPELREHGRISGACFDAARGITPGLKVKGTDYKTADGTCVRDYIDVTDLVDAHVKALAHAKPRKVGIYNVGTGKGRSVKEFVDACKKATGVDIKVEYLDRRPGDYAEVFSDPSKIKQELSWTAQYTDLQKSLQIAWKWQKSHLNGY

SEQ ID NO: 2136 - protein, 391 aa, Oryza sativa subsp. japonica
  misc_feature (52)..(313): Pfam Name: Epimerase Pfam Description: NAD dependent epimerase/dehydratase f
  misc_feature: Public GI ID no. 115460580
  misc_feature: Bit score of 1002.1 for HMM based on sequences of Figure 40
  misc_feature: Functional Homolog Of SEQ ID NO. 2090
MDFGDSRRKPNVVGKFTVAVALTVMCIIVLKQSPGFTSTSVFSRHEIGVTHVLVTGGAGYIGSHATLRLLRDNYRVTIVDNLSRGNMGAVRVLQRLFPEPGRLQFIYADLGDAKAVNKIFSENAFDAVMHFAAVAYVGESTLEPLRYYHNITSNTLTVLEAMAAYNVKTLIYSSTCATYGEPDTMPITEATPQNPINPYGKAKKMAEDIILDFSKRSEMAVMILRYFNVIGSDPGGRLGEAPRPELREHGRISGACFDAALGIIPGLKVRGTDYPTADGTCIRDYIDVTDLVDAHVKALDKAQPGKVGIYNVGTGHGRSVKEFVEACKSATGASIKVSFLTRRPGDYAEVYSDPSKIHDELNWTARYIDLRESLSTAWKWQKAHPNGYGSA

SEQ ID NO: 2137 - protein, 408 aa, Oryza sativa subsp. indica
  misc_feature (52)..(330): Pfam Name: Epimerase Pfam Description: NAD dependent epimerase/dehydratase fam
  misc_feature: Public GI ID no. 90399327
  misc_feature: Bit score of 967.2 for HMM based on sequences of Figure 40
  misc_feature: Functional Homolog Of SEQ ID NO. 2090
MDFGDSRRKPSVVGKFTVAVALTVMCIIVLKQSPGFTSTSVFSRHEIGVTHVLVTGGAGYIGSHATLRLLRDNYRVTIVDNLSRGNMGAVRVLQRLFPEPGRLQFIYADLGDAKAVSFFTTMRTLTPYYSHSSIHLCVENAFDAVMHFAAVAYVGESTLEPLRYYHNITSNTLTVLEAMAAHNVKTLIYSSTCATYGEPDTMPITEATPQNPINPYGKAKKMAEDIILDFSKRSEMAVMILRYFNVIGSDPEGRLGEAPRPELREHGRISGACFDAALGIIPGLKVRGTDYPTADGTCIRDYIDVTDLVDAHVKALDKAQPGKVGIYNVGTGHGRSVKEFVEACKSATGASIKVSFLTRRPGDYAEVYSDPSKIHDELNWTARYTDLRESLSTAWKWQKAHPNGYGSA

SEQ ID NO: 2138 - protein, 436 aa, Arabidopsis thaliana
  misc_feature (97)..(358): Pfam Name: Epimerase Pfam Description: NAD dependent epimerase/dehydratase fam
  misc_feature: Public GI ID no. 15241503
  misc_feature: Bit score of 985.5 for HMM based on sequences of Figure 40
  misc_feature: Functional Homolog Of SEQ ID NO. 2090
MLNSSGVRTQRRSPRPLSLGGRKIITPTKFAYDHHNPDKVLDFVEMDCLEPKTKNNLTGKLLLVASLLILAIIVISQSSSFTSPSAFSQREEGVTHVLVTGGAGYIGSHAALRLLRDSYRVTIVDNLSRGNLGAVKTLQQLFPQTGRLQFIYADLGDPLAVEKIFSENAFDAVMHFAAVAYVGESTLYPLKYYHNITSNTLGVLEAMARHKVKKLIYSSTCATYGEPEKMPITEDTPQVPINPYGKAKKMAEDMILDFSKNSDMAVMILRYFNVIGSDPGGRLGEAPRPELREQGRISGACFDAARGFIPGLQVKGTDYKTSDGTCIRDYIDVTDLVDAHVKALEKAQPRKVGIYNVGTGKGRSVKEFVEACKKATGVEIKVDFLPRRPGDYAEVYSDPTKILKDLNWTARFTNLQDSLQVAWRWQKIHPHGYNSY

SEQ ID NO: 2139 - DNA, 1320 bp, Populus balsamifera subsp. trichocarpa
  misc_feature: Ceres Annot ID no. 1528021
  misc_feature: Encodes the peptide sequence at SEQ ID NO. 2140
atggcagtttcagcacccactttcaaagtctttacctttaattttccatcacatcctcacaaccggtccattctttattcatttccaagtagaaaagtcaacatccctgctacaagcatggattatctggattcaagacgaaagagcagatgtgctggaaaaattattgcagctgcgctctgcattacagtatgcattatcatcctcaagcagaaccagtcacctacttatagcagcctcagcttgtgtttattagcagctcttatcaagaaaaggaaaaggggccctgtatttttctcccagcatgagctcggcgtaacgcatgtcttagtgactggaggtgctgggtatattggctctcatgctgcacttcgactcttgaaggattcataccgtgtaactaaagtggacaatctttctcgagggaatctgggtgctgttaaagttctccaagatctatttccggagcctgggcggttacagttcatatacgcagacttgggagatgcaaaagctgtaaacaaaatctttgctgaaaatgcatttgatgctgtgatgcatttcgctgctgttgcatatgttggtgaaagtacaatggaacctctcagatattatcacaacatcacatcaaataccttggtagttttagaagcaatggcagcacataaggtgaagacattgatttattctagcacttgtgcaacttacggcgagcctgttaagatgccgattacagaacaaactcctcagcttccaatcaacccctatggaaaagccaagaaaatggcagaagatatcataattgacttctcaaaaaccactgacatggctgtcatgatcctaagatacttcaatgttattgggtctgatccagaaggaagattaggggaagctccgcaacctgaacttcgtgagcatggccgaatctctggcgcttgttttgatgcagttaaagggatagactataaaactgctgatggcacgtgtgtacgggactatatcgatgtcactgacctggtcgatgcccatgtgaaagctcttgcccatgcaaagcctcgaaaagttggcatttacaatgttggaactggaaaaggtagatcagtgaaggagtttgtcgaggcatgtaagaaggcaacaggtgtggacataaaggttgaatacctcaatcgtcggccaggagactatgctgaggtcttcagtgacccttccaaaataaaacaagagctaaactggaaagctcaatatactgaccttaagaagagtttgcagattgcatggaaatggcagaagtcacatttgaatggttacagtcacagttaa

SEQ ID NO: 2140 - protein, 439 aa, Populus balsamifera subsp. trichocarpa
  misc_feature (109)..(361): Pfam Name: Epimerase Pfam Description: NAD dependent epimerase/dehydratase f
  misc_feature: Ceres Annot ID no. 1528021
  misc_feature: Bit score of 939.9 for HMM based on sequences of Figure 40
  misc_feature: Functional Homolog Of SEQ ID NO. 2090
MAVSAPTFKVFTFNFPSHPHNRSILYSFPSRKVNIPATSMDYLDSRRKSRCAGKIIAAALCITVCIIILKQNQSPTYSSLSLCLLAALIKKRKRGPVFFSQHELGVTHVLVTGGAGYIGSHAALRLLKDSYRVTKVDNLSRGNLGAVKVLQDLFPEPGRLQFIYADLGDAKAVNKIFAENAFDAVMHFAAVAYVGESTMEPLRYYHNITSNTLVVLEAMAAHKVKTLIYSSTCATYGEPVKMPITEQTPQLPINPYGKAKKMAEDIIIDFSKTTDMAVMILRYFNVIGSDPEGRLGEAPQPELREHGRISGACFDAVKGIDYKTADGTCVRDYIDVTDLVDAHVKALAHAKPRKVGIYNVGTGKGRSVKEFVEACKKATGVDIKVEYLNRRPGDYAEVFSDPSKIKQELNWKAQYTDLKKSLQIAWKWQKSHLNGYSHS

SEQ ID NO: 2141 - protein, 396 aa, Physcomitrella patens subsp. patens
  misc_feature (51)..(313): Pfam Name: Epimerase Pfam Description: NAD dependent epimerase/dehydratase fam
  misc_feature: Public GI ID no. 168042311
  misc_feature: Bit score of 848.1 for HMM based on sequences of Figure 40
  misc_feature: Functional Homolog Of SEQ ID NO. 2090
MVHGVSRPRSQLVIKVLLAATLTALCMFILRQYDSAGTIDKFSVKDDVTHVLVTGGAGYIGSHATLRLLKDGYRVTIVDNLSRGNMGAVQVLQGLFPEPGRLQFLYVDLGDSKAINEVFSKNAIDVVMHFAAVAYVGESTAEPLRYYHNITSNTLGLVEAMVRHRVHKLIYSSTCATYGEPDVMPIKESTPQVPINPYGKAKKMAEDIILDYVKSNDQLAVMILRYFNVIGSDSKGRLGEAPRPELRAHGRISGACFDAAMGVIPELKVQGTDYNTEDGTCVRDYIHVTDLVDAHVKALNAAKPGKPGIYNVATGKGVSVKQFVEACKAATGVNVTVKYMDRRPGDYAEVYSDPTKIKNELNWTARHTDLTKTLRVAWKWRKAHPKGYTAVNYLNS

SEQ ID NO: 2142 - protein, 388 aa, Physcomitrella patens subsp. patens
  misc_feature (47)..(308): Pfam Name: Epimerase Pfam Description: NAD dependent epimerase/dehydratase f
  misc_feature: Public GI ID no. 168013276
  misc_feature: Bit score of 847.9 for HMM based on sequences of Figure 40
  misc_feature: Functional Homolog Of SEQ ID NO. 2090
MQPRLFFVSKVLLVVLLTAICMRALRQSPSFTGLSKFATHERGVTHVLVTGGAGFIGSHAALRLLEDGHRVTIVDNLSRGNMGAVEQLQALFPEPGRLQFIYCDLGDSKRVNEIFKENAIDAVMHFAAIAYVSESMVDPLRYYHNITFNTLTVLEAMKTYGVKKLIYSSTCATYGEPEMMPITETTPQVPINPYGKAKKMSEDLIQDFAKNSDFSVMILRYFNVIGSDPKGRLGEAPRPELRKHARISGACFDAAMGIIPGIQVRGSDYNTTDGTCIRDYIHVTDLVDAHVKALEKAKRAEVSVYNVGTGKGSSVKEFVEACKFATGVNVTVTILDRRPGDYAEVYSDPSKIRRELNWVAQHLDLESSLSDAWRWRKQHPNGYSVAMI

SEQ ID NO: 2143 - protein, 392 aa, Physcomitrella patens subsp. patens
  misc_feature (51)..(313): Pfam Name: Epimerase Pfam Description: NAD dependent epimerase/dehydratase fam
  misc_feature: Public GI ID no. 168021237
  misc_feature: Bit score of 828.4 for HMM based on sequences of Figure 40
  misc_feature: Functional Homolog Of SEQ ID NO. 2090
MVDGVSRPRSQLLIKVIIAVTLTSLCMLILHQYDSAGTVDKFSVKDDMTHVLVTGGAGYIGSHATLRLLQDGYRVTIVDNLSRGNMGAVQVLQDLFPEPGRLQFLYVDLGDSKAVNEVFSKNAIDVVMHFAAVAYVGESTAEPLRYYHNITSNTLGLLEAMVRHRVHKFIYSSTCATYGEPDVMPIKESTPQVPINPYGKAKKMAEDIILDYVKSNDQLSVMILRYFNVIGSDSKGRLGEAPRPELRAHGRISGACFDAAMGVIPELKVQGTDYNTADGTCVRDYIHVTDLVDAHVKALNAAKPGKTGIYNVATGKGVSVKQFVEACKEATGVNVTIKYMERRPGDYAEVYSDPTLINNELKWIAQHTDLTQTLRVAWKWRKAHPKGYAAVN

SEQ ID NO: 2144 - protein, 388 aa, Physcomitrella patens subsp. patens
  misc_feature (47)..(308): Pfam Name: Epimerase Pfam Description: NAD dependent epimerase/dehydratase f
  misc_feature: Public GI ID no. 168056693
  misc_feature: Bit score of 813.9 for HMM based on sequences of Figure 40
  misc_feature: Functional Homolog Of SEQ ID NO. 2090
MQPRLVLIAKVLLVGLLTGLCMSALRQSTSFAGSSKFATRERGVTHVLVTGGAGFIGSHAVLRLLEDGYRVTIVDNLSRGNMGAVEQLQALFPEPGRLQFLFGDLGDSKRVTEIFAQNAIDAVMHFAAIAYVSESMADPLRYYHNITFNTLTVLEAMRAYGVTKLIYSSTCATYGEPETMPITETTPQIPINPYGKAKKMSEDLIKDFAKTADFSVTILRYFNVIGSDPKGRLGEAPRPELRKHARISGACFDAAMGIIPGIQVRGYDYKTSDGTCIRDYIHVTDLVDAHVKALEKIEKGKVSIYNVGTGKGSSVKEFVEACKFATGVNVTVTMLDRRPGDYAEVYSDPSKIKRELSWTAQHIDLKASLSDAWRWRKRHPDGFSSAMI

SEQ ID NO: 2145 - DNA, 1765 bp, Panicum virgatum
  misc_feature: Ceres Clone ID no. 1794784
  misc_feature: Encodes the peptide sequence at SEQ ID NO. 2146
agccgcacaacagggcacccaacgacaccggcctattgcgttgaaccgcccgcgatggcgctcgctgtgtcctccccggcgccgcacgtggccgtggtagcgttcccgttcagctcccacgcggcggcgctgttcaccatcgcgcgcgcgctggccgccgccgcggcgcccgtgggggccacactctcgttcctctccaccgcgggctccatcgcgcggctccgcggggcggccggcgccgagctcccggggaacctgcgcttcgtggaggtcccggacggcgccgggacgcccgcggcgaaggggcccgtgccggtgccgatgccgcggaagatggagctgttcatggccgccgcggaggctggcggggtgaaggccgggctggaggcggcccgcgccgcggcgggcggtgctagggtgagctgcgtggtcggggatgcgttcgtgtggcccgcggcggaggcggccgctgcggtgggggcgccgtgggtgccggtgtggatagccttgtcgtccgcgctcctggcgcacctccgaaccgacgcgctctgggcggacgtcggcgaccaggccgcgagcagggccgacgagctgctggtctcgcacccgggccttggcagctaccgcgtcagcgacatccccgacggcgtcgtctccggcgatttcgactacgtcatcagccgcctcctccaccgcatggggcagctcctcccgcgcgccgccgcccccgccgtggcgctcaacaccttcctgggcctcgacccgcccgacgtcaccgcggccctcgacgagacgctcccgaactgcctcccgctcggcccctaccacctcctccttcccgaggacacaaccgccgctgcgtcgccagcagccggcgacccgcacggctgcctcgcctggctggacgcgcacccggcgcgctccgtggcgtacgtaagcttcggcacggtggcgtcgccgcaccccgacgagctccgcgagctggcggcgggactggagtcctccggcgcgccgttcctgttgtccctgcgcgaggactcgtggccgctcctgcccgcggggttcctggcccgcgccgcggccggtggcgccggatccgggctcgtggtcccctgggcgccgcaggtggccgtgctgcgccacgagtccgtgggcgcgttcgtgacacacgccgggtgggggtcggtgctggaggccatgtccagcggcgtgcccatggcgtgccgccccttcgtcggggacaaccggatgatcgcgcggtctgtggcgagcgtgtgggggatcggtgcggcgttcgagggcgccacgatgacgcgcgccggggtggccgccgccgtgggggagctgctgcgcggggaggaaggggcgaggatgagggccagggcgcaggagctgcaggccgcgatggccgcggcgttcgcgcctggcggcgcgtgcaggaggaacttcgacaagttcgtggagatagtctgtcgcgtgtgaactcctgttgccggattcgtacctgttgtcggccggtcgaactgtttacgtattcgtacctgttgtcggccggtcgaactgtttacgtattcagaggtgcctgtacggaaatccaataagacgatcgcgcgctacgtggcttcgtggcgcgcgacgttgcctgtctcccatgtgatagccaacttaataatttgctttcttcttttcctttcctttttttttttgctttacgctctgtaatagcatgtgtcatcatttgtttttagattttctcttaccttcc

SEQ ID NO: 2146 - protein, 475 aa, Panicum virgatum
  misc_feature (24)..(475): Pfam Name: UDPGT Pfam Description: UDP-glucoronosyl and UDP-glucosyl transferas
  misc_feature: Ceres Clone ID no. 1794784
  misc_feature: Bit score of 1125.0 for HMM based on sequences of Figure 33
  misc_feature: Functional Homolog Of SEQ ID NO. 2146
  misc_feature: in Figure 33
MALAVSSPAPHVAVVAFPFSSHAAALFTIARALAAAAAPVGATLSFLSTAGSIARLRGAAGAELPGNLRFVEVPDGAGTPAAKGPVPVPMPRKMELFMAAAEAGGVKAGLEAARAAAGGARVSCVVGDAFVWPAAEAAAAVGAPWVPVWIALSSALLAHLRTDALWADVGDQAASRADELLVSHPGLGSYRVSDIPDGVVSGDFDYVISRLLHRMGQLLPRAAAPAVALNTFLGLDPPDVTAALDETLPNCLPLGPYHLLLPEDTTAAASPAAGDPHGCLAWLDAHPARSVAYVSFGTVASPHPDELRELAAGLESSGAPFLLSLREDSWPLLPAGFLARAAAGGAGSGLVVPWAPQVAVLRHESVGAFVTHAGWGSVLEAMSSGVPMACRPFVGDNRMIARSVASVWGIGAAFEGATMTRAGVAAAVGELLRGEEGARMRARAQELQAAMAAAFAPGGACRRNFDKFVEIVCRV

SEQ ID NO: 2147 - DNA, 1419 bp, Sorghum bicolor
  misc_feature: Ceres Annot ID no. 8735532
  misc_feature: Encodes the peptide sequence at SEQ ID NO. 2148
atggcgcccgccgcgtcatccccgccgccgcacgtggcagtggttgccttccccttcagctcccacgcggcggtgatgctctccttcgcgcgcgccctggccgccgccgccgcgccgttcggggccacgctctcgttcctctccaccgcgtcctccctcgcgcacctccgcaaggccagcggcggcgccggcggctccgcggggaacgggctcccgatgaacctgcgcttcgttgaggtccccgacggcgcgcccgtggccgcggccggggaaaccgtgccggtgccgcggcagatgcagctgttcatggcggccgcggaggccggcggggtgaaggccggcctggaggcggcccgcgtcgcggcgggcggcgccagggtgagctgcgtggtgggcgacgcgttcgtgtggccggcggctgacgcggccgcctcggccggggcgccgtgggtgcctgtgtggacggccgcgtcgtgcgcgctcctggcgcacctccgcaccgacgcgctccgagaggacgtcggcgatcaggccgcgaaaatggcggacgagctgctgatctcccacccgggcctcgccaggtaccgcgtccgtgacctccccgacggcgtcgtctccggcgacttcaactacgtcatcaacctcctcctgcaccgcatggggcagcgcctcccgcgctccgccgccgccgtcgcgctcaacgccttcccgggcctggacccgcccgaagtcaccgcggcgctcgcggagatcctgccgaactgcctcccgttcggcccctaccacctgctcctccccaaggacgacggcgtcgacaccgccgacccgcacggctgcctggcctggctggaccgccaccccgcgcgcggcgtcgcgtacgtgagcttcggcacggtggcgtccccgcggcccgacgagctccgcgagctggcggccgggctggagtcctcgggctcgccgttcctgtggtcgctgcgcgaggactcgtggccgctcctcccgccggggttcctggaccgcatcgccagcgccgggtccgggctcgtggtgccctgggcgccgcaggtggccgtgctgcgccacccttccgtgggcgcgttcgtgacgcacgccgggtgggcgtcggtgctggagggcgtgtccagcggggtacccatggcgtgccgcccgttcttcggcgaccagcggatgaacgcgcggtccgtggcgcacgtgtgggggttcggcgccgcgttcgaggcgggcatgacgcgcgacggggtggccgccgccgtggaggagctgctgcgcggggaggaaggcgcgcggatgagggccagggcgcaggagctgcaggccgcggtggccgacgcgttcggccccggcggcgcgtgcaggaagaacttcgacaagttcgtccagatagtttgtcgcgcgtga

SEQ ID NO: 2148 - protein, 472 aa, Sorghum bicolor
  misc_feature (24)..(472): Pfam Name: UDPGT Pfam Description: UDP-glucoronosyl and UDP-glucosyl transferas
  misc_feature: Ceres Annot ID no. 8735532
  misc_feature: Bit score of 1161.9 for HMM based on sequences of Figure 33
  misc_feature: Functional Homolog Of SEQ ID NO. 2146
  misc_feature: in Figure 33
MAPAASSPPPHVAVVAFPFSSHAAVMLSFARALAAAAAPFGATLSFLSTASSLAHLRKASGGAGGSAGNGLPMNLRFVEVPDGAPVAAAGETVPVPRQMQLFMAAAEAGGVKAGLEAARVAAGGARVSCVVGDAFVWPAADAAASAGAPWVPVWTAASCALLAHLRTDALREDVGDQAAKMADELLISHPGLARYRVRDLPDGVVSGDFNYVINLLLHRMGQRLPRSAAAVALNAFPGLDPPEVTAALAEILPNCLPFGPYHLLLPKDDGVDTADPHGCLAWLDRHPARGVAYVSFGTVASPRPDELRELAAGLESSGSPFLWSLREDSWPLLPPGFLDRIASAGSGLVVPWAPQVAVLRHPSVGAFVTHAGWASVLEGVSSGVPMACRPFFGDQRMNARSVAHVWGFGAAFEAGMTRDGVAAAVEELLRGEEGARMRARAQELQAAVADAFGPGGACRKNFDKFVQIVCRA

SEQ ID NO: 2149 - protein, 471 aa, Zea mays
  misc_feature (26)..(471): Pfam Name: UDPGT Pfam Description: UDP-glucoronosyl and UDP-glucosyl transferas
  misc_feature: Public GI ID no. 162463323
  misc_feature: Bit score of 1161.6 for HMM based on sequences of Figure 33
  misc_feature: Functional Homolog Of SEQ ID NO. 2146
  misc_feature: in Figure 33
MAPADGESSPPPHVAVVAFPFSSHAAVLLSIARALAAAAAPSGATLSFLSTASSLAQLRKASSASAGHGLPGNLRFVEVPDGAPAAEETVPVPRQMQLFMEAAEAGGVKAWLEAARAAAGGARVTCVVGDAFVWPAADAAASAGAPWVPVWTAASCALLAHIRTDALREDVGDQAANRVDGLLISHPGLASYRVRDLPDGVVSGDFNYVINLLVHRMGQCLPRSAAAVALNTFPGLDPPDVTAALAEILPNCVPFGPYHLLLAEDDADTAAPADPHGCLAWLGRQPARGVAYVSFGTVACPRPDELRELAAGLEDSGAPFLWSLREDSWPHLPPGFLDRAAGTGSGLVVPWAPQVAVLRHPSVGAFVTHAGWASVLEGLSSGVPMACRPFFGDQRMNARSVAHVWGFGAAFEGAMTSAGVATAVEELLRGEEGARMRARAKELQALVAEAFGPGGECRKNFDRFVEIVCRA

SEQ ID NO: 2150 - protein, 454 aa, Oryza sativa subsp. japonica
  misc_feature (16)..(454): Pfam Name: UDPGT Pfam Description: UDP-glucoronosyl and UDP-glucosyl transferas
  misc_feature: Public GI ID no. 115466870
  misc_feature: Bit score of 1102.4 for HMM based on sequences of Figure 33
  misc_feature: Functional Homolog Of SEQ ID NO. 2146
  misc_feature: in Figure 33
MAHVAVVTFPFSSHAAVLLSFARALAAASPASTFSFLSTAASFAHLRKTAAAGDLLPGNMRFVEVADGAPPPDAPPPRRMAVFMEAAEAGGVVEAGLEAARAAAGGVAVSCVVGDAFVWMAADAAAKVGARWVPVWTGASSALVAHLRTDALRDDVGDEAASRADELLTSHPGLESYRIRDLPDGVVSGDLNYVINLLLHRMAQRLPRAATAVALNTFPGLDPPTVTAALTAVLPTCLPLGPYHLLATAPANDDDPNGCLAWLDRHAPRTVAYVSFGTVASPRPDELRELAAGLEASGAPFLWSLREDSWPLLPPGFLERTKQHAAAGLVVPWAPQVGVLRHASVGAFVTHAGWASVMEGASSGVPMACRPFFGDQRTNARSVSHVWGFGTAFDGAMTRGGVATAVASLVGGEDGRRMRARAQELQAKVASAFVEPDGSCRKNFAKFVEIICAS

SEQ ID NO: 2151 - protein, 455 aa, Hordeum vulgare
  misc_feature (20)..(455): Pfam Name: UDPGT Pfam Description: UDP-glucoronosyl and UDP-glucosyl transferas
  misc_feature: Public GI ID no. 136746
  misc_feature: Bit score of 1104.6 for HMM based on sequences of Figure 33
  misc_feature: Functional Homolog Of SEQ ID NO. 2146
  misc_feature: in Figure 33
MAPPPPHIAVVAFPFSSHAAVLFSFARALAAAAPAGTSLSFLTTADNAAQLRKAGALPGNLRFVEVPDGVPPGETSCLSPPRRMDLFMAAAEAGGVRVGLEAACASAGGARVSCVVGDAFVWTADAASAAGAPWVAVWTAASCALLAHLRTDALRRDVGDQAASRADELLVAHAGLGGYRVRDLPDGVVSGDFNYVISLLVHRQAQRLPKAATAVALNTFPGLDPPDLIAALAAELPNCLPLGPYHLLPGAEPTADTNEAPADPHGCLAWLDRRPARSVAYVSFGTNATARPDELQELAAGLEASGAPFLWSLRGVVAAAPRGFLERAPGLVVPWAPQVGVLRHAAVGAFVTHAGWASVMEGVSSGVPMACRPFFGDQTMNARSVASVWGFGTAFDGPMTRGAVANAVATLLRGEDGERMRAKAQELQAMVGKAFEPDGGCRKNFDEFVEIVCRV

SEQ ID NO: 2152 - protein, 460 aa, Iris hollandica
  misc_feature (21)..(460): Pfam Name: UDPGT Pfam Description: UDP-glucoronosyl and UDP-glucosyl transferas
  misc_feature: Public GI ID no. 57157447
  misc_feature: Bit score of 1113.0 for HMM based on sequences of Figure 33
  misc_feature: Functional Homolog Of SEQ ID NO. 2146
  misc_feature: in Figure 33
MGSVEHPHIALLAFPFGTHAAPLLSLAHSLAASAPPGTFFSFVSSRRSVSSLSLSVSPSDNIRFYEVSDGSPVLAPAAASGMLEDPEEEVRLFMKETPGNYRRALEAAVEGCAGTRVTCIIADAFLWFVGEIAAENGVGWVPLWTGGPCSFQAHLYTDLLRDRIGVGEKADLDADLQFIPGLASLRVRDLPEDIVTGHLDGAFATMLYRMATELPRSTSTIILNSFEGLHPEIDADLATKFRKPLPIGPLNLLFPSPAVPEPVSSSRCLAWLDKFEPDTVVYVSFGTVVDLPPSELAELALGLESSGSPFLWSIKDPAKAKLPAGFLDRTRDRGLLVPWIPQVAVLNHNAVAAFLSHCGWNSVLESMTCGVPMVCRPFLGDQMLNSKVVSQVWKVGVRLHNGPMTSTNVAEAIKTVVAGDEGKNMRDRAAKMREKATGSVRPDGSSVRNLNTLLEIVFAR

SEQ ID NO: 2153 - protein, 455 aa, Vitis vinifera
  misc_feature (17)..(449): Pfam Name: UDPGT Pfam Description: UDP-glucoronosyl and UDP-glucosyl transferas
  misc_feature: Public GI ID no. 225435965
  misc_feature: Bit score of 1125.2 for HMM based on sequences of Figure 33
  misc_feature: Functional Homolog Of SEQ ID NO. 2146
  misc_feature: in Figure 33
MDQHIGVLAFPFTSHPQTLLGLVRRLAFAAPHTKFSFFSTANSNAFLFSTQSADGLNNVKPYDVADGVPEGHVLSGNPEEAVGFFLKGAVGKFRQAMEVAVADTARKISCLVTDAFLWFGADMAEEMGVPWVPFWIAGLSALSVHFHTDAIRQKIGLNGKVAGHEDQTLDFIPGLSAMRVRDLPEGIVSGDLDSAPSRMLHKMGLLLPRATAVIANSVEELNPIVATDLKSKLPKLLCLAPPTPSSQPASNPDTSSCLSWLDKQKAKTVAYISFGSILSPSPDELVALTEALEATGVPFLWSIKDNAKKNLPKGFLEMTSGKGKVVPWAPQMQVLKHPSVGVHVTHSGWNSVMESIAGEVPMICRPFFADNSLNCRAVEDVWGIGVGIEGGVFTKSGLVSALEQVLLGEGKKMREKIGVLKELCRKADDPNGSSSQNFSTLLELVTKFQMDSSAN

SEQ ID NO: 2154 - protein, 473 aa, Citrus sinensis
  misc_feature (13)..(473): Pfam Name: UDPGT Pfam Description: UDP-glucoronosyl and UDP-glucosyl transferas
  misc_feature: Public GI ID no. 77732554
  misc_feature: Bit score of 1207.2 for HMM based on sequences of Figure 33
  misc_feature: Functional Homolog Of SEQ ID NO. 2146
  misc_feature: in Figure 33
MAQTQSQPRPHIAVLNFPFSTHASSVPSIIKRLAVSSPTAMFTFFSTPQSNKALFSTGQQRHLPSNVKPYDVSDGVPEGHVFSGKRQEDIELFMNAADANFRKAVEAAVAETGRPLTCLVTDAFIWFAAEMARDWNNVPWIPCSPAGPNSLSAHLYTDIIRDKIGTQSQNQDQQLIHFIPGMNKIRVADLPEGVVSGDLDSVFSVMVHQMGRQLPKAAAVFINSFEELDPELTNHLKTKFNKKFLSVGPFKLLLASDQQPSSATDLDDKYGCLAWLDKQKKKPASVAYVGFGTVATPSPNEIAAIAEDQPGPSLEASKVPFIWSLRHRSQANLPNGFLERTRSDGIVVDWATQVNVLAHEAVGVFVTHCGWGSILESIAAGVPMIGRPFFGDQRINGRMMEQIWGVGIAVDGGGICTKEGLLSSLDLILCQEKGIKIREKVTKLKQLCQNAIGPGGSSMQNLDALVDMISRSY

SEQ ID NO: 2155 - DNA, 1426 bp, Arabidopsis thaliana
  misc_feature: Ceres Annot ID no. 882862
  misc_feature: Encodes the peptide sequence at SEQ ID NO. 2156
aagtcttcttcttcattactcgcaccatgaccaaaccctccgacccaaccagagactcccacgtggcagttctcgcttttcctttcggcactcatgcagctcctctcctcaccgtcacgcgccgcctcgcctccgcctctccttccaccgtcttctctttcttcaacaccgcacaatccaactcttcgttattttcctccggtgacgaagcagatcgtccggcgaacatcagagtatacgatattgccgacggtgttccggagggatacgtgtttagcgggagaccacaggaggcgatcgagctgtttcttcaagctgcgccggagaatttccggagagaaatcgcgaaggcggagacggaggttggtacggaagtgaaatgtttgatgactgatgcgttcttctggttcgcggctgatatggcgacggagataaatgcgtcgtggattgcgttttggaccgccggagcaaactcactctctgctcatctctacacagatctcatcagagaaaccatcggtgtcaaagaagtaggtgagcgtatggaggagacaataggggttatctcaggaatggagaagatcagagtcaaagatacaccagaaggagttgtgtttgggaatttagactctgttttctcaaagatgcttcatcaaatgggtcttgctttgcctcgtgccactgctgttttcatcaattcttttgaagatttggatcctacattgacgaataacctcagatcgagatttaaacgatatctgaacatcggtcctctcgggttattatcttctacattgcaacaactagtgcaagatcctcacggttgtttggcttggatggagaagagatcttctggttctgtggcgtacattagctttggtacggtcatgacaccgcctcctggagagcttgcggcgatagcagaagggttggaatcgagtaaagtgccgtttgtttggtcgcttaaggagaagagcttggttcagttaccaaaagggtttttggataggacaagagagcaagggatagtggttccatgggcaccgcaagtggaactgctgaaacacgaagcaacgggtgtgtttgtgacgcattgtggatggaactcggtgttggagagtgtatcgggtggtgtaccgatgatttgcaggccattttttggggatcagagattgaacggaagagcggtggaggttgtgtgggagattggaatgacgattatcaatggagtcttcacgaaagatgggtttgagaagtgtttggataaagttttagttcaagatgatggtaagaagatgaaatgtaatgctaagaaacttaaagaactagcttacgaagctgtctcttctaaaggaaggtcctctgagaatttcagaggattgttggatgcagttgtaaacattatttgaatgtgaaatgattttgg

SEQ ID NO: 2156 - protein, 460 aa, Arabidopsis thaliana
  misc_feature (25)..(460): Pfam Name: UDPGT Pfam Description: UDP-glucoronosyl and UDP-glucosyl transferas
  misc_feature: Ceres Annot ID no. 882862
  misc_feature: Bit score of 1153.8 for HMM based on sequences of Figure 33
  misc_feature: Functional Homolog Of SEQ ID NO. 2146
  misc_feature: in Figure 33
MTKPSDPTRDSHVAVLAFPFGTHAAPLLTVTRRLASASPSTVFSFFNTAQSNSSLFSSGDEADRPANIRVYDIADGVPEGYVFSGRPQEAIELFLQAAPENFRREIAKAETEVGTEVKCLMTDAFFWFAADMATEINASWIAFWTAGANSLSAHLYTDLIRETIGVKEVGERMEETIGVISGMEKIRVKDTPEGVVFGNLDSVFSKMLHQMGLALPRATAVFINSFEDLDPTLTNNLRSRFKRYLNIGPLGLLSSTLQQLVQDPHGCLAWMEKRSSGSVAYISFGTVMTPPPGELAAIAEGLESSKVPFVWSLKEKSLVQLPKGFLDRTREQGIVVPWAPQVELLKHEATGVFVTHCGWNSVLESVSGGVPMICRPFFGDQRLNGRAVEVVWEIGMTIINGVFTKDGFEKCLDKVLVQDDGKKMKCNAKKLKELAYEAVSSKGRSSENFRGLLDAVVNII

SEQ ID NO: 2157 - DNA, 1631 bp, Panicum virgatum
  misc_feature: Ceres Clone ID no. 1769212
  misc_feature: Encodes the peptide sequence at SEQ ID NO. 2158
aactgaagccgcacaacaggaacagggcacccaccgacaccggcgatggcgcccgccgtgtcctccccgacgccgcacgtggccgtggtagcgttcccgttcggctcccacgcgccggcgctgctcgccttcgcgcgcgcgctggccgccgccgcggcgcccgcgggggccacgctctcgttcctctccaccgcgggctccatcgcgcagctccgcggggcggctagcgccgagatcccggggaacctgcgcttcgtggaggtcccggacggcgccgggctgcccgcggccaaggggcccgtgccggtgccagtgccgcggcagatggagctgtttatggccgccgcggaggccggcggcttgaaggccgggctggaggcggcccgcgccatggcgggcggcgccagggtgagctgcgtggtcggggacgctttcgtgtggcccgcggcggaggcggccgccgcggcggggtcgccgtgggtgccggtgtggatgggcgcgccgtgcgcactcctggcgcacctccgcaccgacgcgctccgggcggaagtcggcgaccaggccgcgagcagggcggacgagctgctggcctcgcacccgggcctcggcagctactgcgtcggcgacctccccgacggcgtcgtctccggtgacttcaaccacgtcatcagccgcctcgtccaccgaatggggcagctcctcccgcgcgccgccgccgccgccgtggcgctcaacaccttcccgggcctcgacccgcccgacttcaccgcggtcctcgcggagacgctccccaactgcctcccgctcgggctcggcctckaccacctcctcctccccaaggacatcaccgacgccgcggcgccaacagcaggcgacccgcacggctgcctcgcctgggtggacgctcacccggcgcgctcggtggtgtacgtcggcttcggcagggtggcgtccccgcgctccgacgagctccgggagctggctgccgggctggagtcctccggtgcgccgttcctgtggtccctgcgcgaggactcgtggccgctcctgcccgaggggttcctggcccgcgccgcggccgccggcgccgggctcgtggtcccctgggcgccgcaggtggccgtgctgcgccatgcgtccgtgggcaccttcgtgacgcacgccgggtgggggtcggtgctggaggccctgtccagcggcgtgcccatggcgtgccgccccttcttcggggaccaccggatgatcgcgcggtccgtggcgagcgtgtggggagtcggcgtggcgttcgagggcgccgcgatgacgcgcgccggggtggccgccgccgtgggggagctgctgcgcggggaggaaggggcgaggatgagggccagggcgcaggagctgcaggccgctgcggccgcggcgttcgcgcccggcggcgcgtgcaggaggaacttcgacgagttcgtggagatagtctgtcgcgtgtgaagtcctgttgccggattcatacctcttgccgggcgatccaactgtaactggttttacgtattcaggggtttctgtagagctagtgttgtgctgaatgcttcatttcctttctctcttttttttggatatataatatatttgaatgcttcatttctcgt

SEQ ID NO: 2158 - protein, 475 aa, Panicum virgatum
  misc_feature (24)..(475): Pfam Name: UDPGT Pfam Description: UDP-glucoronosyl and UDP-glucosyl transferas
  misc_feature: Ceres Clone ID no. 1769212
  misc_feature: Bit score of 1020.2 for HMM based on sequences of Figure 33
  misc_feature: Functional Homolog Of SEQ ID NO. 2146
  misc_feature (259)..(259): Xaa is any aa, unknown, or other
MAPAVSSPTPHVAVVAFPFGSHAPALLAFARALAAAAAPAGATLSFLSTAGSIAQLRGAASAEIPGNLRFVEVPDGAGLPAAKGPVPVPVPRQMELFMAAAEAGGLKAGLEAARAMAGGARVSCVVGDAFVWPAAEAAAAAGSPWVPVWMGAPCALLAHLRTDALRAEVGDQAASRADELLASHPGLGSYCVGDLPDGVVSGDFNHVISRLVHRMGQLLPRAAAAAVALNTFPGLDPPDFTAVLAETLPNCLPLGLGLXHLLLPKDITDAAAPTAGDPHGCLAWVDAHPARSVVYVGFGRVASPRSDELRELAAGLESSGAPFLWSLREDSWPLLPEGFLARAAAAGAGLVVPWAPQVAVLRHASVGTFVTHAGWGSVLEALSSGVPMACRPFFGDHRMIARSVASVWGVGVAFEGAAMTRAGVAAAVGELLRGEEGARMRARAQELQAAAAAAFAPGGACRRNFDEFVEIVCRV

SEQ ID NO: 2159 - protein, 471 aa, Zea mays
  misc_feature (26)..(471): Pfam Name: UDPGT Pfam Description: UDP-glucoronosyl and UDP-glucosyl transferas
  misc_feature: Public GI ID no. 104303700
  misc_feature: Bit score of 1158.3 for HMM based on sequences of Figure 33
  misc_feature: Functional Homolog Of SEQ ID NO. 2146
MAPADAESSPPPHVAVVAFPFSSHAAVLLSIARALAAAAAPSGATLSFLSTASSLAQLRKASSASAGHGLPGNLRFVEVPDGAPAAEETVPVPRQMQLFMEAAEAGGVKAWLEAARAAAGGARVTCVVGDAFVWPAADAAASAGAPWVPVWTAASCALLAHIRTDALREDVGDQAANRVDGLLISHPGLASYRVRDLPDGVVSGDFNYVINLLVHRMGQCLPRSAAAVALNTFPGLDPPDVTAALAEILPNCVPFGPYHLLLAEDDADTAAPADPHGCLAWLGRQPARGVAYVSFGTVACPRPDELRELAAGLEDSGAPFLWSLREDSWPHLPPGFLDRAAGTGSGLVVPWAPQVAVLRHPSVGAFVTHAGWASVLEGLSSGVPMACRPFFGDQRMNARSVAHVWGFGAAFEGAMTSAGVATAVEELLRGEEGARMRARAKELQALVAEAFGPGGECRKNFERFVEIVCRA

SEQ ID NO: 2160 - protein, 471 aa, Zea mays
  misc_feature (26)..(471): Pfam Name: UDPGT Pfam Description: UDP-glucoronosyl and UDP-glucosyl transferas
  misc_feature: Public GI ID no. 136745
  misc_feature: Bit score of 1158.0 for HMM based on sequences of Figure 33
  misc_feature: Functional Homolog Of SEQ ID NO. 2146
MAPADGESSPPPHVAVVAFPFSSHAAVLLSIARALAAAAAPSGATLSFLSTASSLAQLRKASSASAGHGLPGNLRFVEVPDGAPAAEESVPVPRQMQLFMEAAEAGGVKAWLEAARAAAGGARVTCVVGDAFVWPAADAAASAGAPWVPVWTAASCALLAHIRTDALREDVGDQAANRVDEPLISHPGLASYRVRDLPDGVVSGDFNYVINLLVHRMGQCLPRSAAAVALNTFPGLDPPDVTAALAEILPNCVPFGPYHLLLAEDDADTAAPADPHGCLAWLGRQPARGVAYVSFGTVACPRPDELRELAAGLEASGAPFLWSLREDSWTLLPPGFLDRAAGTGSGLVVPWAPQVAVLRHPSVGAFVTHAGWASVLEGVSSGVPMACRPFFGDQRMNARSVAHVWGFGAAFEGAMTSAGVAAAVEELLRGEEGARMRARAKVLQALVAEAFGPGGECRKNFDRFVEIVCRA

SEQ ID NO: 2161 - protein, 471 aa, Zea mays
  misc_feature (26)..(471): Pfam Name: UDPGT Pfam Description: UDP-glucoronosyl and UDP-glucosyl transferas
  misc_feature: Public GI ID no. 104303696
  misc_feature: Bit score of 1159.3 for HMM based on sequences of Figure 33
  misc_feature: Functional Homolog Of SEQ ID NO. 2146
MAPADGESSPPPHVAVVAFPFSSHAAVLLSIARALAAAAAPSGATLSFLSTASSLAQLRKASSASAGHGLPGNLRFVEVPDGAPAAEETVPVPRQMQLFMEAAEAGGVKAWLEAARAAAGGARVTCVVGDAFVWPAADAAASAGAPWVPVWTAASCALLAHIRTDALREDVGDQAANRVDGLLISHPGLASYRVRDLPDGVVSGDFNYVINLLVHRMGQCLPRSAAAVALNTFPGLDPPDVTAALAEILPNCVPFGPYHLLLAEDDADTAAPADPHGCLAWLGRQPARGVAYVSFGTVACPRPDELRELAAGLEDSGAPFLWSLREDSWPHLPPGFLDRAAGTGSGLVVPWAPQVAVLRHPSVGAFVTHAGWASVLEGLSSGVPMACRPFFGDQRMNARSVAHVWGFGAAFEGAMTSAGVATAVEELLRGEEGARMRARAKELQALVAEAFGPGGECRKNFERFVEIVCRA

SEQ ID NO: 2162 - protein, 471 aa, Zea mays
  misc_feature (26)..(471): Pfam Name: UDPGT Pfam Description: UDP-glucoronosyl and UDP-glucosyl transferas
  misc_feature: Public GI ID no. 104303698
  misc_feature: Bit score of 1157.6 for HMM based on sequences of Figure 33
  misc_feature: Functional Homolog Of SEQ ID NO. 2146
MAPADAESSPPPHVAVVAFPFSSHAAVLLSIARALAAAAAPSGATLSFLSTASSLAQLRKASSASAGHGLPGNLRFVEVPDGAPAAEETVPVPRQMQLFMEAAEAGGVKAWLEAARASAGGARVTCVVGDAFVWPAADAAASAGAPWVPVWTAASCALLAHIRTDALREDVGDQAANRVDGLLISHPGLASYRVRDLPDGVVSGDFNYVINLLVHRMGQCLPRSAAAVALNTFPGLDPPDVTAALAEILPNCVPFGPYHLLLAEDDADTAAPADPHGCLAWLGRQPARGVAYVSFGTVACPRPDELRELAAGLEDSGAPFLWSLREDSWPHLPPGFLDRAAGTGSGLVVPWAPQVAVLRHPSVGAFVTHAGWASVLEGLSSGVPMACRPFFGDQRMNARSVAHVWGFGAAFEGAMTSAGVATAVEELLRGEEGARMRARAKELQALVAEAFGPGGECRKNFERFVEIVCRA

SEQ ID NO: 2163 - protein, 503 aa, Zea mays
  misc_feature (26)..(472): Pfam Name: UDPGT Pfam Description: UDP-glucoronosyl and UDP-glucosyl transferas
  misc_feature: Public GI ID no. 55741074
  misc_feature: Bit score of 1158.8 for HMM based on sequences of Figure 33
  misc_feature: Functional Homolog Of SEQ ID NO. 2146
MAPADGESSPPPHVAVVAFPFSSHAAVLLSIARALAAAAAPSGATLSFLSTASSLAQLRKASSASAGHGLPGNLRFVEVPDGAPAAEETVPVPRQMQLFMEAAEAGGVKAWLEAARAAAGGARVTCVVGDAFVWPAADAAASAGAPWVPVWTAASCALLAHIRTDALREDVGDQAANRVDGLLISHPGLASYRVRDLPDGVVSGDFNYVINLLVHRMGQCLPRSAAAVALNTFPGLDPPDVTAALAEILPNCVPFGPYHLLLAEDDADTAAPADPHGCLAWLGRQPARGVAYVSFGTVACPRPDELRELAAGLEDSGAPFLWSLREDSWPHLPPGFLDRAAGTGSGLVVPWAPQVAVLRHPSVGAFVTHAGWASVLEGLSSGVPMACRPFFGDQRMNARSVAHVWGFGAAFEGAMTSAGVATAVEELLRGEEGARMRARAKELQALVAEAFGPGGECRKNFDRFVEIIVPIKSTISILAQQSSPLKAYSVIFNPYKSKKIDID

SEQ ID NO: 2164 - DNA, 1104 bp, Panicum virgatum
  misc_feature: Ceres Clone ID no. 1900402
  misc_feature: Encodes the peptide sequence at SEQ ID NO. 2165
acagcaggcacccaccgacgccagcctattgctttcaaccgcccgccatggcgcccgacgcgtcctccccgacgccgcacgttgccgtggtagcgttccctttcagctcccacgcggcggtgctgctcgccttcgcgcgcgcgctggccgccgccgcggcgcccgcggggggcacgctctcgttcctctccaccgcgggctccatcgcgcagctccgccgggcggtcggcgccgagctcccgggaaacctgcgcttcgtggaggtcccggacggcgccgggccgcccgcggcgaagggcgccgtgccggtgccggtgccggtgccgatgccgcggcagatggagctgttcatggccgccgcggaggccggcggggtgaaggccgggctgcaggcggcccgcgccgcggcgggcggcgccaaggtgagctgcgtggtcggggacgcgttcgtgtggcccgcggcggaggcggcggccgcggcgggggcgccgtgggtgccggtgtggacggccgcgtcgtgcgcgctcctggcgcacctccgcaccgacgcgctgcgggcggacgtcggcgaccaggccgcgagcagggcggatgagctgctggtctcgcacccgggcctcggcagctaccgcgtcggcgacctccccgacggcgtcatctccggcgacttcaactacgtcatcagccgccttgtccaccgcatggggcagctactcccgcgtgccgccgccgccgtggcactcgatactttcccgggcctggacccgcccgacgtcaccgcagctctcgacgagacgctcccgaactgcctcccgctcggcccctaccacctcctcctccccaaggacaccaccgacgccgcgtcgcaagcagccggcgacccgcacggctgcctcgcctggctcgacgcccacccggcgcgctccgtggcgtacgtcagcttcggcacggtggcgtcgccgcgccccgacgagctccgagagctggcggccgggctggagtcctctggcgcgccgttcctgtggtccctgcgcgaggactcgtggccgctcctgcccgcggggttcctggcccgcgccgccgccgccggcgccgggctcgtgg

SEQ ID NO: 2165 - protein, 352 aa, Panicum virgatum
  misc_feature (24)..(352): Pfam Name: UDPGT Pfam Description: UDP-glucoronosyl and UDP-glucosyl transferas
  misc_feature: Ceres Clone ID no. 1900402
  misc_feature: Bit score of 598.7 for HMM based on sequences of Figure 33
  misc_feature: Functional Homolog Of SEQ ID NO. 2146
MAPDASSPTPHVAVVAFPFSSHAAVLLAFARALAAAAAPAGGTLSFLSTAGSIAQLRRAVGAELPGNLRFVEVPDGAGPPAAKGAVPVPVPVPMPRQMELFMAAAEAGGVKAGLQAARAAAGGAKVSCVVGDAFVWPAAEAAAAAGAPWVPVWTAASCALLAHLRTDALRADVGDQAASRADELLVSHPGLGSYRVGDLPDGVISGDFNYVISRLVHRMGQLLPRAAAAVALDTFPGLDPPDVTAALDETLPNCLPLGPYHLLLPKDTTDAASQAAGDPHGCLAWLDAHPARSVAYVSFGTVASPRPDELRELAAGLESSGAPFLWSLREDSWPLLPAGFLARAAAAGAGLV

SEQ ID NO: 2166 - DNA, 1353 bp, Sorghum bicolor
  misc_feature: Ceres Annot ID no. 8656644
  misc_feature: Encodes the peptide sequence at SEQ ID NO. 2167
atggggtcaccgcacgtcgccgtggtgccttttcccttcagctcccacgcccccaagctgctcatggtcgcgcgcgccctagccaccgcggcgccgtccgcgaccttctccttcatctccaccgccgactccctggcgcggcttggtgtcgcggcggtcccggggaacctgcgctttgtggaggtgccgtctggaggaggcgacgatcagggaaccccgccgtggcgccggatggagctgtttgtcgaggccgcggaggctggtggcctcagacacgcattggaaatggcacgcgccgcggctgggggcgccagggtgagctgcgtcgtcggggacgccttcatgtccatggctgcagaggccggggtgccctgggtcgcagtctggacgggcggcccgtgcgcgctcctggcgcacctcatcggcgacgcgatccgcgaggacatcggcgagcacgccgcgaacagggccgacgagcttctgacctcccacccaggcctcgggagctaccgcgtccgcgacctccccttcggcggcatcggcgccagcggcgacatgcaccgtgtcatgagcctcctcttctgccgcatggcgcagcgcctgccccgcgccgccaccgccgtcgcgctcaacgccttcccgggcctcttcccgcaggacgtgtccgccgccctcgccgacgcgctccccaactccctccccatcggcccctaccacctcctcccgggcgccgccgcgccagccgacgacccccacgcctgccttgcctggctcgctcaccgccccgcgggcaccgtggcgtacgtcagcttcggcacggtcgcggcgctgccaccggacgagctccgtgagctggcctccgggctcgaggccagcggcgcgccctacctgtggtcgcttcgggaggacgcgtggccgctgctcccggcggggttcgtggaccgcgccaaggccaatggctccgggctcctggtgccgtggacgccgcaggccgcggtgctgcggcacccggcggtgggcgcgttcgtcacgcactccggctggggggccgtcgtcgaggggatgtccggcggcgtgcccatggcgtgccgccccttcttcggggaccagcagatgaatgcgcgtgctgtggcgcgcctgtggtgcttcggcacagcgttcggcgacgacacgccgatgacgagccgtggcgtggcggaggtggtgacgtcgctgctgacaggggcggaaggggcccggatgagggctagggcgcgcgatctgcaaggcagggtcgtcgaggcgttcgaacccgacggcggatccatgaacaacttccacaaatttgtcgaggttgtttgtgcccgtgtgtga

SEQ ID NO: 2167 - protein, 450 aa, Sorghum bicolor
  misc_feature (18)..(450): Pfam Name: UDPGT Pfam Description: UDP-glucoronosyl and UDP-glucosyl transferas
  misc_feature: Ceres Annot ID no. 8656644
  misc_feature: Bit score of 800.8 for HMM based on sequences of Figure 33
  misc_feature: Functional Homolog Of SEQ ID NO. 2146
MGSPHVAVVPFPFSSHAPKLLMVARALATAAPSATFSFISTADSLARLGVAAVPGNLRFVEVPSGGGDDQGTPPWRRMELFVEAAEAGGLRHALEMARAAAGGARVSCVVGDAFMSMAAEAGVPWVAVWTGGPCALLAHLIGDAIREDIGEHAANRADELLTSHPGLGSYRVRDLPFGGIGASGDMHRVMSLLFCRMAQRLPRAATAVALNAFPGLFPQDVSAALADALPNSLPIGPYHLLPGAAAPADDPHACLAWLAHRPAGTVAYVSFGTVAALPPDELRELASGLEASGAPYLWSLREDAWPLLPAGFVDRAKANGSGLLVPWTPQAAVLRHPAVGAFVTHSGWGAVVEGMSGGVPMACRPFFGDQQMNARAVARLWCFGTAFGDDTPMTSRGVAEVVTSLLTGAEGARMRARARDLQGRVVEAFEPDGGSMNNFHKFVEVVCARV

SEQ ID NO: 2168 - DNA, 1188 bp, Zea mays
  misc_feature: Ceres Clone ID no. 100743430
  misc_feature: Encodes the peptide sequence at SEQ ID NO. 2169
cgacgctagcggctagcctagccgaacagcctgagcgcgcgaagatggcgcccgccgacggcgagtcctccccgccgccgtgggtgccggtgtggacggccgcgtcgtgcgcgctcctggcgcacgtccgcaccgacgcgctccgggaggacgtcggcgaccaggccgcaaacagggtggacgagccactgatctcccacccgggcctcgccagctaccgcgtccgtgacctcccagacggcgtcgtctccggcgacttcaactacgtcatcaacctcctcgtccaccgcatggggcagtgcctcccgcgctctgccgccgccgtggcactcaacacgttcccaggcctggacccgcccgacgtcaccgcggcgctcgcggagatcctgcccaactgcgtcccgttcggcccctaccacctcctcctcgccgaggacgacgccgacaccgccgcaccagccgacccgcacggctgcctcgcctggctgggccgccaacccgcgcgcggcgtcgcgtacgtcagcttcggcacggtggcgtgcccgcggcctgacgagctccgcgagctggcggccgggctggaggcctcggccgcgccgttcctgtggtcgctgcgcgaggactcgtggacgctcctcccgccgggtttccttgaccgcgccgcgggcaccgggtccgggctcgtggtgccctgggcgccgcaggtggccgtgctgcgccacccttccgtgggcgcgttcgtgacgcacgccgggtgggcgtcggtgctggagggcgtgtccagcggggtgcccatggcgtgccgcccctttttcggcgaccagcggatgaacgcgcggtccgtggcgcacgtgtgggggttgggcgccgcgttcgagggcgccatgacgagcgccggagtggccgcggccgtggaggagctgctgcgcggggaggaaggggcgcggatgagggcaagggccaaggagctgcaggccttggtggccgaggcgttcgggccaggcggtgagtgcaggaagaacttcgacaggttcgtcgagatagtctgtcgcgcgtgaaaggtcgtcttgctgttcagaggttttaccaacagaagaacataatttgtagttgatacatgagttgcagcagcagtaacagcctcctgtatcttggctttggatctgtattcctgtcaccagttgtctg

SEQ ID NO: 2169 - protein, 337 aa, Zea mays
  misc_feature (1)..(337): Pfam Name: UDPGT Pfam Description: UDP-glucoronosyl and UDP-glucosyl transferas
  misc_feature: Ceres Clone ID no. 100743430
  misc_feature: Bit score of 665.4 for HMM based on sequences of Figure 33
  misc_feature: Functional Homolog Of SEQ ID NO. 2146
MAPADGESSPPPWVPVWTAASCALLAHVRTDALREDVGDQAANRVDEPLISHPGLASYRVRDLPDGVVSGDFNYVINLLVHRMGQCLPRSAAAVALNTFPGLDPPDVTAALAEILPNCVPFGPYHLLLAEDDADTAAPADPHGCLAWLGRQPARGVAYVSFGTVACPRPDELRELAAGLEASAAPFLWSLREDSWTLLPPGFLDRAAGTGSGLVVPWAPQVAVLRHPSVGAFVTHAGWASVLEGVSSGVPMACRPFFGDQRMNARSVAHVWGLGAAFEGAMTSAGVAAAVEELLRGEEGARMRARAKELQALVAEAFGPGGECRKNFDRFVEIVCRA

SEQ ID NO: 2170 - protein, 477 aa, Oryza sativa subsp. indica
  misc_feature (22)..(476): Pfam Name: UDPGT Pfam Description: UDP-glucoronosyl and UDP-glucosyl transferas
  misc_feature: Public GI ID no. 125557238
  misc_feature: Bit score of 790.8 for HMM based on sequences of Figure 33
  misc_feature: Functional Homolog Of SEQ ID NO. 2146
MPSSPSHPHVAVVAFPFSSHAPKLLAVARALATAAPSATFSFLSTADSLARLPATAVVPAGNNNLRFVEVPTDGDQEETWPVWRRMEMFVEAAEGGGLRRAMEAAGDAAGGVAVSCVVGDAFMSMAAEVGVPWVAVWTGGPCALLAHIVGDAIREDIGDDDDLHGARGDELLTSYPGLGSYRVRDLPFGGGGVGGDMHRVMTMLLGRVARRLPRAATAVAINAFPGLFPPDVSAALADALPNCLPIGPYHLLPGAAATQANDDDPHGCLAWLARRPAGSVAYVSFGTVAAPPPDELRELAAGLEASGAPFLWSLREDSWPLLPPEFLDRATKAGDSAAGLVVAWTPQAAVLRHPAVGAFVTHSGWGAVLEAMSGGVPMACRPFFGDQHMNARAVARLWCFGMAFDNDNDGGGKPSMMTRGRVAEAVASLLAGEEEGARMMRARARELQAMVVSAFEPDGGSTKNLHKFVEIVCARRV

SEQ ID NO: 2171 - protein, 477 aa, Oryza sativa subsp. japonica
  misc_feature (22)..(476): Pfam Name: UDPGT Pfam Description: UDP-glucoronosyl and UDP-glucosyl transferas
  misc_feature: Public GI ID no. 115470585
  misc_feature: Bit score of 789.6 for HMM based on sequences of Figure 33
  misc_feature: Functional Homolog Of SEQ ID NO. 2146
MPSSPSHPHVAVVAFPFSSHAPKLLAVARALATAAPSATFSFLSTADSLARLPATAVVPAGNNNLRFVEVPTDGDQEETWPVWRRMEMFVEAAEGGGLRRAMEAAGDAAGGVAVSCVVGDAFMSMAAEVGVPWVAVWTGGPCALLAHIVGDAIREDIGDDDDLHGARGDELLTSYPGLGSYRVRDLPFGGGGVGGDMHRVMTMLLGRVARRLPRAATAVAINAFPGLFPPDVSAALADALPNCLPIGPYHLLPGAAATQANDDDPHGCLAWLARRPAGSVAYVSFGTVAAPPPDELRELAAGLEASGAPFLWSLREDSWPLLPPEFLDRATKAGDSAAGLVVAWTPQAAVLRHPAVGAFVTHSGWGAVLEAMSGGVPMACRPFFGDQHMNARAVARLWCFGMAFDDDNDGGGKPSMMTRGRVAEAVASLLAGEEEGARMMRARARELQAMVVSAFEPDGGSTKNLHKFVEIVCARRV

SEQ ID NO: 2172 - protein, 353 aa, Oryza sativa subsp. indica
  misc_feature (2)..(353): Pfam Name: UDPGT Pfam Description: UDP-glucoronosyl and UDP-glucosyl transferas
  misc_feature: Public GI ID no. 125554377
  misc_feature: Bit score of 719.9 for HMM based on sequences of Figure 33
  misc_feature: Functional Homolog Of SEQ ID NO. 2146
MAHVAVVTFPFSSHAAVLLSFARALAAASPASTFSFLSTAASFAHLRKTAAAGDLLPGNMSRADELLTSHPGLESYRIRDLPDGVVSGDLNYVINLLLHRMAQRLPRAATAVALNTFPGLDPPTVTAALTAVLPTCLPLGPYHLLATAPANDDDPNGCLAWLDRQAPRTVAYVSFGTVASPRPDELRELAAGLEASGAPFLWSLREDSWPLLPPGFLERTKQHAAAGLVVPWAPQVGVLRHASVGAFVTHAGWASVMEGASSGVPMACRPFFGDQRTNARSVSHVWGFGTAFDGAMTRGGVATAVASLVGGEDGRRMRARAQELQAKVASAFVEPDGSCRKNFAKFVEIICAS

SEQ ID NO: 2173 - protein, 456 aa, Vitis labrusca x Vitis vinifera
  misc_feature (22)..(454): Pfam Name: UDPGT Pfam Description: UDP-glucoronosyl and UDP-glucosyl transferas
  misc_feature: Public GI ID no. 13620855
  misc_feature: Bit score of 916.1 for HMM based on sequences of Figure 33
  misc_feature: Functional Homolog Of SEQ ID NO. 2146
MSQTTTNPHVAVLAFPFSTHAAPLLAVVRRLAAAAPHAVFSFFSTSESNASISHDSMHTMQCNIKSYDVSDGVPEGYVFAGRPQEDIELFMRAAPESFRQGMVMAVAETGRPVSCLVADAFIWFAADMAAEMGVAWLPFWTAGPNSLSTHVYTDEIREKIGVSGIQGREDELLNFIPGMYEVRFRDLQEGIVFGNLNSLFSRMLHRMGQVLPKATAVFINSFEELDDSLTNDLKSKLKTYLNIGPFNLITPPPVVPNTTGCLQWLKERKPTSVVYISFGTVTTPPPAELVALAEALEASRVPFIWSLRDKARVHLPEGFLEKTRGYGMVVPWAPQAEVLAHEAVGAFVTHCGWNSLWESVAGGVPLICRPFFGDQRLNGRMVEDVLEIGVRIEGGVFTKSGLMSCFDQILSQEKGKKLRENLRALRETADRAVGPKGSSTENFKTLVDLVSKPKDV

SEQ ID NO: 2174 - protein, 456 aa, Vitis vinifera
  misc_feature (8)..(454): Pfam Name: UDPGT Pfam Description: UDP-glucoronosyl and UDP-glucosyl transferas
  misc_feature: Public GI ID no. 13620861
  misc_feature: Bit score of 917.1 for HMM based on sequences of Figure 33
  misc_feature: Functional Homolog Of SEQ ID NO. 2146
MSQTTTNPHVAVLAFPFSTHAAPLLAVVRRLAAAAPHAVFSFFSTSQSNASIFHDSMHTMQCNIKSYDVSDGVPEGYVFAGRPQEDIELFMRAAPESFRQGMVMAVAETGRPVSCLVADAFIWFAADMAAEMGVAWLPFWTAGPNSLSTHVYTDEIREKIGVSGIQGREDELLNFIPGMSKVRFRDLQEGIVFGNLNSLFSRMLHRMGQVLPKATAVFINSFEELDDSLTNDLKSKLKTYLNIGPFNLITPPPVIPNTTGCLQWLKERKPTSVVYISFGTVTTPPPAELVALAEALEASRVPFIWSLRDKARVHLPEGFLEKTRGYGMVVPWAPQAEVLAHEAVGAFVTHCGWNSLWESVAGGVPLICRPFFGDQRLNGRMVEDALEIGVRIEGGVFTKSGLMSCFDQILSQEKGKKLRENLRALRETADRAVGPKGSSTENFKTLVDLVSKPKDV

SEQ ID NO: 2175 - protein, 456 aa, Vitis vinifera
  misc_feature (8)..(454): Pfam Name: UDPGT Pfam Description: UDP-glucoronosyl and UDP-glucosyl transferas
  misc_feature: Public GI ID no. 13620869
  misc_feature: Bit score of 911.9 for HMM based on sequences of Figure 33
  misc_feature: Functional Homolog Of SEQ ID NO. 2146
MSQTTTNPHVAVLAFPFSTHAAPLLAVVRRLAAAAPHAVFSFFSTSQSNASIFHDSMHTMQCNIKSYDISDGVPEGYVFAGRPQEDIELFMRAAPESFRQGMVMAVAETGRPVSCLVADAFIWFAADMAAEMGVAWLPFWTAGPNSLSTHVYTDEIREKIGVSGIQGREDELLNFIPGMSKVRFRDLQEGIVFGNLNSLFSRMLHRMGQVLPKATAVFINSFEELDDSLTNDLKSKLKTYLNIGPFNLITPPPVVPNTTGCLQWLKERKPTSVVYISFGTVTTPPPAELVALAEALEASRVPFIWSLRDKASVHLPEGFLEKTRGYGMVVPWAPQAEVLAHEAVGAFVTHCGWNSLWESVAGGVPLICRPFFGDQRLNGRMVEDALEIGVRIEGGVFTENGLMSCFDQILSQEKGKKLRENLRALRETADRAVGPKGSSTENFKTLVDLVSKPKDV

SEQ ID NO: 2176 - protein, 456 aa, Vitis labrusca
  misc_feature (8)..(454): Pfam Name: UDPGT Pfam Description: UDP-glucoronosyl and UDP-glucosyl transferas
  misc_feature: Public GI ID no. 149350038
  misc_feature: Bit score of 906.0 for HMM based on sequences of Figure 33
  misc_feature: Functional Homolog Of SEQ ID NO. 2146
MSQTTTNPHVAVLAFPFSTHAAPLLAVVRRLAVAAPHAVFSFFSTSESNASIFHDSMHTMQCNIKSYDVSDGVPEGYVFTGRPQEGIDLFMRAAPESFRQGMVMAVAETGRPVSCLVADAFIWFAADMAAEMGVAWLPFWTAGPNSLSTHVYIDEIREKIGVSGIQGREDELLNFIPGMSKVRFRDLQEGIVFGNLNSLFSRLLHRMGQVLPKATAVFINSFEELDDSLTNDLKSKLKTYLNIGPFNLITPPPVVPNTTGCLQWLKERKPTSVVYISFGTVTTPPPAELVALAEALEASRVPFIWSLRDKARMHLPEGFLEKTRGHGMVVPWAPQAEVLAHEAVGAFVTHCGWNSLWESVAGGVPLICRPFFGDQRLNGRMVEDVLEIGVRIEGGVFTKSGLMSCFDQILSQEKGKKLRENLRALRETADRAVGPKGSSTENFKTLVDLVSKPKDV

SEQ ID NO: 2177 - protein, 456 aa, Vitis labrusca x Vitis vinifera
  misc_feature (8)..(454): Pfam Name: UDPGT Pfam Description: UDP-glucoronosyl and UDP-glucosyl transferas
  misc_feature: Public GI ID no. 13620857
  misc_feature: Bit score of 894.3 for HMM based on sequences of Figure 33
  misc_feature: Functional Homolog Of SEQ ID NO. 2146
MSHTATNPHVAVLAFPFSTHAAPLLAVVRRLAAAAPHAVFSFFSTSQSNASIFHDSMHTMQCNIKSYDVSDGVPEGYVFAGRPQEDIELFMRAAPESFRQGMVMAVAETGRPVSCLVADAFIWFAADMAAEMGVAWLPFWTAGPNSLSTHVYIDEIREKIGVSGIQGREDELLNFIPGMSKVRFRDLQEGIVFGNLNSLFSRMPHRMGQVLPKATAVFINSFEELDDSLTNDLKSKLKTYLNIGPFNLITPPPVVPNTTGCLQWLKERKPTSVVYISFGTVTTPPPAEVVALAEALEASRVPFIWSLRDKARVHLPEGFLEKTRGHGMVVPWAPQAEVLAHEAVGAFVTHCGWNSLWESVAGGVPLICRPFFGDQRLNGRMVEDVLEIGVRIEGGVFTKSGLMSCFDQILSQEKGKKLRENLRALRETADRAAGPKGSSTENFKTLVDFVSKPKDV

SEQ ID NO: 2178 - protein, 452 aa, Aralia cordata
  misc_feature (11)..(451): Pfam Name: UDPGT Pfam Description: UDP-glucoronosyl and UDP-glucosyl transferas
  misc_feature: Public GI ID no. 40645337
  misc_feature: Bit score of 829.3 for HMM based on sequences of Figure 33
  misc_feature: Functional Homolog Of SEQ ID NO. 2146
MGSSAEPHVGVLAFPFATHAGLLLGLVRRLAAAAPNVNFSFYSTAASNRSLFSYPNSPYSNVIPYDVSDGVPEGYVFSGKPQEDINLFLTVASDEFKRGLEKAAVDSGRKITCLVADAFLWFSGDLAEQIRVPWVPLWTSGACSLSIHVYTDLIRQTVGLGGIEGRMDEILTFIPGFSELRLGDLPGGVLFGNLESPFSIMLHKMGQTLPRAAAVPINSFEELDPDLMKDIKSKFKKILNVGPFNLTSPPPSSNSDEHGCIPWLDNQNPKSVAYIAFGTVATPPPNELVSLAEALEESGTPFLWSLKDNFKNHLPKGFLERNSKSGKIVAWAPQIQVLSHDAVGVVITHGGWNSVVESIAAGVPVICRPFFGDHHINTWMVENVWKIGVRIEGGVFTRTGTMNALEQVLLSQEKGKKLKEQITVFKELALKAVGPNGSSTQNFKRLLEVITT

SEQ ID NO: 2179 - protein, 457 aa, Lobelia erinus
  misc_feature (23)..(453): Pfam Name: UDPGT Pfam Description: UDP-glucoronosyl and UDP-glucosyl transferas
  misc_feature: Public GI ID no. 133874214
  misc_feature: Bit score of 796.0 for HMM based on sequences of Figure 33
  misc_feature: Functional Homolog Of SEQ ID NO. 2146
MPVVTAPERHVAVFAFPIASHPGLLLSLVRRLATAAPTVTFSFFNTAKSNRSLFSVPTPHNIKPYDVSDGIPVGYVFAGKPQEDINLFLAVAEDEFRRSLQVAEGETGKGISCLVADAFLWFSSEMAEKRRVPWVPLWTSGASSLSIHFYTDLIRQTVGLNGIEGRKDEMLDFIPGFSAVRLGDLPGGVLSGNLESPFSIMLYKMGQCLTKATAIPINSFQEMDPEINKDLNKHFSNFLNIGPFNLISPTTPLNTDEFACIPWLDKHLPQSVAYIGFGTVATPPPHELVALAEALEESGTPFLWSINENSKKHLPEGFLERTGENGKLVPWAPQVQVLAHGSVGVFITHGGWNSVVESIGAGVPLIMRPFFGEQQLNTWMVENVWRIGVRVKGGVFTRSGTVQALEEVLLHQKGKKLKEQVVVFKELAHKAVGPSGSSTENFKTLIEIITNMEQSAT

SEQ ID NO: 2180 - DNA, 1365 bp, Populus balsamifera subsp. trichocarpa
  misc_feature: Ceres Annot ID no. 1486671
  misc_feature: Encodes the peptide sequence at SEQ ID NO. 2181
atgcctcaaaccgccgccggccctgatcatgttgcagtccttgccttccctttctcctcccatgccgctccgttactagccatcatccaccgcctcgccacttcctccccaaacacacacttctccttcttcagcacccaacagtccaacaactccatcttctccatttacaagcaaaacaggaacatcaaagcatatgacgtgtgggatggtgtccctgagggctacgtgtttgctgggaagcctcaagagcacattgagctgttcatgaagtcagctcctaatagcttcaagaaggccatggaggtagctgtatcagagacagggagaaaggtgagttgtttggtgagtgatgccttcttttggttcgctggtgagatggcggaggagataggggtggtttggctgcccttttggactgcaggacctacctcactttctgctcatgtttacactgatctcatcagggatacttttggagttggaggtgtggcagggcatgaagatgaactgctaagtttgattccaggaatgtccaaaattcgaatccgtgatttgccagaaggggtactcttcggaaacttggaagcggtctttccaaacatgctgcataaaatgggaagagcgttgccgaaagcagctgcagtgttcattaactcatttgaagagctagaccctaggataacaagggacttgaagtctagattcaaagaattcctcaacattggacccttcaatatgatttcaccagcaccaccagcggcagacacatatggttgtataacatggcttgacaggcaaaaacttgcttctgtggcatatcttagctttggatccatcacaacaccaccaccacatgaacttgtggcactagctgaggccttagagacaagtggggtgccatttatatggtcactgaaggacaactcgaaggttcatttgcccaatggattcttggacagaaccacatcacagggacttctggtaccatggactcctcaaatggaagtcttggctcacaaagcagtaggggtgtttataactcactgtggatggaattcattgcttgagagcatagcaggaggggtgcccatgatttgtaggccattttttggcgatcaaaggctcaatggacgcatggtagaggatgcgtggaagattggtctccaggttgaggatggagtctttagaaagcatggagtgttaaatagcttggataaagttctttcacaagactcgggggaggaaatgagggagaacataagagcacttcaacaactcgcaaagaaagccattggaccaaatgggagctccatcaataattttgtttctttgtcagatctagtgttcaatactaaaatatag

SEQ ID NO: 2181 - protein, 454 aa, Populus balsamifera subsp. trichocarpa
  misc_feature (9)..(453): Pfam Name: UDPGT Pfam Description: UDP-glucoronosyl and UDP-glucosyl transferas
  misc_feature: Ceres Annot ID no. 1486671
  misc_feature: Bit score of 906.3 for HMM based on sequences of Figure 33
  misc_feature: Functional Homolog Of SEQ ID NO. 2146
MPQTAAGPDHVAVLAFPFSSHAAPLLAIIHRLATSSPNTHFSFFSTQQSNNSIFSIYKQNRNIKAYDVWDGVPEGYVFAGKPQEHIELFMKSAPNSFKKAMEVAVSETGRKVSCLVSDAFFWFAGEMAEEIGVVWLPFWTAGPTSLSAHVYTDLIRDTFGVGGVAGHEDELLSLIPGMSKIRIRDLPEGVLFGNLEAVFPNMLHKMGRALPKAAAVFINSFEELDPRITRDLKSRFKEFLNIGPFNMISPAPPAADTYGCITWLDRQKLASVAYLSFGSITTPPPHELVALAEALETSGVPFIWSLKDNSKVHLPNGFLDRTTSQGLLVPWTPQMEVLAHKAVGVFITHCGWNSLLESIAGGVPMICRPFFGDQRLNGRMVEDAWKIGLQVEDGVFRKHGVLNSLDKVLSQDSGEEMRENIRALQQLAKKAIGPNGSSINNFVSLSDLVFNTKI

SEQ ID NO: 2182 - DNA, 1509 bp, Gossypium hirsutum
  misc_feature: Ceres Clone ID no. 1851632
  misc_feature: Encodes the peptide sequence at SEQ ID NO. 2183
aagctcaacctttcccgcgcagcagtgatgtcacagcttgttgatccccatgttgctgttctcgcattccctcacggcacccacgctgctccactcctcgccatcatcgaccggctagcctcggcgtccccaaagaccttgttttccttcttcggcactgcacaatccaacaactctatcttcttctccacatcccaaccaactccaccgaacgttaaagcttataacgtagacgatggagtacccggaggctatgttttcgtggggaagcctcaggaggacatcgagttgttcatggaagttgcaccccagaatttgaggaaggcaatggaactggcagtggaagagagtgggaggaaagtgagctgcttggttgctgatgctttcttttggtttgccaagcagatagcggtggagaatggtgtgccttgggtatctttttggactgcaggggcttgctccctctcttcccatgtttatactgatttaataagggaaaaatttggtgttggaggcatcgttgggcgagaagatgaaaccctcaacttcattcctgggatgtctaaagtacgaatccgtgacttgcctgaaggaattgtccttggaaacttggaatcattcttctcgcgcatgctgcatcgaatgggccaagttctaccagaggcaactgcagtcttcctaaactcttgtgaagaactagaccctgataggacaactgatttgaaatccaagttcaagcaatacctgaatgttggaccgttcatccttgcaacaccaccaccatccgttccagatccatatggttgcctaacatggctcgacaagcaaaaacctgcaaccgtggtgtatatcagctttggatcagttgtgaccccacctccaaatgaacttgttgcactagcagaagcagtagaggctagccaggttccttttatatggtctcttagagataaatcaaaggtacatctgcccaatgggttcctagaaagggcaaatggtatggtagttccatgggctccccagagagacgtgctagcccatggtgctgttggggtgttcataactcatggcggttggaactcactagtagagagcatagcaggtggggtgccaatgattttcaggccgttttttggggatcacggggtgaatggaagaatggtggaggatgtatgggagattggtgtgattgttgagagtggggttttgacgaagaatggaataatgaggggcttggatctaattttggcacaagaaaaagggaagaaaatgagagaaaatttgaaggaagttgttgcacttgcacaaatatcagttggagcaaacggaagctccactaaaaatttcaagaaattgttggatttggtatgtagccaaaatcatgcctagatttgattttcgaccatatttttagttttcgttagtgtggaatcatgaggtttatgtttaaattaataatgtctttcttatgtattaaataaatgacaaatttcagttgctagtattagt

SEQ ID NO: 2183 - protein, 453 aa, Gossypium hirsutum
  misc_feature (9)..(451): Pfam Name: UDPGT Pfam Description: UDP-glucoronosyl and UDP-glucosyl transferas
  misc_feature: Ceres Clone ID no. 1851632
  misc_feature: Bit score of 868.3 for HMM based on sequences of Figure 33
  misc_feature: Functional Homolog Of SEQ ID NO. 2146
MSQLVDPHVAVLAFPHGTHAAPLLAIIDRLASASPKTLFSFFGTAQSNNSIFFSTSQPTPPNVKAYNVDDGVPGGYVFVGKPQEDIELFMEVAPQNLRKAMELAVEESGRKVSCLVADAFFWFAKQIAVENGVPWVSFWTAGACSLSSHVYTDLIREKFGVGGIVGREDETLNFIPGMSKVRIRDLPEGIVLGNLESFFSRMLHRMGQVLPEATAVFLNSCEELDPDRTTDLKSKFKQYLNVGPFILATPPPSVPDPYGCLTWLDKQKPATVVYISFGSVVTPPPNELVALAEAVEASQVPFIWSLRDKSKVHLPNGFLERANGMVVPWAPQRDVLAHGAVGVFITHGGWNSLVESIAGGVPMIFRPFFGDHGVNGRMVEDVWEIGVIVESGVLTKNGIMRGLDLILAQEKGKKMRENLKEVVALAQISVGANGSSTKNFKKLLDLVCSQNHA

SEQ ID NO: 2184 - protein, 457 aa, Lobelia erinus
  misc_feature (11)..(453): Pfam Name: UDPGT Pfam Description: UDP-glucoronosyl and UDP-glucosyl transferas
  misc_feature: Public GI ID no. 133874216
  misc_feature: Bit score of 785.1 for HMM based on sequences of Figure 33
  misc_feature: Functional Homolog Of SEQ ID NO. 2146
MPVVTAPERHVAVFAFPIASHPGLLLSLVRRLATAAPTVTFSFFNIAKSNRSLFSVPTPHNIKPYDVSDGIPEGYVFAGKPQEDINLFLAVAEDEFRRSLQVAEAEIGKGISCLVADAFHWFSSEMAEKRRVPWVPLWTSGASSLSIHFYTDLIRQTVGLNGIEGRKDEMLDFIPGFSAVRLGDLPGGVLSGNLESPFSIMLYKMGQCLTKATAIPINSFQEMDPEINKDLNKHFSNFLNIGPFNLISPTTPLNTDEFACIPWLDKHLPQSVAYIGFGTVATPPPHELVALAEALEESGTPFLWSINENSKKHLPEGFLERTGENGKLVPWAPQVQVLAHGSVGVFITHGGWNSVVESIGAGVPLIMRPFFGEQQLNTWMVENVWRIGVRVKGGVFTRSGTVQALEEVLLHQKGKKLKEQVVVFKELAHKAVGPSGSSTENFKTLIEIITNMEQSAT

SEQ ID NO: 2185 - DNA, 1356 bp, Populus balsamifera subsp. trichocarpa
  misc_feature: Ceres Annot ID no. 1540082
  misc_feature: Encodes the peptide sequence at SEQ ID NO. 2186
atgcctcaaaccgccgccggccctgatcatgttgcagtccttgccttccctttctcctcccatgccgctccgttactagccatcatccaccgcctcgccacttcctccccaaacacacacttctccttcttcagcacccaacagtccaacaactccatcttctccatttacaagcaaaacaggaacatcaaagcatatgacgtgtgggatggtgtccctgagggctacgtgtttgctgggaagcctcaagagcacattgagctgttcatgaagtcagctcctaatagcttcaagaaggccatggaggtagctgtatcagagacagggagaaaggtgagttgtttggtgagtgatgccttcttttggttcgctggtgagatggcggaggagataggggtggtttggctgcccttttggactgcaggacctacctcactttctgctcatgtttacactgatctcatcagggatacttttggagttggagggcatgaagatgaactgctaagtttgattccaggaatgtccaaaattcgaatccgtgatttgccagaaggggtactcttcggaaacttggaagcggtctttccaaacatgctgcataaaatgggaagagcgttgccgaaagcagctgcagtgttcattaactcatttgaagagctagaccctaggataacaagggacttgaagtctagattcaaagaattcctcaacattggacccttcaatatgatttcaccagcaccaccagcggcagacacatatggttgtataacatggcttgacaggcaaaaacttgcttctgtggcatatcttagctttggatccatcacaacaccaccaccacatgaacttgtggcactagctgaggccttagagacaagtggggtgccatttatatggtcactgaaggacaactcgaaggttcatttgcccaatggattcttggacagaaccacatcacagggacttctggtaccatggactcctcaaatggaagtcttggctcacaaagcagtaggggtgtttataactcactgtggatggaattcattgcttgagagcatagcaggaggggtgcccatgatttgtaggccattttttggcgatcaaaggctcaatggacgcatggtagaggatgcgtggaagattggtctccaggttgaggatggagtctttagaaagcatggagtgttaaatagcttggataaagttctttcacaagactcgggggaggaaatgagggagaacataagagcacttcaacaactcgcaaagaaagccattggaccaaatgggagctccatcaataattttgtttctttgtcagatctagtgttcaatactaaaatatag

SEQ ID NO: 2186 - protein, 451 aa, Populus balsamifera subsp. trichocarpa
  misc_feature (9)..(450): Pfam Name: UDPGT Pfam Description: UDP-glucoronosyl and UDP-glucosyl transferas
  misc_feature: Ceres Annot ID no. 1540082
  misc_feature: Bit score of 900.6 for HMM based on sequences of Figure 33
  misc_feature: Functional Homolog Of SEQ ID NO. 2146
MPQTAAGPDHVAVLAFPFSSHAAPLLAIIHRLATSSPNTHFSFFSTQQSNNSIFSIYKQNRNIKAYDVWDGVPEGYVFAGKPQEHIELFMKSAPNSFKKAMEVAVSETGRKVSCLVSDAFFWFAGEMAEEIGVVWLPFWTAGPTSLSAHVYTDLIRDTFGVGGHEDELLSLIPGMSKIRIRDLPEGVLFGNLEAVFPNMLHKMGRALPKAAAVFINSFEELDPRITRDLKSRFKEFLNIGPFNMISPAPPAADTYGCITWLDRQKLASVAYLSFGSITTPPPHELVALAEALETSGVPFIWSLKDNSKVHLPNGFLDRTTSQGLLVPWTPQMEVLAHKAVGVFITHCGWNSLLESIAGGVPMICRPFFGDQRLNGRMVEDAWKIGLQVEDGVFRKHGVLNSLDKVLSQDSGEEMRENIRALQQLAKKAIGPNGSSINNFVSLSDLVFNTKI

SEQ ID NO: 2187 - protein, 463 aa, Fragaria x ananassa
  misc_feature (22)..(463): Pfam Name: UDPGT Pfam Description: UDP-glucoronosyl and UDP-glucosyl transferas
  misc_feature: Public GI ID no. 51872677
  misc_feature: Bit score of 841.6 for HMM based on sequences of Figure 33
  misc_feature: Functional Homolog Of SEQ ID NO. 2146
MASNQAGGHVAVLAFPFSTHAAPLLNIVCRLAAAAPSTLFSFFNTKQSNSSILASDTSVLRYTNVCVCEVADGVPEGYVFVGKPQEDIELFMKAAPDNFRKCLEASVAESGREVSCLVTDAFFWFGAHMADDMGGVPWVPFWTAGPASLSAHVHTDLIRNTTSGDCHDEKETITVIAGMSKVRPQDLPEGIIFGNLESLFSRMLHQMGLMLPLATAVFINSFEELDPVITNDLKSKFKRFLNVGPLDLLEPTASAATTTPQTAEAVAGDGCLSWLDKQKAASVVYVSFGSVTRPSPEELMALAEALEASRVPFLWSLRDNLKNPQLDEFLSKGKLNGMVVPWAPQPQVLAHGSVGAFVTHCGWNSVLESVAGGVPLICRPFFGDQKLNARMVEDVWKIGLRLEGGVFTKNGMLKSLDMLLSQDKGTKMKNKIHTLKQLAQQAVEPKGSSTRNFESLLEMATTN

SEQ ID NO: 2188 - protein, 445 aa, Vitis vinifera
  misc_feature (7)..(445): Pfam Name: UDPGT Pfam Description: UDP-glucoronosyl and UDP-glucosyl transferas
  misc_feature: Public GI ID no. 157343279
  misc_feature: Bit score of 859.7 for HMM based on sequences of Figure 33
  misc_feature: Functional Homolog Of SEQ ID NO. 2146
MGKHIGVLAFPFASHPLTLLGLVRRLASAAPDAKFSFFSTANSNSFLFSARSPGGVLGNLKPYDVPDGVPVGHVLSGNPAEGDGLFLKEAPANFKRAMEVAVAETGRKISCLVTDALLWFAADMAEEMGVPWVPLWIAGLSALSAHLHTDVIRQMMGVRGHEDQTLNFIPGLSAMTFQDLPGEIASGNLDSTPSLILHKMGLTLPRATAIVANSFEELDPVVATHLKSKLPKLLCVAPSALTSSPDELNSDVNGCLSWLDKQKAKSVAYISFGSMLAPSPDEHVALAETLQATGVAFLWSIKDNLKKYLPEGFLERTSGNGKVVPWAPQIRVLAHPSVGVHITHGGWNSVMESIAGEVPMICRPFWADNTLNSRAIEDVWGIGVGVPGGVLTKNGLKAALEQVLGQQGRMTEKIGVLKKLWTRATEPNGSSTQNFRTLSKMVTNE

SEQ ID NO: 2189 - DNA, 1180 bp, Panicum virgatum
  misc_feature: Ceres Clone ID no. 1955550
  misc_feature: Encodes the peptide sequence at SEQ ID NO. 2190
atcccaacaatccactcgatcagtgacaacctcctcaaccgagctcccagcacttcgcgaactctcgctagctagagctgctgctgcctgcaacgatcagctgagaagaagatgaggtcgttggcggtcgccgtcgcggcgatggcctgcctggcggcggtggcgcgggccggcaacttctaccaggacacggagatgacctggggcggcgggcgcggcaaggtcgtggacggcgggcgcgggctcgacctcacgctggaccgcacctccggctccgggttccagtccaagagcgagtacctcttcggcaagatcgacatgcagatcaagctggtccccggcaactccgccggcaccgtcaccaccttctacctctcgtcgcaggggagcacccacgacgagatcgacttcgagttcctgggcaacgtcaccggcgagccctacacgctgcacaccaacgtgttcacgcaggggcagggccagcgcgagcagcagttccgcctctggttcgaccccaccacggcctaccacacctactccatcgtctggaacccgcagcacatcatcttcgcggtggacggcaccccgatccgtgacttcaagaaccacgaggcgcacggcgtggcgttccccaagagccagccgatgcggctgtacgcgagcctgtggaacgccgacgactgggcgacgcagggcgggcgcgtgaaggcggactggtcccacgcgccgttcgtggcctccttccggggcttccgcgccgacgcctgcgtctggtccggcggccggcagcagtgccccgtgggcaccatggaggccgccgcccgcggctggtggagccagcagctgagcgacacgagctaccgccgcatgcgctgggtgcagaggaagttcatgatctacaactactgcaccgacgccaagcgcttcccgcagggcgtccccgccgagtgccacctccggtgagctgctagcggctgccgcagtgccgtgcacgcacgatggttcgtcgccgtcccaacccatcgcatcatggcgaagaataaggatcgtttttgcatgatggggccgggcgatgtacaatgtaaatgtagcagcagcgcgcgtatcgcattctttgatttgtttctgtaacaccagatgtacacctgtcatcaagtttctttcagcataatcttccgtc

SEQ ID NO: 2190 - protein, 283 aa, Panicum virgatum
  misc_feature (23)..(204): Pfam Name: Glyco_hydro_16 Pfam Description: Glycosyl hydrolases family 16
  misc_feature (228)..(280): Pfam Name: XET_C Pfam Description: Xyloglucan endo-transglycosylase (XET)
  misc_feature: Ceres Clone ID no. 1955550
  misc_feature: Bit score of 718.1 for HMM based on sequences of Figure 46
  misc_feature: Functional Homolog Of SEQ ID NO. 2190
  misc_feature: in Figure 46
MRSLAVAVAAMACLAAVARAGNFYQDTEMTWGGGRGKVVDGGRGLDLTLDRTSGSGFQSKSEYLFGKIDMQIKLVPGNSAGTVTTFYLSSQGSTHDEIDFEFLGNVTGEPYTLHTNVFTQGQGQREQQFRLWFDPTTAYHTYSIVWNPQHIIFAVDGTPIRDFKNHEAHGVAFPKSQPMRLYASLWNADDWATQGGRVKADWSHAPFVASFRGFRADACVWSGGRQQCPVGTMEAAARGWWSQQLSDTSYRRMRWVQRKFMIYNYCTDAKRFPQGVPAECHLR

SEQ ID NO: 2191 - DNA, 879 bp, Sorghum bicolor
  misc_feature: Ceres Annot ID no. 8744420
  misc_feature: Encodes the peptide sequence at SEQ ID NO. 2192
atgaggtcgaccgcgcttgttgcgttcgtggcggtggcgtgcctagcggccgtcgcacacggcggcaacttctacaaggacacggagatgacctgggggcaaggccgtggcaaggtggtggacggcgggcgcgggctggacctaaccctggacaggacctccggctccggcttccagtccaagtccgagtacctcttcggcaagatcgacatgcagatcaagctggtgccaggcaactcggccggcaccgtcaccaccttctacctctcctcgcaaggccccacccacgacgagatcgacttcgagttcctcggcaacgtctccggcgagccctacacgctgcacaccaacgtgttcaccggcggccagggccagcgcgagcagcagttccgcctctggttcgaccccaccaaggacttccacacctactccgtggtgtggaacccgcagcacgtgatcttcgccgtggacggcaccccgatccgcgacttcaagaaccatgaggcccgcggggtggggttcccgcggacgcagccgatgcggctgtacgcgagtctctggaacgccgacgactgggccacgcagggcggccgcgtcaaggcggactggacgcaggcgccgttcgtcgcgtcgttccgtgggttcagcgctgacgcgtgtgtgtgggcgaatgggaagcagcagtgccctgtgggaaccatggcggcggcggcgacggggggacggcgcggaggccctggcagctggtggaaccagcagcttagtgacatgagctaccgccgcatgcgctgggtgcagaggaagttcatgatctacaactactgcaccgacgccaagcggttcccgcagggggtgcccgccgagtgcaagctccggtga

SEQ ID NO: 2192 - protein, 292 aa, Sorghum bicolor
  misc_feature (24)..(205): Pfam Name: Glyco_hydro_16 Pfam Description: Glycosyl hydrolases family 16
  misc_feature (229)..(289): Pfam Name: XET_C Pfam Description: Xyloglucan endo-transglycosylase (XET)
  misc_feature: Ceres Annot ID no. 8744420
  misc_feature: Bit score of 713.5 for HMM based on sequences of Figure 46
  misc_feature: Functional Homolog Of SEQ ID NO. 2190
  misc_feature: in Figure 46
MRSTALVAFVAVACLAAVAHGGNFYKDTEMTWGQGRGKVVDGGRGLDLTLDRTSGSGFQSKSEYLFGKIDMQIKLVPGNSAGTVTTFYLSSQGPTHDEIDFEFLGNVSGEPYTLHTNVFTGGQGQREQQFRLWFDPTKDFHTYSVVWNPQHVIFAVDGTPIRDFKNHEARGVGFPRTQPMRLYASLWNADDWATQGGRVKADWTQAPFVASFRGFSADACVWANGKQQCPVGTMAAAATGGRRGGPGSWWNQQLSDMSYRRMRWVQRKFMIYNYCTDAKRFPQGVPAECKLR

SEQ ID NO: 2193 - DNA, 1267 bp, Zea mays
  misc_feature: Ceres Clone ID no. 331385
  misc_feature: Encodes the peptide sequence at SEQ ID NO. 2194
aagttccatatccaacacacacagcaacgctcgctcggcactgtcactagctagttgctctactagagggcgggtatagagctgcctgcaatccgccgctgagaagggaggatcggaagcgacgatgaggtcgtttgctcctgtctttctgtcggcggtcgtggcctggctggagctcgcgggcaccgcgcagggcggcaacttctaccaggacacagagatgacctggggcgatggccgcggcaaggtagtggacggcgggcgcgggctggacctgacgctggaccgcacgtccggctccgggttccagtccaagagcgagtacctgttcggcaagatcgacatgcagatcaagctggtgccaggcaactccgctggcacggtcaccaccttctacctgtcgtcccagggcgacgcgcacgacgagatcgacttcgagttcctgggcaacgtgagcggggagccctacacgctgcacaccaacgtgttcacgcgcggacagggccagcgggagcagcagttccgcctctggttcgaccctaccactgccttccacacctactccatcctgtggaacccgcagcacgtgatcttcgcggtggacggcaccccggtgcgggacttcaagaaccacgaggcgcgcggggtggcgttcccgaggatgcagcccatgaggctgtacgccagcctgtggaacgccgacgactgggccacgcagggcgggcgcgtcaaggcggactggtccaaggcccccttcgtcgcctccttccgcggtttcagcgccgacgcctgcgtctgggacggcggcaggcagcgctgccctgagggcaccatggaggccgccgccgtcgcgggtgccggctccggccgcggctggtggaaccagcagctcagcgacatgagctaccgccgcatgcgctgggtgcagcgcaagttcatgatctacaactactgcgccgacgccaagcgcttcccgcagggcgtgcccgccgagtgcaagctccggtgagggagcgaggtttgttgggacgtccgtggggcatcaaaaccaagcacgatccctagtcgtggaaagtagaaaccaggcatcgattcgatcgtcgtcgacggtcttagtagtagctacttatttcgcagtgggcgatgaaagaatggtgtcatgtaaatgtagctctagtcgtgtcgcattctttgatttgttgtttcagcagcaccggatgtacaagtattgagtttgggctagcaagaataagtaatctttttcggc

SEQ ID NO: 2194 - protein, 294 aa, Zea mays
  misc_feature (27)..(208): Pfam Name: Glyco_hydro_16 Pfam Description: Glycosyl hydrolases family 16
  misc_feature (232)..(291): Pfam Name: XET_C Pfam Description: Xyloglucan endo-transglycosylase (XET)
  misc_feature: Ceres Clone ID no. 331385
  misc_feature: Bit score of 707.4 for HMM based on sequences of Figure 46
  misc_feature: Functional Homolog Of SEQ ID NO. 2190
  misc_feature: in Figure 46
MRSFAPVFLSAVVAWLELAGTAQGGNFYQDTEMTWGDGRGKVVDGGRGLDLTLDRTSGSGFQSKSEYLFGKIDMQIKLVPGNSAGTVTTFYLSSQGDAHDEIDFEFLGNVSGEPYTLHTNVFTRGQGQREQQFRLWFDPTTAFHTYSILWNPQHVIFAVDGTPVRDFKNHEARGVAFPRMQPMRLYASLWNADDWATQGGRVKADWSKAPFVASFRGFSADACVWDGGRQRCPEGTMEAAAVAGAGSGRGWWNQQLSDMSYRRMRWVQRKFMIYNYCADAKRFPQGVPAECKLR

SEQ ID NO: 2195 - protein, 293 aa, Oryza sativa subsp. japonica
  misc_feature (23)..(204): Pfam Name: Glyco_hydro_16 Pfam Description: Glycosyl hydrolases family 16
  misc_feature (228)..(290): Pfam Name: XET_C Pfam Description: Xyloglucan endo-transglycosylase (XET)
  misc_feature: Public GI ID no. 115469712
  misc_feature: Bit score of 720.2 for HMM based on sequences of Figure 46
  misc_feature: Functional Homolog Of SEQ ID NO. 2190
  misc_feature: in Figure 46
MRTVALGIVAMACLVAIAHGGNFFQDAEVSWGQGRGKIVDGGRGLDLTLDRSSGSGFQSKSEYLFGKIDMQIKLVPGNSAGTVTTFYLSSQGSTHDEIDFEFLGNVTGEPYTLHTNVFTQGQGQREQQFRLWFDPTQSFHTYSIIWNPQHVIFAVDGTPIRDFKNHEARGVAFPKSQPMRVYASLWNADDWATQGGRVKADWSKAPFVASFRDFNADACVWSNGAQRCPVGTMETVAAPAGGRRGGAGGWWNQELSDMSYRRMRWVQRKFMIYNYCTDAKRFPQGTPAECKLR

SEQ ID NO: 2196 - protein, 286 aa, Hordeum vulgare subsp. vulgare
  misc_feature (23)..(204): Pfam Name: Glyco_hydro_16 Pfam Description: Glycosyl hydrolases family 16
  misc_feature (228)..(283): Pfam Name: XET_C Pfam Description: Xyloglucan endo-transglycosylase (XET)
  misc_feature: Public GI ID no. 1890577
  misc_feature: Bit score of 718.3 for HMM based on sequences of Figure 46
  misc_feature: Functional Homolog Of SEQ ID NO. 2190
  misc_feature: in Figure 46
MRTVELGIVAMACLVAVARAGNFFQDSEMSWGDGRGKVVDGGRGLDLTLDKTSGSGFQSKSEYLFGKIDMQIKLVPGNSAGTVTTFYLSSQGTAHDEIDFEFLGNVTGEPYTLHTNVFAQGQGQREQQFRLWFDPTKAFHTYSIIWNPQHVIFAVDGTAIRDFKNHEARGVSFPKSQPMRLYASLWNADDWATQGGRVKTDWSKAPFVASFRNFNADACVMSGGAQRCPAGTMEASAAGGGSWWNQELSGMGYRRMRWVQRKFMIYNYCTDPKRVAQGVPAECKLR

SEQ ID NO: 2197 - protein, 287 aa, Triticum aestivum
  misc_feature (23)..(204): Pfam Name: Glyco_hydro_16 Pfam Description: Glycosyl hydrolases family 16
  misc_feature (228)..(284): Pfam Name: XET_C Pfam Description: Xyloglucan endo-transglycosylase (XET)
  misc_feature: Public GI ID no. 51039064
  misc_feature: Bit score of 718.1 for HMM based on sequences of Figure 46
  misc_feature: Functional Homolog Of SEQ ID NO. 2190
  misc_feature: in Figure 46
MRTVAIGILAMACLVAVARGGNFFQDSEMTWGDGRGKVVDGGRGLDLTLDKTSGSGFQSKTEYLFGKIDMQIKLVPGNSAGTVTTFYLSSQGTAHDEIDFEFLGNVTGEPYTLHTNVFAKGQGQREQQFRLWFDPTKAFHTYSIIWNPQHVIFAVDGTAIRDFKNHEARGVSFPKSQPMRLYASLWNADDWATQGGRVKTDWSKAPFVASFRNFNADACVMSGGAQRCPAGTMEASAAGGSGSWWNQELSGMGYRRMRWVQRKFMIYNYCTDPKRVAQGVPAECKLR

SEQ ID NO: 2198 - protein, 291 aa, Festuca pratensis
  misc_feature (24)..(206): Pfam Name: Glyco_hydro_16 Pfam Description: Glycosyl hydrolases family 16
  misc_feature (230)..(284): Pfam Name: XET_C Pfam Description: Xyloglucan endo-transglycosylase (XET)
  misc_feature: Public GI ID no. 14330332
  misc_feature: Bit score of 682.8 for HMM based on sequences of Figure 46
  misc_feature: Functional Homolog Of SEQ ID NO. 2190
  misc_feature: in Figure 46
MARMAVSVLAILLASCAVAAAASFDKEFDITWGDGRGKILNNGQLLTLGLDKTSGSGFQSKREYLFGKIDMQLKLVAGQLPPAPSPPTTCRSMGATHDKIDFEFLGNVTGEPYTLHTNVFAKGQGKREQQFRLWFDPTKAFHTYSIVWNPQHVIFAVDGTPIRDFKNHEARGVSFPKNQPMRLYASLWNADDWATQGGRVKTDWSHAPFVASFRGFSADACVMSGGAQRCPAGTMDASGTGSSWWNQELGDMSYRRMRWVQRKFMIYNYCTDPKRVAEGLPAECKIRLRSK

SEQ ID NO: 2199 - protein, 287 aa, Vitis vinifera
  misc_feature (22)..(203): Pfam Name: Glyco_hydro_16 Pfam Description: Glycosyl hydrolases family 16
  misc_feature (227)..(281): Pfam Name: XET_C Pfam Description: Xyloglucan endo-transglycosylase (XET)
  misc_feature: Public GI ID no. 147854712
  misc_feature: Bit score of 709.0 for HMM based on sequences of Figure 46
  misc_feature: Functional Homolog Of SEQ ID NO. 2190
  misc_feature: in Figure 46
  misc_feature (14)..(14): Xaa is any aa, unknown, or other
MASSSILVLMLSMXVVASAGNFNQDFDITWGDGRAKILNNGQLLTLSLDKASGSGFQSRNEYLFGKIDMQLKLVPGNSAGTVTAYYLSSQGPTHDEIDFEFLGNLSGDPYILHTNVFSQGKGNREQQFYLWFDPTADFHTYSILWNPQRIIFSVDGTPIREFKNSESIGVSYPKNQPMRIYSSLWNADDWATRGGLVKTDWSQAPFTASYRNFNADACIWSSGASSCSSTTPSSTSTSGQWYSQELDSTSQERMKWVQKNYMIYNYCTDTKRFPQGLPPECTATTLS

SEQ ID NO: 2200 - protein, 297 aa, Vitis vinifera
  misc_feature (32)..(213): Pfam Name: Glyco_hydro_16 Pfam Description: Glycosyl hydrolases family 16
  misc_feature (237)..(291): Pfam Name: XET_C Pfam Description: Xyloglucan endo-transglycosylase (XET)
  misc_feature: Public GI ID no. 157352236
  misc_feature: Bit score of 698.9 for HMM based on sequences of Figure 46
  misc_feature: Functional Homolog Of SEQ ID NO. 2190
  misc_feature: in Figure 46
MAPICSSSSAVSTALLMSVVVSFLMAASAGNFYQDFDITWGDGRGKILNNGELLTLSLDKPSGSGFQSKNEYLFGKIDMQLKLVPGNSAGTVTAYYLSSQGPTHDEIDFEFLGNLSGDPYILHTNVFSQGKGNREQQFYLWFDPTADFHTYSILWNPQRIIFSVDGTPIREFKNSESIGVPYPKNQPMRIYSSLWNADDWATRGGLVKTDWSQAPFTASYRNFNANACLWSSGSSSCSSTSPSSTSTNGGWYSQELDSTSQERMKWVQKNYMIYNYCADTKRFPQGLPPECSATTMS

SEQ ID NO: 2201 - protein, 280 aa, Musa acuminata
  misc_feature (21)..(202): Pfam Name: Glyco_hydro_16 Pfam Description: Glycosyl hydrolases family 16
  misc_feature (226)..(277): Pfam Name: XET_C Pfam Description: Xyloglucan endo-transglycosylase (XET)
  misc_feature: Public GI ID no. 118722746
  misc_feature: Bit score of 692.2 for HMM based on sequences of Figure 46
  misc_feature: Functional Homolog Of SEQ ID NO. 2190
  misc_feature: in Figure 46
MAMRFLLVACSLVAIASAGNFYQEFDVTWGGDRAKNLDNGQLLTLSLDKASGSGFQSKNQYLFGKIDMQIKLVPGNSAGTVTAYYLSSQGPTHDEIDFEFLGNPSGDPYTLHTNVFTQGKGNREMQFKLWFDPTEDFHTYSILWNPRHVIFMVDGTPIRDFKNLESRGIAFPNSQPMRIYSSLWNADDWATRGGLVKTDWSKAPFTASYRNFKADTCVPSSATTECASNSVPSNGGWWNQELDSMGQQRMKWVQKNYMIYNYCSDLKRFSQGLPPECSIA

SEQ ID NO: 2202 - protein, 284 aa, Asparagus officinalis
  misc_feature (22)..(203): Pfam Name: Glyco_hydro_16 Pfam Description: Glycosyl hydrolases family 16
  misc_feature (227)..(281): Pfam Name: XET_C Pfam Description: Xyloglucan endo-transglycosylase (XET)
  misc_feature: Public GI ID no. 8886867
  misc_feature: Bit score of 703.8 for HMM based on sequences of Figure 46
  misc_feature: Functional Homolog Of SEQ ID NO. 2190
  misc_feature: in Figure 46
MASLLFAVLALSSVGIAVAGNFNDDFKITWGDGRGRIVDNGQLLSLSLDKASGSGFESTHEYLFGKIDMQLKLVPGNSAGTVTAYYLSSQGPTHDEIDFEFLGNLSGDPYTLHTNVFTQGKGNREQQFHLWFDPTKDFHTYSILWNPSHIIFSVDGIPIRDFKNMESRGVAFPKSQPMKIYSSLWNADDWATRGGLIKTDWTKAPFTASYRNFNANACVWSAGTSTCSSKKSPSASPSNAWLNEELDSTRQERMRWVQKNYMIYNYCADLKRFPQGLPPECSVA

SEQ ID NO: 2203 - protein, 287 aa, Cucumis melo
  misc_feature (27)..(208): Pfam Name: Glyco_hydro_16 Pfam Description: Glycosyl hydrolases family 16
  misc_feature (232)..(283): Pfam Name: XET_C Pfam Description: Xyloglucan endo-transglycosylase (XET)
  misc_feature: Public GI ID no. 115334952
  misc_feature: Bit score of 677.9 for HMM based on sequences of Figure 46
  misc_feature: Functional Homolog Of SEQ ID NO. 2190
  misc_feature: in Figure 46
MAPPPSFSSLLLFLSLLSVSSVFCSNFYNDFEITWGNDRAKILNNGDLLTLSLDRGSGSGFQSKNVYLYGKIDMQLKLVPGNSAGTVTTYYLKSQGSTWDEIDFEFLGNLSGDPYTLHTNVYTQGKGDREQQFHLWFDPTSDFHTYSILWNPQGIIFSVDGTPIRKFKNHESSGVLFPKKQPMRLYSSLWNADDWATRGGLVKTDWSKAPFTASYRNFNADVCVWSGGVSSCSSGGNVGGRGWLSENLDITRQQRMKWVQRNYMIYNYCTDAKRFPQGYPPECAIAP

SEQ ID NO: 2204 - DNA, 1176 bp, Panicum virgatum
  misc_feature: Ceres Clone ID no. 1789502
  misc_feature: Encodes the peptide sequence at SEQ ID NO. 2205
atcccaccaatctactcgatcagtgaccacctccgatcctcaaccgagctcccaacgcttccgtactctcgctagctagagcagctactgcctgcaacaatcagctgagaagaagaagatgaggtcgttggcggtcgccgtcgcggcgatggcctgcctggcggcggtggcgcgggccggcaacttctaccaggacacggagatgacctggggcggcgggcgcggcaaggtcgtggacggcgggcgcgggctcgacctcacgctggaccgcacctccggctccgggttccagtccaagagcgagtacctcttcggcaagatcgacatgcagatcaagctggtccccggcaactccgccggcaccgtcaccaccttctacctctcgtcgcaggggagcacccacgacgagatcgacttcgagttcctgggcaacgtcaccggcgagccctacacgctgcacaccaacgtgttcacgcgagggcagggccagcgcgagcagcagttccgcctctggttcgaccccaccacggcctaccacacctactccatcgtctggaacccgcagcacatcatcttcgcggtggacggcaccccgatccgtgacttcaagaaccacgaggcgcgcggcgtggcgttccccaagagccagccgatgcggctgtacgcgagcctgtggaacgccgacgactgggcgacgcagggcgggcgcgtgaaggcggactggtcccacgcgccgttcgtggcctccttccggggcttccgcgccgacgcctgcgtctggtccggcggccggcagcagtgccccgtgggcaccatggaggccgccgcccgcggctggtggagccagcagctgagcgacacgagctaccgccgcatgcgctgggtgcagaggaagttcatgatctacaactactgcaccgacgccaagcgcttcccgcagggcgtccccgccgagtgccacctccggtgagctgctagcggctgccgcagtgccgtgcacgcacgatggttcctcgccgtcccaacccatcgcatcatggagaagaataaggatcgtttttgcatgatggggccgggcgatgtacaatgtaaatgtagcagcagcgcgcgtatcgcattctttgatttgtttctgtaacaccagatgtgcacctgtcatcaagtttctttcagcat

SEQ ID NO: 2205 - protein, 283 aa, Panicum virgatum
  misc_feature (23)..(204): Pfam Name: Glyco_hydro_16 Pfam Description: Glycosyl hydrolases family 16
  misc_feature (228)..(280): Pfam Name: XET_C Pfam Description: Xyloglucan endo-transglycosylase (XET)
  misc_feature: Ceres Clone ID no. 1789502
  misc_feature: Bit score of 718.0 for HMM based on sequences of Figure 46
  misc_feature: Functional Homolog Of SEQ ID NO. 2190
MRSLAVAVAAMACLAAVARAGNFYQDTEMTWGGGRGKVVDGGRGLDLTLDRTSGSGFQSKSEYLFGKIDMQIKLVPGNSAGTVTTFYLSSQGSTHDEIDFEFLGNVTGEPYTLHTNVFTRGQGQREQQFRLWFDPTTAYHTYSIVWNPQHIIFAVDGTPIRDFKNHEARGVAFPKSQPMRLYASLWNADDWATQGGRVKADWSHAPFVASFRGFRADACVWSGGRQQCPVGTMEAAARGWWSQQLSDTSYRRMRWVQRKFMIYNYCTDAKRFPQGVPAECHLR

SEQ ID NO: 2206 - DNA, 1182 bp, Panicum virgatum
  misc_feature: Ceres Clone ID no. 1805428
  misc_feature: Encodes the peptide sequence at SEQ ID NO. 2207
atcccaccaatccactcgatcagtgaccacctccgatcctcaaccgagctcccaacgctcccgaactctcgctagctagagcagctgctgcctgcaacaatcagctgagaagaagatgaggtcgttcgcggtcgccgtcgcggcgatggcctgcctggcggcggtggcgcgggccggcaacttctaccaggacacggagatgacctggggcggcgggcgcggcaaggtcgtggacggcgggcgcgggctcgacctcacgctggaccgcacctccggctctgggttccagtccaagagcgagtacctcttcggcaagatcgacatgcagatcaagctggtccccggcaactccgccggcaccgtcaccaccttctacctctcgtcgcaggggagcacccacgacgagatcgacttcgagttcctgggcaacgtcaccggcgagccctacacgctgcacaccaacgtgttcacgcaggggcagggccagcgcgagcagcagttccgcctctggttcgaccccaccacggcctaccacacctactccatcgtctggaacccgcagcacatcatcttcgcggtggacggcaccccgatccgtgacttcaagaaccacgaggcgcacggcgtggcgttccccaagagccagccgatgcggctgtacgcgagcctgtggaacgccgacgactgggcgacgcagggcgggcgcgtgaaggcggactggtcccacgcgccgttcgtggcctccttccggggcttccgcgccgacgcctgcgtctggtccggcggccggcagcagtgccccgtgggcaccatggaggccgccgccgcgggcggcgggcgcggctggtggagccagcagctgagcgacacgagctaccgccgcatgcgctgggtgcagaggaagttcatgatctacaactactgcaccgacgccaagcgcttcccgcagggcgtccccgccgagtgccacctccggtgagctgctagcggggctgccgcagtgccgtgcacgcacgatggttcgtcgccgtcccaacccatcgcatcatggcgaagaataaggatcgtttttgcatgatggggccgggcgatgtacaatgtaaatgtagcagcagcgcgcgtatcgcattctttgatttgtttctgtaacaccagatgtgcacctgtcatcaagtttctttc

SEQ ID NO: 2207 - protein, 287 aa, Panicum virgatum
  misc_feature (23)..(204): Pfam Name: Glyco_hydro_16 Pfam Description: Glycosyl hydrolases family 16
  misc_feature (228)..(284): Pfam Name: XET_C Pfam Description: Xyloglucan endo-transglycosylase (XET)
  misc_feature: Ceres Clone ID no. 1805428
  misc_feature: Bit score of 720.7 for HMM based on sequences of Figure 46
  misc_feature: Functional Homolog Of SEQ ID NO. 2190
MRSFAVAVAAMACLAAVARAGNFYQDTEMTWGGGRGKVVDGGRGLDLTLDRTSGSGFQSKSEYLFGKIDMQIKLVPGNSAGTVTTFYLSSQGSTHDEIDFEFLGNVTGEPYTLHTNVFTQGQGQREQQFRLWFDPTTAYHTYSIVWNPQHIIFAVDGTPIRDFKNHEAHGVAFPKSQPMRLYASLWNADDWATQGGRVKADWSHAPFVASFRGFRADACVWSGGRQQCPVGTMEAAAAGGGRGWWSQQLSDTSYRRMRWVQRKFMIYNYCTDAKRFPQGVPAECHLR

SEQ ID NO: 2208 - DNA, 1196 bp, Panicum virgatum
  misc_feature: Ceres Clone ID no. 1724099
  misc_feature: Encodes the peptide sequence at SEQ ID NO. 2209
ccaacaatccactcgatcagtgacaacctcctcaaccgagctcccagcacttcgcgaactctcgctagctagagctgctgctgcctccaacgatcagctgagaagaagatgaggtcgttggcggtcgccgtcgcggcgatggcctgcctggcggcggtggcgcaggccggcaacttctaccaggacacggagatgacctggggcggcgggcgcggcaaggtcgtggacggcgggcgcgggctcgacctcacgctggaccgcacctccggctccgggttccagtccaagagcgagtacctcttcggcaagatcgacatgcagatcaagctggtccccggcaactccgccggcaccgtcaccaccttctacctctcgtcgcaggggagcacccacgacgagatcgacttcgagttcctgggcaacgtcaccggcgagccctacacgctgcacaccaacgtgttcacgcaggggcagggccagcgcgagcagcagttccgcctctggttcgaccccaccacggcctaccacacctactccatcgtctggaacccgcagcacatcatcttcgcggtggacggcaccccgatccgtgacttcaagaaccacgaggcgcgcggcgtggcgttccccaagagccagccgatgcggctgtacgcgagcctgtggaacgccgacgactgggcgacgcagggcgggcgcgtgaaggcggactggtcccacgcgccgttcgtggcctccttccggggcttccgcgccgacgcctgcgtctggtccggcggccggcagcagtgccccgtgggcaccatggaggccgccgccgcgggcggcgggcgcggctggtggagccagcagctgagcgacacgagctaccgccgcatgcgctgggtgcagaggaagttcatgatctacaactactgcaccgacgccaagcgcttcccgcagggcgtccccaccgagtgccacctccggtgagctgctagaggctgccgcagtgccgtgcacgcacgatggctcctcgccgtcccaacccatcgcatcatggagaagaataagggtcgtttttgcatgatggggccgggcgatgtacaatgtaaatggagcagcacgcgtatcgcattctttgatttgtttctgtaacaccagatgtgcacctgtcatcaagtttctttcagcataatcttccgtcagcgtcctcg

SEQ ID NO: 2209 - protein, 287 aa, Panicum virgatum
  misc_feature (23)..(204): Pfam Name: Glyco_hydro_16 Pfam Description: Glycosyl hydrolases family 16
  misc_feature (228)..(284): Pfam Name: XET_C Pfam Description: Xyloglucan endo-transglycosylase (XET)
  misc_feature: Ceres Clone ID no. 1724099
  misc_feature: Bit score of 720.7 for HMM based on sequences of Figure 46
  misc_feature: Functional Homolog Of SEQ ID NO. 2190
MRSLAVAVAAMACLAAVAQAGNFYQDTEMTWGGGRGKVVDGGRGLDLTLDRTSGSGFQSKSEYLFGKIDMQIKLVPGNSAGTVTTFYLSSQGSTHDEIDFEFLGNVTGEPYTLHTNVFTQGQGQREQQFRLWFDPTTAYHTYSIVWNPQHIIFAVDGTPIRDFKNHEARGVAFPKSQPMRLYASLWNADDWATQGGRVKADWSHAPFVASFRGFRADACVWSGGRQQCPVGTMEAAAAGGGRGWWSQQLSDTSYRRMRWVQRKFMIYNYCTDAKRFPQGVPTECHLR

SEQ ID NO: 2210 - DNA, 1257 bp, Panicum virgatum
  misc_feature: Ceres Clone ID no. 1724817
  misc_feature: Encodes the peptide sequence at SEQ ID NO. 2211
cattccaatcgcaccaatccactcgatcagtgaccaccacctcctcaccgagctcccaacaacacttggcaagctagacctccttcctgctgcctgcaatcagctgagaacgaagggaagaggatgaggtcgattgcgctcgccatcgcggcgatggcctgcctggcggcggtggcgcgggccggcaacttctaccaggacacggagatgacctggggcggcgggcgcggaaaggtcgtggacggcggccgcgggctcgacctgacgctggaccgcacctccggctccgggttccagtccaggagcgagtacctcttcggcaagatcgacatgcagatcaagctggtccccggcaactccgccggcaccgtcaccaccttctacctctcgtcgcaggggagcgcccacgacgagatcgacttcgagttcctgggcaacgtcaccggcgagccctacacgctgcacaccaacgtgttcacgcaggggcagggccaacgcgagcagcagttccgcctctggttcgaccccaccaccgcctaccacacctactccatcgtctggaacccgcagcacatcatcttcgcggtggacggcaccccgatccgcgacttcaagaaccacgaggcgcgcggcgtggcgttccccaagagccagccgatgcggctgtacgcgagcctgtggaacgccgacgactgggccacgcagggcgggcgcgtcaaggcggactggtcccacgcgccgttcgtggcctccttccggggcttccgcgccgacgcctgcgtgtggtccggcgggcggcagcagtgccccgtgggcaccatggaggccgccgccgcgggcggcggggggcgcggctggtggagccagcagctgagcgacatgagctaccgccgcatgcgctgggtgcagaggaagttcatgatctacaactactgcgccgacgccaaacgcttcccgcagggcgtccccgccgagtgccacctccggtgatgagcttgctagctgctgccgttgtgccgtgcacgcacgatgacgccttgtcgttccaacccaacccatccatccgtggcgaaaccagagatcgatcgtggagagaagaagatggtggcgaagaataaggatcgtttttggatgatggaggcgatgtaatgtactagtgtaaaggaaagggaatgtagctgcgcatatcgcattctttgatttgtttctgtaacaccagatgtacacctatcatcaagacgtttgtttcagcatact

SEQ ID NO: 2211 - protein, 288 aa, Panicum virgatum
  misc_feature (23)..(204): Pfam Name: Glyco_hydro_16 Pfam Description: Glycosyl hydrolases family 16
  misc_feature (228)..(285): Pfam Name: XET_C Pfam Description: Xyloglucan endo-transglycosylase (XET)
  misc_feature: Ceres Clone ID no. 1724817
  misc_feature: Bit score of 719.3 for HMM based on sequences of Figure 46
  misc_feature: Functional Homolog Of SEQ ID NO. 2190
MRSIALAIAAMACLAAVARAGNFYQDTEMTWGGGRGKVVDGGRGLDLTLDRTSGSGFQSRSEYLFGKIDMQIKLVPGNSAGTVTTFYLSSQGSAHDEIDFEFLGNVTGEPYTLHTNVFTQGQGQREQQFRLWFDPTTAYHTYSIVWNPQHIIFAVDGTPIRDFKNHEARGVAFPKSQPMRLYASLWNADDWATQGGRVKADWSHAPFVASFRGFRADACVWSGGRQQCPVGTMEAAAAGGGGRGWWSQQLSDMSYRRMRWVQRKFMIYNYCADAKRFPQGVPAECHLR

SEQ ID NO: 2212 - DNA, 1253 bp, Panicum virgatum
  misc_feature: Ceres Clone ID no. 1804995
  misc_feature: Encodes the peptide sequence at SEQ ID NO. 2213
accaatccactcgatcagtgaccaccacctcctcaccgagctcccaacaacacttggcaagctagacctccttcctgctgcctgcaatcagctgagaacgaagggaagaggatgaggtcgattgcgctcgccatcgcggcgatggcctgcctggcggcggtggcgcgggccggcaacttctaccaggacacggagatgacctggggcggcgggcgcggaaaggtcgtggacggcggccgcgggctcgacctgacgctggaccgcacctccggctccgggttccagtccaggagcgagtacctcttcggcaagatcgacatgcagatcaagctggtccccggcaactccgccggcaccgtcaccaccttctacctctcgtcgcaggggagcgcccacgacgagatcgacttcgagttcctgggcaacgtcaccggcgagccctacacgctgcacaccaacgtgttcacgcaggggcagggccaacgcgagcagcagttccgcctctggttcgaccccaccaccgcctaccacacctactccatcgtctggaacccgcagcacatcatcttcgcggtggacggcaccccgatccgcgacttcaagaaccacgaggcgcgcggcgtggcgttccccaagagccagccgatgcggctgtacgcgagcctgtggaacgccgacgactgggccacgcagggcgggtgcgtcaaggcggactggtcccacgcgccgttcgtggcctccttccggggcttccgcgccgacgcctgcgtgtggtccggcgggcggcagcagtgccccgtgggcaccatggaggccgccgccgcgggcggcggggggcgcggctggtggagccagcagctgagcgacatgagctaccgccgcatgcgctgggtgcagaggaagttcatgatctacaactagtgcgcggacgccaagcgcttcccgcagggcgtccccgccgagtgccacctccggtgatgagcttgctagctgctgccgttgtgccgtgcacgcacgatgacgccttgtcgttccaacccaacccatccatccgtggcgaaaccagagatcgatcgtggagagatgaagatggtggcgaagaataaggatcgtttttggatgatgggggggatgtaatgttactagtgtaaaggaaagggaatgtagctgcgcatatcgcattctttgatttgtttctgtaacaccagatgtacacctatcgtgtttcagcatactaatcttctgtcagcgtc

SEQ ID NO: 2213 - protein, 269 aa, Panicum virgatum
  misc_feature (23)..(204): Pfam Name: Glyco_hydro_16 Pfam Description: Glycosyl hydrolases family 16
  misc_feature (228)..(269): Pfam Name: XET_C Pfam Description: Xyloglucan endo-transglycosylase (XET)
  misc_feature: Ceres Clone ID no. 1804995
  misc_feature: Bit score of 633.1 for HMM based on sequences of Figure 46
  misc_feature: Functional Homolog Of SEQ ID NO. 2190
MRSIALAIAAMACLAAVARAGNFYQDTEMTWGGGRGKVVDGGRGLDLTLDRTSGSGFQSRSEYLFGKIDMQIKLVPGNSAGTVTTFYLSSQGSAHDEIDFEFLGNVTGEPYTLHTNVFTQGQGQREQQFRLWFDPTTAYHTYSIVWNPQHIIFAVDGTPIRDFKNHEARGVAFPKSQPMRLYASLWNADDWATQGGCVKADWSHAPFVASFRGFRADACVWSGGRQQCPVGTMEAAAAGGGGRGWWSQQLSDMSYRRMRWVQRKFMIYN

SEQ ID NO: 2214 - DNA, 1262 bp, Triticum aestivum
  misc_feature: Ceres Clone ID no. 1446366
  misc_feature: Encodes the peptide sequence at SEQ ID NO. 2215
catcaaccagccaagagcagccagccattccaatccatcacaccatccaccaagctcagctcagctcagctcagctaccaacacttgactaggtagcagctagtgagaaagaaagatcgttggagcgcaagatgagggcggcggcgctcggcattgtggccatggcctgcctcgtggcggtggcgcggggcggcaacttcatccaggactccgagatgacctggggggacggccgcgggaaggtcgtcgacggcggccgcgggctcgacctcacgctcgacaagacctccggctccggcttccagtccaagagcgagtacctgttcggcaagattgacatgcagatcaagctcgtccccggcaactccgccggcaccgtcaccaccttctacctgtcgtcgcaggggacggcgcacgacgagatcgacttcgagttcctgggcaacgtgaccggcgagccctacacgctgcacaccaacgtgttcgcgcaggggcaggggcagcgggagcagcagttccgcctctggttcgaccccaccaaggccttccacacctactccatcatctggaacccgcagcacgtcatattcgcggtggacggcacggcgatcagggacttcaagaaccacgaggcgcgcggcgtgtcgttccccaagagccagccgatgcggctgtacgcgagcctgtggaacgccgacgactgggccacgcagggcggccgggtcaagaccgactggagcaaggcgccgttcgtcgcctccttccgcaacttcaacgccgacgcctgcgtcatgtcgggcggcgcgcagcgctgccccgcgggcaccatggaggcctcggccgccggcgccaacggcagcggcagctggtggaaccaggagctgagcggcatggggtaccggcgcatgcggtgggtgcagaggaagttcatgatctacaactactgcaccgaccccaagcgggtggcgcagggcgtgcccgccgagtgcaagctccgctgatgagatcccagctcccgcagctcacaagaacaacaacccaggaacccgtcggtcgtctgagatgtgtctggtttcggctttcgatccgtgagaacgaacgaaggaaggaagggaaagtgcgcgcgcatcgaagctctgtgggatggtgtaaatgtagtaccgtagtatgcatatcgcattctttcatttgtttcgttgtcacacggggtcgatccatgtacttatgcaagttctataattagcctgttccgtttagccttg

SEQ ID NO: 2215 - protein, 289 aa, Triticum aestivum
  misc_feature (23)..(204): Pfam Name: Glyco_hydro_16 Pfam Description: Glycosyl hydrolases family 16
  misc_feature (228)..(286): Pfam Name: XET_C Pfam Description: Xyloglucan endo-transglycosylase (XET)
  misc_feature: Ceres Clone ID no. 1446366
  misc_feature: Bit score of 716.3 for HMM based on sequences of Figure 46
  misc_feature: Functional Homolog Of SEQ ID NO. 2190
MRAAALGIVAMACLVAVARGGNFIQDSEMTWGDGRGKVVDGGRGLDLTLDKTSGSGFQSKSEYLFGKIDMQIKLVPGNSAGTVTTFYLSSQGTAHDEIDFEFLGNVTGEPYTLHTNVFAQGQGQREQQFRLWFDPTKAFHTYSIIWNPQHVIFAVDGTAIRDFKNHEARGVSFPKSQPMRLYASLWNADDWATQGGRVKTDWSKAPFVASFRNFNADACVMSGGAQRCPAGTMEASAAGANGSGSWWNQELSGMGYRRMRWVQRKFMIYNYCTDPKRVAQGVPAECKLR

SEQ ID NO: 2216 - DNA, 1262 bp, Triticum aestivum
  misc_feature: Ceres Clone ID no. 1054422
  misc_feature: Encodes the peptide sequence at SEQ ID NO. 2217
atcaacaaaccaacccaaccagcaatagccaccccaatccatccagctcctccaagctcagtgtccgagctcagctcagctacccacacttcactcagtagcagctaccggtagcgagaaagaaagatcgatagtgcgacgtgcgcgatgacgacggtggcgataggcattctggccatggcgtgcctcgtggcggtggcgcggggcggcaacttcttccaggactccgagatgacctggggggacggccgcggcaaggtcgtcgacggcggccgcgggctcgacctcacgctcgacaagacctccggctccggcttccagtccaagaccgagtacctcttcggcaagatcgacatgcagatcaagctcgtccccggcaactccgccggcaccgtcaccaccttctacctgtcgtcgcaggggacggcgcacgacgagatcgacttcgagttcctgggcaacgtcaccggcgagccctacacgctgcacaccaacgtgttcgcgaaagggcaggggcagcgggagcagcagttccgcctctggttcgaccccaccaaggccttccacacctactccatcatctggaacccgcagcacgtcatattcgcggtggacggcacggcgatcagggacttcaagaaccacgaggcgcgcggcgtgtcgttccccaagagccagccgatgcggctgtacgcgagcctgtggaacgccgacgactgggccacgcagggcggccgggtcaagaccgactggagcaaggcgccgttcgtcgcctccttccgcaacttcaacgccgacgcctgcgtcatgtcgggcggcgcgcagcgctgccccgccggcacaatggaggcctctgcggccggcggcagcggcagctggtggaaccaggagctcagcggcatgggctaccgccgcatgcggtgggtgcagaggaagttcatgatctacaactactgcaccgaccccaagcgggtggcgcagggcgtgcctgccgagtgcaagctccgctgatgagatcctcccgcagcttacaagaacaacaacgcatgaacccgtcatctgagatgtgttttgtttcggctttcgatccgtgagaacgaaggaaggaaggaagtgcgcgcatcagagctctgtcggatggtgtaaatgtagtaccgtagtatgcatatcgcattctttcatttgtttcgttgtcacacgggtcgttccatgtacttatgcaagttctataattagctagttccttttagccttgaaaatcc

SEQ ID NO: 2217 - protein, 287 aa, Triticum aestivum
  misc_feature (23)..(204): Pfam Name: Glyco_hydro_16 Pfam Description: Glycosyl hydrolases family 16
  misc_feature (228)..(284): Pfam Name: XET_C Pfam Description: Xyloglucan endo-transglycosylase (XET)
  misc_feature: Ceres Clone ID no. 1054422
  misc_feature: Bit score of 716.2 for HMM based on sequences of Figure 46
  misc_feature: Functional Homolog Of SEQ ID NO. 2190
MTTVAIGILAMACLVAVARGGNFFQDSEMTWGDGRGKVVDGGRGLDLTLDKTSGSGFQSKTEYLFGKIDMQIKLVPGNSAGTVTTFYLSSQGTAHDEIDFEFLGNVTGEPYTLHTNVFAKGQGQREQQFRLWFDPTKAFHTYSIIWNPQHVIFAVDGTAIRDFKNHEARGVSFPKSQPMRLYASLWNADDWATQGGRVKTDWSKAPFVASFRNFNADACVMSGGAQRCPAGTMEASAAGGSGSWWNQELSGMGYRRMRWVQRKFMIYNYCTDPKRVAQGVPAECKLR

SEQ ID NO: 2218 - DNA, 1184 bp, Zea mays
  misc_feature: Ceres Clone ID no. 263803
  misc_feature: Encodes the peptide sequence at SEQ ID NO. 2219
atcccaacccactcacagtctcacgctactatcgctatctagagctccggccgtcacagacacgagctagagctagagctgcagggaagaagaagaaggaggaggaggagaagatgagggcgtccgcgctggtctgcttcgtggcggtgtcggcgtgcatagcgtgcatcgcgcatggcggcaacttctaccaggacacggagatgacctgggggcaggggcgcggcaaggtggtggacggcgggcgcgggctggacctgagcctggacagggcctccgggtccgggttccagtccaaggacgagtacctgttcggcaagatcgagatgcagatgaagctggtgcctggcaactcggcgggcaccgtgacgaccttgtacctgtcgtcgcagggcgacgcgcacgacgagatcgacctggagttcctgggcaacgtgtcgggcgagccctacacgctgcacacgaacgtgttcacgcgcgggcgggggcagcgggagcagcagttccgcctctggttcgaccccaccgccgacttccacacctactccgtggtgtggaacccgcggcacgtcatcttcgcggtggacggcacgccggtgagggacttcgccaaccgcgaggcccgcggggtggcgttcccgcggacgcagcccatgcgggtgtacgccagcctctggaacgccgacgactgggccacgcagggcggccgcgtcaaggcggactgggcgcgggcgccgttcgtcgcctcgttccgcgggttcagcgccgacgcctgcgtctggtccggcggcaggtcgcagtgccccgtcggcaccatggaggaggcgggaggaggcggcggctggtggaaccagcagctcascgacgccagctaccgccgcatgcgctgggtgcaraggaagttcatgatytacaactactgcaccgacgccaagcggttcccgcagggccggggcgtgcccgctgaatgcaggctccggcgataaaggtggctggatgagcgaacgcgaagccacctgcgtgcgtgcacgacgatcgatcccctcgtcgtcgttcacttcagaccagagatcggtggtctggcgaataatgtttgggtttttttttttgccatgggcgatggcaatgtaaatgtagcacgtgacgcacgtcgcagtgatattctttcatctgttttctgcagc

SEQ ID NO: 2219 - protein, 290 aa, Zea mays
  misc_feature (25)..(206): Pfam Name: Glyco_hydro_16 Pfam Description: Glycosyl hydrolases family 16
  misc_feature (230)..(286): Pfam Name: XET_C Pfam Description: Xyloglucan endo-transglycosylase (XET)
  misc_feature: Ceres Clone ID no. 263803
  misc_feature: Bit score of 665.8 for HMM based on sequences of Figure 46
  misc_feature: Functional Homolog Of SEQ ID NO. 2190
  misc_feature (250)..(250): Xaa is any aa, unknown, or other
  misc_feature (261)..(261): Xaa is any aa, unknown, or other
  misc_feature (266)..(266): Xaa is any aa, unknown, or other
MRASALVCFVAVSACIACIAHGGNFYQDTEMTWGQGRGKVVDGGRGLDLSLDRASGSGFQSKDEYLFGKIEMQMKLVPGNSAGTVTTLYLSSQGDAHDEIDLEFLGNVSGEPYTLHTNVFTRGRGQREQQFRLWFDPTADFHTYSVVWNPRHVIFAVDGTPVRDFANREARGVAFPRTQPMRVYASLWNADDWATQGGRVKADWARAPFVASFRGFSADACVWSGGRSQCPVGTMEEAGGGGGWWNQQLXDASYRRMRWVXRKFMXYNYCTDAKRFPQGRGVPAECRLRR

SEQ ID NO: 2220 - DNA, 1382 bp, Panicum virgatum
  misc_feature: Ceres Clone ID no. 1821034
  misc_feature: Encodes the peptide sequence at SEQ ID NO. 2221
ctccctgtccctcctcgacccatcgctctgctccgccttcgcggcaggcaaccatccgatccaccacccggcagcgacgccattctcgcctccccaaaccccctataaaatccctcacaccccgcgcgttctccactcactcacacagcacaagaagcaagctcgatcgccgggccccttcgtccacctccaccaccacacatctcaccacagtcagagcgaccgcttcggccatggcccggcgggtgtcgtccctactgctgctgctgctgctgggcgcgctggcggcggcggcggcggccagcttcgaccaggatttcgacatcacctggggcgacggccgcggcaagatccaggacggcggccgcctcctcacgctcacgctcgaccgcacctccggctccggcttccagtccaggcgagagtacctcttcggcaagatcgacatgcagatcaagctcgtccccggcaactccgccggcaccgtcaccgcctactacctctcgtcgcaggggagcacccacgacgagatcgacttcgagttcctgggcaacgtcaccggcgagccctacacgctgcacaccaacgtgttcacgcaggggcagggccagcgcgagcagcagttccgcctctggttcgaccccaccaccgacttccacacctactccatcctctggaaccccaagcacatcatcttcatggtggacgacctgcccatcagggacttccggaacctggagagcaaggggatcgcgttccccaagagccagcccatgcgcctctactccagcctctggaacgctgacgactgggccacgcagggcgggcgcgtcaagacggactggtcccacgcgcccttctccgcctcctaccggggcttctgggccgacgcctgcgtcgccgtcgccggcggaaagacccgctgcggcgccgccgtcggcaccgagcgcgccgccgcccccgccggcgactggtacaaccaggagctcgacctcaccctgcagcagcgcatgcgctgggtgcagcgcaagtacatgatctacaactactgcaccgaccccaagcgatacccgcagggcctccccgccgagtgctccatgcagcagtagcccacctgtccaccattcccaaccgcgcgcgtcgagctccatcggctgcaatggcggatagatcatcatcggcgtcggtctcatcttctgtggggtaaataaataaggacctggcaaattcgatcgtgggacctgtaatgcatatgcagtagctggtggtaaattcttcctgtcttgtctgtagcctgtcgcctctgttctgttcgtgtcgccttgtaattgtaaccaactcgccgtgttcgtggccgtctgtaatataccgaaagccatacg

SEQ ID NO: 2221 - protein, 291 aa, Panicum virgatum
  misc_feature (25)..(206): Pfam Name: Glyco_hydro_16 Pfam Description: Glycosyl hydrolases family 16
  misc_feature (231)..(287): Pfam Name: XET_C Pfam Description: Xyloglucan endo-transglycosylase (XET)
  misc_feature: Ceres Clone ID no. 1821034
  misc_feature: Bit score of 657.9 for HMM based on sequences of Figure 46
  misc_feature: Functional Homolog Of SEQ ID NO. 2190
MARRVSSLLLLLLLGALAAAAAASFDQDFDITWGDGRGKIQDGGRLLTLTLDRTSGSGFQSRREYLFGKIDMQIKLVPGNSAGTVTAYYLSSQGSTHDEIDFEFLGNVTGEPYTLHTNVFTQGQGQREQQFRLWFDPTTDFHTYSILWNPKHIIFMVDDLPIRDFRNLESKGIAFPKSQPMRLYSSLWNADDWATQGGRVKTDWSHAPFSASYRGFWADACVAVAGGKTRCGAAVGTERAAAPAGDWYNQELDLTLQQRMRWVQRKYMIYNYCTDPKRYPQGLPAECSMQQ

SEQ ID NO: 2222 - DNA, 1207 bp, Panicum virgatum
  misc_feature: Ceres Clone ID no. 1806021
  misc_feature: Encodes the peptide sequence at SEQ ID NO. 2223
aagcaagctaagctcgatcgcccgcccgcccccttcgaccttcgtccagctccaccaccacacatctcggcatctcgccgcttcggccatggcccggcgggtgtccctgctgcagctgctgctgctgggcgcgctggcggcctgctcggcggcggcggcggcggccagcttcgaccaggagttcgacatcacctggggcgacggccgcggcaagatcgaggacggcggccgcctcctcacgctcacgctcgaccgcacctccggctccggcttccagtccaggcacgagtacctcttcggcaagatcgacatgcagctcaagctcgtccccggcaactccgccggcaccgtcaccgcctactacctctcctcccaggggagcgcccacgacgagatcgacttcgagttcctgggcaacgtctccggcgagccctacacgctgcacaccaacgtgttcacgcaggggcagggccagcgcgagcagcagttccgcctctggttcgaccccaccaccgacttccacacctactccatcctctggaatcccaagcacatcatcttcatggtggacgacctgccgatcagggacttccggaacctggagagcaaggggatcgcgttccccaagagccagcccatgcggctctactccagcctctggaacgccgacgactgggccacgcaggggggccgcgtcaagacggattggtcccacgcgcccttctccgcctcctaccggggcttccgggccgacgcctgcgtcgccgtcgccggcggcaggacccgctgcggcgccgccgtcggcaccgagggcgccgcgggcgccgccgcccccgccggtgactggtacaaccaggagctcgacctcaccctgcagcagcgcatgcgctgggtgcagcgcaagtacatgatctacaactactgcaccgaccccaagcgctaccagcagggcctccccgccgagtgctccatgcagcagtaatgctcctccatcggctgctgcaatggcggatgctagctgcacccccggatcatcaatcatcaatcgaagacgaagggcaaggaagaagcatgggggggggggggggggggcgtcgatcggtctcatcttctgtgtggtaaataaataaggacctggacctggcaaattcgatcgtgggacctgtaatgcgtgcagtagctggtggtaaattcctctgttctgtcc

SEQ ID NO: 2223 - protein, 297 aa, Panicum virgatum
  misc_feature (28)..(209): Pfam Name: Glyco_hydro_16 Pfam Description: Glycosyl hydrolases family 16
  misc_feature (234)..(293): Pfam Name: XET_C Pfam Description: Xyloglucan endo-transglycosylase (XET)
  misc_feature: Ceres Clone ID no. 1806021
  misc_feature: Bit score of 641.2 for HMM based on sequences of Figure 46
  misc_feature: Functional Homolog Of SEQ ID NO. 2190
MARRVSLLQLLLLGALAACSAAAAAASFDQEFDITWGDGRGKIEDGGRLLTLTLDRTSGSGFQSRHEYLFGKIDMQLKLVPGNSAGTVTAYYLSSQGSAHDEIDFEFLGNVSGEPYTLHTNVFTQGQGQREQQFRLWFDPTTDFHTYSILWNPKHIIFMVDDLPIRDFRNLESKGIAFPKSQPMRLYSSLWNADDWATQGGRVKTDWSHAPFSASYRGFRADACVAVAGGRTRCGAAVGTEGAAGAAAPAGDWYNQELDLTLQQRMRWVQRKYMIYNYCTDPKRYQQGLPAECSMQQ

SEQ ID NO: 2224 - DNA, 1247 bp, Panicum virgatum
  misc_feature: Ceres Clone ID no. 1727689
  misc_feature: Encodes the peptide sequence at SEQ ID NO. 2225
acacaacacaagcaagctaagctcgatcgcccgcccgcccccttcgaccttcgtccagctccaccaccacacatctcggcatctcgccgcttcggccatggcccggcgggtgtccctgctgctgctgggcgcgctggcggcctgctcggcggcggcggcggccagcttcgaccaggagttcgacatcacctggggcgacggccgcggcaagatccaggacggcggccgcctcctcacgctcacgctcgaccgcacctccggctccggcttccagtccaggcacgagtacctcttcggcaagatcgacatgcagctcaagctcgtccccggcaactccgccggcaccgtcaccgcctactacctctcctcccaggggagcgcccacgacgagatcgacttcgagttcctgggcaacgtctccggcgagccctacacgctgcacaccaacgtgttcacgcaggggcagggccagcgcaagcagcagttccgcctctggttcgaccccaccaccgacttccacacctactccatcctctggaatcccaagcacatcatcttcatggtggacgacctgccgatcagggacttccggaacctggagagcaaggggatcgcgttccccaagagccagcccatgcggctctactccagcctctggaacgccgacgactgggccacgcaggggggccgcgtcaagacggattggtcccacgcgcccttctccgcctcctaccggggcttccgggccgacgcctgcgtcaccgtcgccggcggcaggacccgctgcggcgccgccgtcggcaccgagggcgccgcgggcgccgccgcccccgccggcgactggtacaaccaggagctcgacctcaccctgcagcagcgcatgcgctgggtgcagcgcaagtacatgatctacaactactgcaccgaccccaagcgctaccagcagggcctccccgccgagtgctccatgcagcagtaatgctcctccatcggctgctgcaatggcggatgctagctgcaccaccggatcatcaatcatcaatcgaagacgaagggcaaggaagaagcatgggggggagtcgatcggtctaatcttctgtgtggtaatcgtgggacctgtaatgcgtgcagtagctggtggtaaattcctctgttctgtcctgttctgttggtgtcatcttgtaatcaacacgccgtgttcatgtccgtcttgtaatatacccaagaaagacatacgtgttcgtcag

SEQ ID NO: 2225 - protein, 293 aa, Panicum virgatum
  misc_feature (24)..(205): Pfam Name: Glyco_hydro_16 Pfam Description: Glycosyl hydrolases family 16
  misc_feature (230)..(289): Pfam Name: XET_C Pfam Description: Xyloglucan endo-transglycosylase (XET)
  misc_feature: Ceres Clone ID no. 1727689
  misc_feature: Bit score of 645.4 for HMM based on sequences of Figure 46
  misc_feature: Functional Homolog Of SEQ ID NO. 2190
MARRVSLLLLGALAACSAAAAASFDQEFDITWGDGRGKIQDGGRLLTLTLDRTSGSGFQSRHEYLFGKIDMQLKLVPGNSAGTVTAYYLSSQGSAHDEIDFEFLGNVSGEPYTLHTNVFTQGQGQRKQQFRLWFDPTTDFHTYSILWNPKHIIFMVDDLPIRDFRNLESKGIAFPKSQPMRLYSSLWNADDWATQGGRVKTDWSHAPFSASYRGFRADACVTVAGGRTRCGAAVGTEGAAGAAAPAGDWYNQELDLTLQQRMRWVQRKYMIYNYCTDPKRYQQGLPAECSMQQ

SEQ ID NO: 2226 - protein, 290 aa, Oryza sativa subsp. japonica
  misc_feature (21)..(202): Pfam Name: Glyco_hydro_16 Pfam Description: Glycosyl hydrolases family 16
  misc_feature (227)..(288): Pfam Name: XET_C Pfam Description: Xyloglucan endo-transglycosylase (XET)
  misc_feature: Public GI ID no. 115469720
  misc_feature: Bit score of 648.7 for HMM based on sequences of Figure 46
  misc_feature: Functional Homolog Of SEQ ID NO. 2190
MAALLVVVLVAMSAMVATANFNQEFDITWGDGRGKILEDGQLLTLTLDRTSGSGFQSKHEYLYGKIDMQLKLVPGNSAGTVTAYYLSSQGPTHDEIDFEFLGNVTGEPYTLHTNVFTQGQGQREMQFRLWYDPTKDFHTYSILWNPKHIIFMVDDMPIRDFRNLEGKGIAFPKNQPMRLYSSLWNADDWATQGGRVKTDWTHAPFSASYRGFRADACVVAAGGRTRCGATVGTDAAPGTGAAAAAGGWYNQELDLTRQQRMRWVQSKYMIYNYCTDPKRFPQGVPAECSM

SEQ ID NO: 2227 - DNA, 906 bp, Sorghum bicolor
  misc_feature: Ceres Annot ID no. 8744425
  misc_feature: Encodes the peptide sequence at SEQ ID NO. 2228
atggcgtctcgtcgtgtgtccctgctgctgggcgtactgctgtcctactccgccgccgtcgccgtcgccgtggcggcggccaacttcaaccaggagttcgacatcacgtggggcgacggtcgtggcaagatccaggacaacgggcagctgctgacgctgacgctggaccggacctccgggtccgggttccagtccaggcacgagtacctcttcggcaagatcgacatgcagctgaagctggtccccggcaactcggccggcaccgtcaccgcctactacctgtcgtcgcagggcaacacccacgatgagatcgacttcgagttcctcggcaacgtctccggcgagccctacacgctgcacaccaacgtgttcacccagggccagggacagagggagcagcagttccgcctctggtttgatcccaccaaggacttccatacctactccatcctctggaaccccaagcacgtcatcttcatggtggacgagatgccgatcagggacttccggaacctggagagcaagggggtggcgttccccaagaaccagccgatgcggctctactccagcctgtggaacgccgacgactgggcgacacagggcggccgcgtcaagacggactggtcccacgcgcccttctccgcctcgtaccggggattcagggccgacgcctgcgtcgcagtcgccggcggcaagacgcgctgcggcggcggcggcggcggcggcgccgtcggcaccgagggcgccggcgctggagcgccggccggggactggtacaaccaggagctggacctcacgctgcagcagcggatgcggtgggtgcagcgcaagtacatgatctacaactactgcaccgaccccaagcgctacccgcagggcctccccgccgagtgctccatgcagtag

SEQ ID NO: 2228 - protein, 301 aa, Sorghum bicolor
  misc_feature (29)..(210): Pfam Name: Glyco_hydro_16 Pfam Description: Glycosyl hydrolases family 16
  misc_feature (235)..(298): Pfam Name: XET_C Pfam Description: Xyloglucan endo-transglycosylase (XET)
  misc_feature: Ceres Annot ID no. 8744425
  misc_feature: Bit score of 643.7 for HMM based on sequences of Figure 46
  misc_feature: Functional Homolog Of SEQ ID NO. 2190
MASRRVSLLLGVLLSYSAAVAVAVAAANFNQEFDITWGDGRGKIQDNGQLLTLTLDRTSGSGFQSRHEYLFGKIDMQLKLVPGNSAGTVTAYYLSSQGNTHDEIDFEFLGNVSGEPYTLHTNVFTQGQGQREQQFRLWFDPTKDFHTYSILWNPKHVIFMVDEMPIRDFRNLESKGVAFPKNQPMRLYSSLWNADDWATQGGRVKTDWSHAPFSASYRGFRADACVAVAGGKTRCGGGGGGGAVGTEGAGAGAPAGDWYNQELDLTLQQRMRWVQRKYMIYNYCTDPKRYPQGLPAECSMQ

SEQ ID NO: 2229 - protein, 298 aa, Zea mays
  misc_feature (28)..(209): Pfam Name: Glyco_hydro_16 Pfam Description: Glycosyl hydrolases family 16
  misc_feature (248)..(295): Pfam Name: XET_C Pfam Description: Xyloglucan endo-transglycosylase (XET)
  misc_feature: Public GI ID no. 212275237
  misc_feature: Bit score of 631.4 for HMM based on sequences of Figure 46
  misc_feature: Functional Homolog Of SEQ ID NO. 2190
MATSSRRVPLLLLCLGVLVSCSFAAGSLDQELDITWGDGRGKVLDNGRLLTLSLDRTSGSGFQSRHEYLFGKIDMQLRLVPGNSAGTVTAYYLSSQGGAHDEIDFEFLGNVSGEPYTLHTNVFTRGQGQREQQFRLWFDPTADFHTYSILWNPKHVIFMVDDMPIRDFRNLESKGVAFPKSQPMRLYSSLWNADDWATQGGRVKTDWSHAPFSASYRGFKADACVAVAGGRTRCGATVGTEGTGAPASAAGAGDWYNQELDLTLQQRMRWVQRKYMIYNYCTDPKRYQQGLPAECSMQ

SEQ ID NO: 2230 - DNA, 982 bp, Panicum virgatum
  misc_feature: Ceres Clone ID no. 1724271
  misc_feature: Encodes the peptide sequence at SEQ ID NO. 2231
agttgagtgtgctccctcaccaagcaaagcaacctcgctcgctctcccaatcatccttatcagatcatcttcttccaagatgtcttgcagctgcggatcaagctgcaactgcggctcccgctgcaactgcggcaagatgtacctctcgtcccaggggagcacccacgacgagatcgacttccagttcctgggcaacgtcaccggcgagccctacacgctgcacaccaacgtgtttacgcaggggcagggccagcgcgagcagcagttccgcctctggttcgaccccaccacggcctaccacacctactccatcgtctggaacccgcagcacatcatcttcgcggtggacggcaccccgatccatgacttcaagaaccacgaggcgcgcggcgtggcgttccccaagagccagccgatgcggctgtacgcgagcctgtggaacgccgacgactgggcgacgcagggcgggcgcgtgaaggcggactggtcccacgcgccgttcgtggcctccttccggggcttccgcgccgacgcctgcgtctggtccggcggccggcagcagtgccccgtgggcaccatggaggccgccgccgcgggcggcgggcgcggctggtggagccagcagctgagcgacacgagctaccgccgcatgcgctgggtgcagaggaagttcatgatctacaactactgcaccgacgccaagcgcttcccgcagggcgtccccaccgagtgccacctccggtgagctgctagcggctgccgcagtgccgtgcacgcacgatggttcctcgccgtcccaacccatcgcatcatggagaagaataagggtcgtttttgcatgatgggggcatggggccgggcgatgtacaatgtaaatggagcagcacgcgtatcgcattctttgatttgtttctgtaacaccagatgtgcacctgtcatcaagtttctttcagcataatcttccgtcagcgtccttgattcg

SEQ ID NO: 2231 - protein, 221 aa, Panicum virgatum
  misc_feature (5)..(138): Pfam Name: Glyco_hydro_16 Pfam Description: Glycosyl hydrolases family 16
  misc_feature (162)..(218): Pfam Name: XET_C Pfam Description: Xyloglucan endo-transglycosylase (XET)
  misc_feature: Ceres Clone ID no. 1724271
  misc_feature: Bit score of 424.1 for HMM based on sequences of Figure 46
  misc_feature: Functional Homolog Of SEQ ID NO. 2190
MSCSCGSSCNCGSRCNCGKMYLSSQGSTHDEIDFQFLGNVTGEPYTLHTNVFTQGQGQREQQFRLWFDPTTAYHTYSIVWNPQHIIFAVDGTPIHDFKNHEARGVAFPKSQPMRLYASLWNADDWATQGGRVKADWSHAPFVASFRGFRADACVWSGGRQQCPVGTMEAAAAGGGRGWWSQQLSDTSYRRMRWVQRKFMIYNYCTDAKRFPQGVPTECHLR

SEQ ID NO: 2232 - DNA, 1395 bp, Zea mays
  misc_feature: Ceres Clone ID no. 247073
  misc_feature: Encodes the peptide sequence at SEQ ID NO. 2233
aaaaaaacaagctcgaccaccaacccagctcgctcgtcccagctgatcaggtcgagcacctagtagcgacctgctcgatcatcagtgtagagtgtcggtaggtgtctgtctctcttggtggctggttgcaacggtcatggcgacgtcgtctcgtcgggtgcccttgctgctgctgtgcctgggcgtgctggtgtcctgctccttcgcggcgggcagcttggaccaggagctggacatcacgtggggcgacgggcggggcaaggtccttgacaacgggcggctgctgacgctgtcgctggaccgcacgtccggctccgggttccagtcccggcacgagtacctgttcggcaagatcgacatgcagctgcggctggtgccgggcaactccgccggcaccttcaccgcctactacctgtcgtcgcagggcggcgcgcacgacgagatcgacttcgagttcctgggcaacgtgtccggcgagccctacacgctgcacaccaacgtgttcacgcgggggcaggggcagcgggagcagcagttccgcctctggttcgaccccaccgccgacttccacacctactccatcctctggaaccccaagcacgtcatcttcatggtggacgacatgcccatcagggacttccgcaacctggagagcaagggggtggcgttccccaagagccagccgatgcggctctactccagcctgtggaacgcggacgactgggcgacgcagggcgggcgcgtcaagacggactggtcccacgcccccttctccgcctcctaccgcgggttcaaggccgacgcttgcgtcgccgtcgcgggcggccggacccgctgcggcgccaccgtcggcaccgagggcaccggcgcccccgcctccgccgmcggcgccggggactggtacaaccaggagctggacctcaccctgcagcagcggatgcgctgggtgcagcgcaagtacatgatctacaactactgcaccgatcccaagcgctaccagcagggcctccccgccgagtgctccatgcagtagcgcccggttattcctcgcccgtccaacaatggcgcgcgcgcgcgtgtgtgtgcatgtggtccgctctactgctaccgctacgacgatcggtgtcgatcaccggatcaaggcaagacgaaaggcatcgaaacatggtagataaataaaggacttgacgatttgtaacgcagtagctggtgcgtgcgtggtgtggtggtaagaaattcttctgctgcctgtgttcttgtagcctcctcgtcctcgcccaccctgttggtacgtgtacggtgtacgtagtctgccgccgcgcgctgttcgtgttcgtcgtgtctcgtgtctgtattatactcgtcctccccatcaaaaaaaaagttgttccatgc

SEQ ID NO: 2233 - protein, 298 aa, Zea mays
  misc_feature (28)..(209): Pfam Name: Glyco_hydro_16 Pfam Description: Glycosyl hydrolases family 16
  misc_feature (247)..(295): Pfam Name: XET_C Pfam Description: Xyloglucan endo-transglycosylase (XET)
  misc_feature: Ceres Clone ID no. 247073
  misc_feature: Bit score of 626.8 for HMM based on sequences of Figure 46
  misc_feature: Functional Homolog Of SEQ ID NO. 2190
  misc_feature (250)..(250): Xaa is any aa, unknown, or other
MATSSRRVPLLLLCLGVLVSCSFAAGSLDQELDITWGDGRGKVLDNGRLLTLSLDRTSGSGFQSRHEYLFGKIDMQLRLVPGNSAGTFTAYYLSSQGGAHDEIDFEFLGNVSGEPYTLHTNVFTRGQGQREQQFRLWFDPTADFHTYSILWNPKHVIFMVDDMPIRDFRNLESKGVAFPKSQPMRLYSSLWNADDWATQGGRVKTDWSHAPFSASYRGFKADACVAVAGGRTRCGATVGTEGTGAPASAXGAGDWYNQELDLTLQQRMRWVQRKYMIYNYCTDPKRYQQGLPAECSMQ

SEQ ID NO: 2234 - DNA, 1207 bp, Triticum aestivum
  misc_feature: Ceres Clone ID no. 1020658
  misc_feature: Encodes the peptide sequence at SEQ ID NO. 2235
acacaaacacaagcttccatcgggctttctcctcctcatcaaccttcttctactactagttgttcctagctagctggttgagtgagcttgctttcgggagcaagaaacgcatggcggtgtcctcggtgctggcgatcctgctcgacgcctcgtgtgcccttgcgtcggcgaccttcgacaaggagttcgacatcacctggggtgacggccgagggaagatcatgaacaatggccagctcctcacgctggggctggacaaggtctccggctccggattccagtccaagcacgagtacctctacggcaagatcgacatgcagctcaagctcgtccccggcaactccgccggcaccgtcaccgcatactacctgtcgtcgcaggggccgacgcacgacgagatcgactttgagttcctgggcaatgtcaccggcgagccgtacactctgcacaccaacgtgttcacgcaggggcaggggcagcgggagcagcagttccgcctctggttcgatcccaccaacgacttccacacctactccatcctctggaacccaaagcacatcatcttcatggtggacgacatgccgatcagggacttcaggaacctggagggaaaggggatcgccttccccaagaaccagccgatgcgcctctactccagcctctggaacgccgacgactgggccacgcaaggaggccgcgtcaagacggactggtcccacgcgccgttctctgcctcctaccgcggcttcaaggccgacgcgtgcgtggtgaccgcggccggccggccgcgctgcggcgccagcgtgggcacggaggtcgcccccggcacgggcgcggcgggcgagtggtacaaccaggagctcgacctgacgcggcagcagcggatgcggtgggtgcagagcaactacatgatctacaactactgcaccgaccccaagcgcttcgcccagggcgttcccgccgagtgctccatgtagtccatgcctgtcgatcgccggagaaagacggccggagatagggaagatggggtgtctgtataatccgatatcaataaggattggtgactgggagatgtgtaaagtagccggtggtagattcttctttggcatttacgcccagttcttctaatcgtgatcacgatcatttcgtgtgtaatctattgcctcgtcgtacatacgttcatcacctgtatgctgctctcggctct

SEQ ID NO: 2235 - protein, 288 aa, Triticum aestivum
  misc_feature (22)..(203): Pfam Name: Glyco_hydro_16 Pfam Description: Glycosyl hydrolases family 16
  misc_feature (228)..(286): Pfam Name: XET_C Pfam Description: Xyloglucan endo-transglycosylase (XET)
  misc_feature: Ceres Clone ID no. 1020658
  misc_feature: Bit score of 638.2 for HMM based on sequences of Figure 46
  misc_feature: Functional Homolog Of SEQ ID NO. 2190
MAVSSVLAILLDASCALASATFDKEFDITWGDGRGKIMNNGQLLTLGLDKVSGSGFQSKHEYLYGKIDMQLKLVPGNSAGTVTAYYLSSQGPTHDEIDFEFLGNVTGEPYTLHTNVFTQGQGQREQQFRLWFDPTNDFHTYSILWNPKHIIFMVDDMPIRDFRNLEGKGIAFPKNQPMRLYSSLWNADDWATQGGRVKTDWSHAPFSASYRGFKADACVVTAAGRPRCGASVGTEVAPGTGAAGEWYNQELDLTRQQRMRWVQSNYMIYNYCTDPKRFAQGVPAECSM

SEQ ID NO: 2236 - protein, 292 aa, Hordeum vulgare subsp. vulgare
  misc_feature (23)..(204): Pfam Name: Glyco_hydro_16 Pfam Description: Glycosyl hydrolases family 16
  misc_feature (229)..(290): Pfam Name: XET_C Pfam Description: Xyloglucan endo-transglycosylase (XET)
  misc_feature: Public GI ID no. 1890575
  misc_feature: Bit score of 638.0 for HMM based on sequences of Figure 46
  misc_feature: Functional Homolog Of SEQ ID NO. 2190
MARMGASVLSILLASCALAAASFDKEFDVTWGDGRGKILNNGQLLTLGLDKVSGSGFQSKHEYLFGKIDMQLKLVPGNSAGTVTAYYLSSQGPTHDEIDFEFLGNVTGEPYTLHTNVFTQGQGQREQQFRLWFDPTNDFHTYSILWNPKHIIFMVDDMPIRDFKNLEGKGIAFPKNQPMRLYSSLWNADDWATQGARVKTDWSHAPFSASYRGFKADACVVTAGGRPRCGASMGTEAAPGTGASGAAGEWYNQELDLTLQQRMRWVQSNYMIYNYCTDPKRVAKGVPAECSM

SEQ ID NO: 2237 - protein, 296 aa, Vitis vinifera
  misc_feature (31)..(212): Pfam Name: Glyco_hydro_16 Pfam Description: Glycosyl hydrolases family 16
  misc_feature (236)..(290): Pfam Name: XET_C Pfam Description: Xyloglucan endo-transglycosylase (XET)
  misc_feature: Public GI ID no. 225446111
  misc_feature: Bit score of 678.9 for HMM based on sequences of Figure 46
  misc_feature: Functional Homolog Of SEQ ID NO. 2190
MASPSTSNLSPKLLLLSLLFGSFVVASVGNLYQDLDITWGDGRAKILDNGQLLTLSLDKASGSGFQSQDEYLFGKIDMQLKLVPGNSAGTVTAYYLSSQGPTHDEIDFEFLGNLSGDPYILHTNVFSQGKGNREQQFYLWFDPTADFHTYSVLWNPQRIIFSVDGTPIREFKNSESIGVPYPKNQPMRIYSSLWNADDWATRGGLVKTDWSLAPFTASYRNFNANACVWSSGSSSCSSNSPSSTSTNGGWYSQELDSTSQERMKWVQKNYMIYNYCTDTKRFPQGLPLECTATTTS

SEQ ID NO: 2238 - protein, 296 aa, Vitis vinifera
  misc_feature (31)..(212): Pfam Name: Glyco_hydro_16 Pfam Description: Glycosyl hydrolases family 16
  misc_feature (236)..(290): Pfam Name: XET_C Pfam Description: Xyloglucan endo-transglycosylase (XET)
  misc_feature: Public GI ID no. 225446115
  misc_feature: Bit score of 686.6 for HMM based on sequences of Figure 46
  misc_feature: Functional Homolog Of SEQ ID NO. 2190
MASPSTSNLSPKLLLMSLLLGSFVVASVGNLYQDFDLTWGDGRAKILNNGQLLTLSLDKASGSGFQSKNEYLFGKIDMQLKLVPGNSAGTVTAYYLSSQGPTHDEIDFEFLGNLSGDPYILHTNVFSQGKGNREQQFYLWFDPTADFHTYSILWNPQRIIFSVDGTPIREFKNSESIGVPFPKNQPMRIYSSLWNADDWATRGGLVKTDWSQAPFTASYRNFNANACVWSSGSSSCSSTSPSSTSTNSGWYSQELDSTSQERMKWVQKNYMIYNYCTDTKRFPQGLSPECTATTTS

SEQ ID NO: 2239 - protein, 287 aa, Vitis vinifera
  misc_feature (22)..(203): Pfam Name: Glyco_hydro_16 Pfam Description: Glycosyl hydrolases family 16
  misc_feature (227)..(281): Pfam Name: XET_C Pfam Description: Xyloglucan endo-transglycosylase (XET)
  misc_feature: Public GI ID no. 147854714
  misc_feature: Bit score of 686.5 for HMM based on sequences of Figure 46
  misc_feature: Functional Homolog Of SEQ ID NO. 2190
  misc_feature (23)..(23): Xaa is any aa, unknown, or other
  misc_feature (27)..(27): Xaa is any aa, unknown, or other
  misc_feature (283)..(283): Xaa is any aa, unknown, or other
MDVLFLVSLLLGSFVVASVGNLXQDFXITWGDGRAKILNNGELLTLSLDKTSGSGFQSKNEYLFGKIDMQLKLVPGNSAGTVTAYYLSSQGPTHDEIDFEFLGNLSGDPYILHTNVFSQGKGNREQQFYLWFDPTADFHTYSILWNPQRIIFSVDGTPIREFKNSESIGVSYPKNQPMRIYSSLWNADDWATRGGLVKTDWSQAPFTASYRNFNADACIWSSGASSCSSNTPTSTSTNTEWYSQELDSTSQERMKWVQKNYMIYNYCSDTKRFPQGLPPECTXTTMS

SEQ ID NO: 2240 - protein, 304 aa, Sagittaria pygmaea
  misc_feature (41)..(222): Pfam Name: Glyco_hydro_16 Pfam Description: Glycosyl hydrolases family 16
  misc_feature (248)..(301): Pfam Name: XET_C Pfam Description: Xyloglucan endo-transglycosylase (XET)
  misc_feature: Public GI ID no. 68532877
  misc_feature: Bit score of 627.1 for HMM based on sequences of Figure 46
  misc_feature: Functional Homolog Of SEQ ID NO. 2190
MALRPSLHKQFALLVAASVLAFCCSAAGRSVGLAPASPSSFNNDFDITWGDGRGKILNNGQLLSLSLDKTSGSGFQSKNQYLFGNIDMQLKLVPGNSAGTVTAYYLSSQGPTHDEIDFEFLGNVSGQPYTLHTNVFSQGKGNREQQFRLWFDPTKDFHTYSILWNPSHIVFYVDGTPIRDFRNNEARGVPFPKAQPMRIYSSLWNADDWATQGGRIKTDWTQAPFTASYRGFKADACAVGSTGSSSKCAALQTTAGNTNWWIRQELDATGQERMRWVQRNHMIYNYCTDVNRFPQGLPTECSVA

SEQ ID NO: 2241 - protein, 295 aa, Vitis vinifera
  misc_feature (31)..(212): Pfam Name: Glyco_hydro_16 Pfam Description: Glycosyl hydrolases family 16
  misc_feature (236)..(290): Pfam Name: XET_C Pfam Description: Xyloglucan endo-transglycosylase (XET)
  misc_feature: Public GI ID no. 147779866
  misc_feature: Bit score of 682.1 for HMM based on sequences of Figure 46
  misc_feature: Functional Homolog Of SEQ ID NO. 2190
  misc_feature (211)..(211): Xaa is any aa, unknown, or other
MASPSTSNLSPKLLLVSVLFGSLVIASVGNLHKDFDITWGDGRAKILDNGQLLTLSLDKTSGSGFQSKNEYMFGKIDMQLKLVPGNSAGTVTAYYLSSQGPTHDEIDFEFLGNLSGDPYILHTNVFSQGKGNREQQFYLWFDPTADFHSYSILWNPQRIIFSVDGTPIREFKNSESIGVPYPKNQPMRIYSSLWNADDWATRGGLVKTDWXQAPFTASYRNFNADACIWSSGASSCSSTTPSSTSTSGQWYSQELDSTSQERMKWVQKNYMIYNYCTDTKRFPQGLPPECRHHIL

SEQ ID NO: 2242 - DNA, 1057 bp, Gossypium hirsutum
  misc_feature: Ceres Clone ID no. 100062911
  misc_feature: Encodes the peptide sequence at SEQ ID NO. 2243
cataaatcctctgctctgcaaaaaaaatcgaaagtcaaaaatgagttcttcaggtttcaaatttaccttgcttgttccgcttatggttgcttgtctcatggcatcatcagccagcaatttccacaatgattttgacataacatggggagacggccgtggtaaaatcgtcaacaatggagaggttctcactctctcccttgataaagcttctggttctggtttccaatccaagaacgagtacctattcggcaagattgatatgcagctcaagcttgtccctggaaactccgctggcacagtcactgcttactatctatcttcgaaaggatcaacatgggatgaaattgatttcgagttccttgggaatttaagtggtgacccttacattcttcacacaaatgtgttcagtcaaggaaagggtaacagagaacaacaattctacctctggtttgacccaactgtagatttccatacttattcaatcctttggaatccccaacgtataatcttctctgttgacggtacacccattagagagttcaaaaacatggaatcatttggtgtcccgtttcctaagaaccagccgatgagaatttactctagcttgtggaatgctgatgattgggccacaaggggtggtttggttaagaccgactggactcaagctcctttcactgcctcttacaggaacttcaatgccgatgcttgtgtgtggaccaatggggcttcttcgtgtaaatcgaatgcttcaccatcttctgcatcgacaaacagtgcatggttctctcaagaaatggattcagctaagcaacaaaggttgaaatgggtgcaaaagaactacatgatatacaactactgcaatgatgctaagagatttcctcaaggtctacctccagagtgcaatatgtcttaaaaaacttgacaagcctattagatcaaattgttttagagattaatattcaattatattcttttattatttgttctttattcaaaaccaggtcataagtcttttatcttttgaaatttcccatcaaaaaaaagttaaggcggccgc

SEQ ID NO: 2243 - protein, 290 aa, Gossypium hirsutum
  misc_feature (27)..(208): Pfam Name: Glyco_hydro_16 Pfam Description: Glycosyl hydrolases family 16
  misc_feature (232)..(287): Pfam Name: XET_C Pfam Description: Xyloglucan endo-transglycosylase (XET)
  misc_feature: Ceres Clone ID no. 100062911
  misc_feature: Bit score of 662.6 for HMM based on sequences of Figure 46
  misc_feature: Functional Homolog Of SEQ ID NO. 2190
MSSSGFKFTLLVPLMVACLMASSASNFHNDFDITWGDGRGKIVNNGEVLTLSLDKASGSGFQSKNEYLFGKIDMQLKLVPGNSAGTVTAYYLSSKGSTWDEIDFEFLGNLSGDPYILHTNVFSQGKGNREQQFYLWFDPTVDFHTYSILWNPQRIIFSVDGTPIREFKNMESFGVPFPKNQPMRIYSSLWNADDWATRGGLVKTDWTQAPFTASYRNFNADACVWTNGASSCKSNASPSSASTNSAWFSQEMDSAKQQRLKWVQKNYMIYNYCNDAKRFPQGLPPECNMS

SEQ ID NO: 2244 - protein, 296 aa, Vitis vinifera
  misc_feature (31)..(212): Pfam Name: Glyco_hydro_16 Pfam Description: Glycosyl hydrolases family 16
  misc_feature (236)..(290): Pfam Name: XET_C Pfam Description: Xyloglucan endo-transglycosylase (XET)
  misc_feature: Public GI ID no. 225446117
  misc_feature: Bit score of 683.1 for HMM based on sequences of Figure 46
  misc_feature: Functional Homolog Of SEQ ID NO. 2190
MTYPTTSNLSPKLLLLSLLLGSFVVASVGNLYQDFDITWGDGRAKILNNGQLLTLSLDKASGSGFRSNNEYLFGKIDMQLKLVPGNSAGTVTAYYLSSQGPTHDEIDFEFLGNLSGDPYILHTNVFSQGKGNREQQFYLWFDPTADFHTYSVLWNPQRIIFSVDGTPIREFKNSESIGVPYPKNQPMRIYSSLWNADDWATRGGLVKTDWSQAPFTASYRNFNANACVWSSGSSSCSSTSPSSTSTNGGWYSQELDSTSQERMTWVQKNYMIYNYCTDTKRFPQGLPPECTATTMS

SEQ ID NO: 2245 - DNA, 1037 bp, Gossypium hirsutum
  misc_feature: Ceres Clone ID no. 1832719
  misc_feature: Encodes the peptide sequence at SEQ ID NO. 2246
ataatatcataatccaattagaatagaaacaccatacagacaaataaaatatgaagagttcattgctagtatctgttgtaatcagcttggtaatagttgcttcagccgccaactttaaccaagacatcgacgttacttggggagatgggaggggcaagattctcgaaaacggaaaccttctcactctcaccctcgacaaattctccgggtctggttttcaatccaagaaccaatatctgtttgggaagatcgatatgaacattaagctggttccaggcaactctgctggcactgttaccacttactatcttcgttcggaagggtcgacatgggatgaaattgacttcgaattcttggggaacctaagcggagacccatacatagtccacaccaatgtatatacacaaggcaaaggtgacaaagaacagcagttctacctttggttcgatcctaccaaagacttccatacctactcccttctttggaaccctcaacgtattatcttctctgttgatgggacaccaattagagagttcaagaacttggaatcaaagggcgttgcgttcccaaagagccagccgatgagagtgtattcgagtctttggaacgccgatgattgggccactcgaggtggccttgttaagacggattggagccaagctccattcactgcttcttacaggactttcaaagctgatgcatgtgtctggtcttccggtaaatcatcatgttcctccacctcaccctcccaaaattcatggctgtcgcaagaactggatataacgagccaacaaaggctcaaatgggttcagaaaaattatatgatttacaattactgcaccgacaccaagcgatttgctatgggacttcctaaagagtgcactgcttcttaatttgttgattaaaacttccttcgctagtcatgcctaaggacagatactttgttcaaaagcagcctctcacagtattcttttgtttcattctatgttttgtaacatgtaaaactaagctcaataaataatactattcaatttcgg

SEQ ID NO: 2246 - protein, 280 aa, Gossypium hirsutum
  misc_feature (22)..(203): Pfam Name: Glyco_hydro_16 Pfam Description: Glycosyl hydrolases family 16
  misc_feature (227)..(277): Pfam Name: XET_C Pfam Description: Xyloglucan endo-transglycosylase (XET)
  misc_feature: Ceres Clone ID no. 1832719
  misc_feature: Bit score of 651.7 for HMM based on sequences of Figure 46
  misc_feature: Functional Homolog Of SEQ ID NO. 2190
MKSSLLVSVVISLVIVASAANFNQDIDVTWGDGRGKILENGNLLTLTLDKFSGSGFQSKNQYLFGKIDMNIKLVPGNSAGTVTTYYLRSEGSTWDEIDFEFLGNLSGDPYIVHTNVYTQGKGDKEQQFYLWFDPTKDFHTYSLLWNPQRIIFSVDGTPIREFKNLESKGVAFPKSQPMRVYSSLWNADDWATRGGLVKTDWSQAPFTASYRTFKADACVWSSGKSSCSSTSPSQNSWLSQELDITSQQRLKWVQKNYMIYNYCTDTKRFAMGLPKECTAS

SEQ ID NO: 2247 - DNA, 987 bp, Gossypium hirsutum
  misc_feature: Ceres Clone ID no. 1793297
  misc_feature: Encodes the peptide sequence at SEQ ID NO. 2248
aacatcctaatacaaacctaccaaaaaaaatgaggacttccttgctgctactatctgccttaatcagctttgtaatggttgcttccgccgccaactttaaccaagacatccacgttacttggggagatgggaggggcaagattctcgaaaacggaaaccttctccctctcaccctcgacaaattctccggctctggttttcaatccaagaaccaatatctgtttgggaagattgatatgaacattaagctggtcccaagcaactctgctggcactgttaccacttactatcttcgttcggaagggtcgacatgggatgaaatcgacttcgagttcttggggaacctaagcggagacccatacatagtccacaccaatgtatatacacaaggcaaaggtgacaaagagcaacagttctacctttggttcgatcccaccaaagacttccacacctactcccttctttggaaccctcaacgtattatcttctctgttgatgggactccgctcagagagttcaagaacttggaatcgaagggcgttgcgttcccaaagagccagccgatgagagtgtattcgagtctttggaacgccgatgattgggccactcgaggtggtcttgttaagacagattggagccaagctcctttcactgctgcttacaggaattacaaggctgatacatgtgtgtggtcttccgggaaatcatcatgttcctccacctcgccctctcaaaattcatggctatcgcaagaactggatataacgagccaagaaaggctgaaatgggttcagaaaaattacatgatttacaattactgcactgataccaagcgattccctcagggacttcctaaagaatgcactgctccttaacagggattttaatttaattaatttcctcaatagtattcttttgtttcattatacatatattgtaacatgtaatataagctcaataataatattctatttcgaatattaaacg

SEQ ID NO: 2248 - protein, 281 aa, Gossypium hirsutum
  misc_feature (23)..(204): Pfam Name: Glyco_hydro_16 Pfam Description: Glycosyl hydrolases family 16
  misc_feature (228)..(278): Pfam Name: XET_C Pfam Description: Xyloglucan endo-transglycosylase (XET)
  misc_feature: Ceres Clone ID no. 1793297
  misc_feature: Bit score of 644.1 for HMM based on sequences of Figure 46
  misc_feature: Functional Homolog Of SEQ ID NO. 2190
MRTSLLLLSALISFVMVASAANFNQDIHVTWGDGRGKILENGNLLPLTLDKFSGSGFQSKNQYLFGKIDMNIKLVPSNSAGTVTTYYLRSEGSTWDEIDFEFLGNLSGDPYIVHTNVYTQGKGDKEQQFYLWFDPTKDFHTYSLLWNPQRIIFSVDGTPLREFKNLESKGVAFPKSQPMRVYSSLWNADDWATRGGLVKTDWSQAPFTAAYRNYKADTCVWSSGKSSCSSTSPSQNSWLSQELDITSQERLKWVQKNYMIYNYCTDTKRFPQGLPKECTAP

SEQ ID NO: 2249 - DNA, 1190 bp, Gossypium hirsutum
  misc_feature: Ceres Clone ID no. 1848637
  misc_feature: Encodes the peptide sequence at SEQ ID NO. 2250
aaaaacccctctcttcttctctctttttctcattcattctttagtttcaatatcaaagcaaaaatgggttcttcttgtaatgttgtttcaatggccttactggcttgtttggtgttgaactccttggtttttgttgcccacggtggtgacttttaccaggatttcgacctaacatggggtgacagaagaggcaagattttcaatggtggcaagctcttgtctttgtctttagacagggtttcagggtctggttttcaatctaagaaagagtatttgtttggaaggatcgatatgcaactcaagcttgttgctggcaactcagctggcactgtcactgcttattatctgtcatctcaagggccaacccatgatgagatagactttgaattcttagggaatctgagcggtgacccttacattttacacaccaatgtctttacacaaggcaaaggcaacagagaacaacagttctatctttggtttgaccctacaagaaacttccacacctattccatcatttggaaaccccaacacatcattttcttggtggataacacccccattagagtcttcaaaaatgctgaatccattggtgtaccattccccaagagccaacccatgaggatttactctagtttatggaatgctgatgattgggccacaaggggtggattagtgaaaactgattgggcaaaagcacctttcacagcttattacaggaacttcaatgccaatgcttgtgtctggtcaggaacaagttcatcatgtgctaaaactaactcggtctccgccggtgcatgggaaacaaacgaacttgatgcaccaggaagaagaagattaagatgggttcaaaaatatttcatgatttataactattgcactgatttgaaacgtttccctcaaggtgttccaccagagtgtaaacgcccaaggttctaaaatcaaacctgttccaccagagtgtaaacgcccagggttctaaaatcaaacctctcctcttttccatgtaatatattctttttttcactactttcttactatgtattcaagttgaataagttattattattattattattctttttatgtatttttatttctctttgttgcttcttaaatcatcttgaaaatagatgtaaattccctgtttctgataataaaattttcctctttttgagtatttaatattc

SEQ ID NO: 2250 - protein, 291 aa, Gossypium hirsutum
  misc_feature (30)..(211): Pfam Name: Glyco_hydro_16 Pfam Description: Glycosyl hydrolases family 16
  misc_feature (235)..(286): Pfam Name: XET_C Pfam Description: Xyloglucan endo-transglycosylase (XET)
  misc_feature: Ceres Clone ID no. 1848637
  misc_feature: Bit score of 628.7 for HMM based on sequences of Figure 46
  misc_feature: Functional Homolog Of SEQ ID NO. 2190
MGSSCNVVSMALLACLVLNSLVFVAHGGDFYQDFDLTWGDRRGKIFNGGKLLSLSLDRVSGSGFQSKKEYLFGRIDMQLKLVAGNSAGTVTAYYLSSQGPTHDEIDFEFLGNLSGDPYILHTNVFTQGKGNREQQFYLWFDPTRNFHTYSIIWKPQHIIFLVDNTPIRVFKNAESIGVPFPKSQPMRIYSSLWNADDWATRGGLVKTDWAKAPFTAYYRNFNANACVWSGTSSSCAKTNSVSAGAWETNELDAPGRRRLRWVQKYFMIYNYCTDLKRFPQGVPPECKRPRF

SEQ ID NO: 2251 - protein, 285 aa, Vitis vinifera
  misc_feature (22)..(203): Pfam Name: Glyco_hydro_16 Pfam Description: Glycosyl hydrolases family 16
  misc_feature (227)..(279): Pfam Name: XET_C Pfam Description: Xyloglucan endo-transglycosylase (XET)
  misc_feature: Public GI ID no. 225446103
  misc_feature: Bit score of 677.4 for HMM based on sequences of Figure 46
  misc_feature: Functional Homolog Of SEQ ID NO. 2190
MASSSILVLMLSMLVVASGGNFNQDFDITWGDGRAKILNNGQLLTLSLDKASGSGFQSRNEYLFGKIDMQLKLVSGNSAGTVTAYYLSSQGSAHDEIDFEFLGNLSGDPYILHTNVFSQGKGNREQQFYLWFDPTADFHTYSILWNPQLIIFSVDGTPIRQFKNLESKGVAYPKNQPMRIYSSLWNADDWATRGGLVKTDWSQAPFTASYRNFNANACVWSSGSSSCSKNSSSTTSNAWLYQELDSSSQEKLKWVQKNYMIYNYCTDTKRFPQGLPPECTATNNS

SEQ ID NO: 2252 - DNA, 1067 bp, Arabidopsis thaliana
  misc_feature: Ceres Annot ID no. 1362908
  misc_feature: Encodes the peptide sequence at SEQ ID NO. 2253
acaaaccaatctaactcaatacaagaatatctacaatctctagaaaatggcgatcacttacttgcttcctctgtttctttctcttatcatcacctcctctgtttcagctaatttccaaagagacgttgagatcacttggggtgatggtcgtggacagatcaagaacaatggagagcttctcactttatctctagataaatcctctggttctggattccaatccaaaaacgagtacttgtttggtaaagtctccatgcaaatgaagcttgtccctggaaactccgcaggaacagtcacaacactttacttgaaatcacctggaacaacatgggacgagatagatttcgagtttttagggaattcaagtggagaaccttacacacttcacacaaatgtctacacacaaggcaaaggagacaaagaacaacaattcaaactctggtttgatccaacagctaatttccacacttacactattctctggaacccacaaagaatcattttcaccgtcgatggaactccgatcagagaattcaagaacatggagtctctaggcactctgtttcccaagaacaaaccaatgagaatgtactcgagtctttggaacgctgatgattgggcaacgagaggtggtttggtcaaaaccgattggtctaaagctcctttcactgcttcttaccgtggctttcaacaagaagcttgtgtttggtcaaacggcaagtcttcttgtcctaatgcctcgaaacaggggactactactggctcgtggttgtcacaagagcttgactcaacagctcaacaaaggatgagatgggtgcagaggaactacatgatctataattattgtacggatgcgaagaggttccctcaaggtcttcctaaagagtgcttagctgcatagagagagtaaagagttgagagaggaacaagattttatttttctttgtggttataaaattctattcattttattgtagatcacgtgaattttattgatttgttttgtagtatactctatagttcgttaaagttataatattctctttgttacaatgtgcttttttgtt

SEQ ID NO: 2253 - protein, 284 aa, Arabidopsis thaliana
  misc_feature (23)..(204): Pfam Name: Glyco_hydro_16 Pfam Description: Glycosyl hydrolases family 16
  misc_feature (228)..(281): Pfam Name: XET_C Pfam Description: Xyloglucan endo-transglycosylase (XET)
  misc_feature: Ceres Annot ID no. 1362908
  misc_feature: Bit score of 623.8 for HMM based on sequences of Figure 46
  misc_feature: Functional Homolog Of SEQ ID NO. 2190
MAITYLLPLFLSLIITSSVSANFQRDVEITWGDGRGQIKNNGELLTLSLDKSSGSGFQSKNEYLFGKVSMQMKLVPGNSAGTVTTLYLKSPGTTWDEIDFEFLGNSSGEPYTLHTNVYTQGKGDKEQQFKLWFDPTANFHTYTILWNPQRIIFTVDGTPIREFKNMESLGTLFPKNKPMRMYSSLWNADDWATRGGLVKTDWSKAPFTASYRGFQQEACVWSNGKSSCPNASKQGTTTGSWLSQELDSTAQQRMRWVQRNYMIYNYCTDAKRFPQGLPKECLAA

SEQ ID NO: 2254 - DNA, 1052 bp, Gossypium hirsutum
  misc_feature: Ceres Clone ID no. 100064069
  misc_feature: Encodes the peptide sequence at SEQ ID NO. 2255
ataatctgaactacaatacaagcccaccaaaataatgaccacttcgttgcttctatctcttttattcagctttgtagtacttgcctcagctgccaactttaaccaagacatcgatgttacttggggtgatggcaggggcaagattctcgaaaacggaaaccttctcactctcaccctcgacaaattctccggctctggttttcaatccaagaaccaatatctgtttgggaagatcgatatgaacattaaactggtcccaggcaactctgctggcactgttaccacttactatcttcgttcggaagggtcgacatgggatgaaatcgacttcgagttcttggggaacctaagcggagacccatacatagtccacaccaatgtatatacacaaggcaaaggtgacaaagagcaacagttctacctctggttcgatcccaccaaagacttccacacctactcccttctttggaaccctcaacgtattatcttctctgttgatgggactccgctcagagagttcaagaacttggaatcgatgggcgttgcgttcccaaagagccagccgatgagagtgtattcgagtctttggaacgctgatgattgggccactcgaggtggtcttgttaagacagattggagccaagctcctttcactgctgcttacaggaattacaaggctgatgcatgtgtctggtcctccgggaaatcatcatgttcctccacctcgccctctcaaaattcatggctatcgcaagaactggatataacgagccaacaaagactaaaatgggttcagaaaaattacatgatctacaattactgcactgacaccaagcgattccctcagggacttcccaaagaatgcagtgttcattaacagggattctaaatttgttatagtagagattttattggttaaatttgtgaatgttctttaaatctttgttcactagtgagtaatatacttaaagacagatattgtgtgtatttgttctatgttcagtaacgtgtaatctaagttcaataataaatgttattatagtactttcggc

SEQ ID NO: 2255 - protein, 280 aa, Gossypium hirsutum
  misc_feature (22)..(203): Pfam Name: Glyco_hydro_16 Pfam Description: Glycosyl hydrolases family 16
  misc_feature (227)..(277): Pfam Name: XET_C Pfam Description: Xyloglucan endo-transglycosylase (XET)
  misc_feature: Ceres Clone ID no. 100064069
  misc_feature: Bit score of 647.5 for HMM based on sequences of Figure 46
  misc_feature: Functional Homolog Of SEQ ID NO. 2190
MTTSLLLSLLFSFVVLASAANFNQDIDVTWGDGRGKILENGNLLTLTLDKFSGSGFQSKNQYLFGKIDMNIKLVPGNSAGTVTTYYLRSEGSTWDEIDFEFLGNLSGDPYIVHTNVYTQGKGDKEQQFYLWFDPTKDFHTYSLLWNPQRIIFSVDGTPLREFKNLESMGVAFPKSQPMRVYSSLWNADDWATRGGLVKTDWSQAPFTAAYRNYKADACVWSSGKSSCSSTSPSQNSWLSQELDITSQQRLKWVQKNYMIYNYCTDTKRFPQGLPKECSVH

SEQ ID NO: 2256 - DNA, 1170 bp, Populus balsamifera subsp. trichocarpa
  misc_feature: Ceres Annot ID no. 1469128
  misc_feature: Encodes the peptide sequence at SEQ ID NO. 2257
atgagaatgtccaactgcttaatcctttcaattaaaaagaaatatgggttcactgggaaagcaggaggcatacccctttcaaaggcagatattgctgctggtgttgctgattccttagccatcatatactttaattgttttttccagcgaaggccatgtttcgcggcagttctttggtttgcacatcaaattgtgcagaatgaatcaagaagagcatcagcactgaggaaaacaggaaagaatggccaaggacataagccattaacagctttgatgctaacgactccatacacaatccttaccaccaccgactcaatggtgacggtagtgggtttagtcagttctttgatggggtcatctcttggtaacttctaccaaaactttgatattacatggggagatggccgtgctaagatactcaacaatggtgagcttcttactctcaatcttgacaaagcttctggctcaggattccaatccaagaacgagtatttatttggaaagattgatatgcaactcaagcttgtccctggcaactccgctggcactgtaactgcctattatttgtcatcaaaagggtcaacatgggatgagatagacttcgagttcttggggaacttgagtggcgatccttacattctccataccaatgtgtttagccaaggcaaaggcaacagggagcaacaattttacctctggtttgatccaactactgatttccacacctactccatcctctggaacccacaaagaatcattttctctgtagatggcacccctattagagaattcaagaacatggaatcaagaggtgttccattcccaaagaatcagccaatgagaatttactctagtttatggaatgcagatgactgggctacaagaggtggcttagtgaagactgattggtcaaaagctcctttcactgcttcttataagaacttcaatgctaaggatgcttgtgtctggtccaatggtgcatcttcttgtggtacaaattcctctgctgctgcagcctcctccaccaccaacgcttggctttcagaagagcttggttcaacaagtcaagagaggctagaatgggtcaaaaaaaactacatgatatacaattactgcacagacgctaagaggtttcctcaaggacttcctccagaatgcagcgcttcttaa

SEQ ID NO: 2257 - protein, 298 aa, Populus balsamifera subsp. trichocarpa
  misc_feature (33)..(214): Pfam Name: Glyco_hydro_16 Pfam Description: Glycosyl hydrolases family 16
  misc_feature (239)..(295): Pfam Name: XET_C Pfam Description: Xyloglucan endo-transglycosylase (XET)
  misc_feature: Ceres Annot ID no. 1469128
  misc_feature: Bit score of 657.2 for HMM based on sequences of Figure 46
  misc_feature: Functional Homolog Of SEQ ID NO. 2190
MLTTPYTILTTTDSMVTVVGLVSSLMGSSLGNFYQNFDITWGDGRAKILNNGELLTLNLDKASGSGFQSKNEYLFGKIDMQLKLVPGNSAGTVTAYYLSSKGSTWDEIDFEFLGNLSGDPYILHTNVFSQGKGNREQQFYLWFDPTTDFHTYSILWNPQRIIFSVDGTPIREFKNMESRGVPFPKNQPMRIYSSLWNADDWATRGGLVKTDWSKAPFTASYKNFNAKDACVWSNGASSCGTNSSAAAASSTTNAWLSEELGSTSQERLEWVKKNYMIYNYCTDAKRFPQGLPPECSAS

SEQ ID NO: 2258 - DNA, 1116 bp, Glycine max
  misc_feature: Ceres Clone ID no. 656868
  misc_feature: Encodes the peptide sequence at SEQ ID NO. 2259
atgacattatccattcactaatcactaccaattgctaaagatatttcactcactggtcacactactaatacagctttctggagatggcttcaactgtctcttacatgcttctacttccccttctagtgatggttgcctttgctggggacttaaacaaagactttgacatcacatggggagatggccgctccaagatactaaaccatggagagttactcactctttcattggacaaagcatctggctcaggttttcaatcaaagaatgagtatctctttgggaagattgacatgcagctcaagcttgtccctggaaactctgctggcaccgtcactacctattatttatcttcaaaaggatcaacttgggatgaaatagactatgaatttcttggaaatctgagtggtgatccatacatccttcacacaaacgttttcagccaaggcaagggggacagggaacaacaattctatctatggtttgacccaactgctgatttccacacttactccatcatgtggaacccccagaggattatattctcagttgatggcactcccattagagagttcaagaactcggaggctattggggttcccttcccaaagaatcagccaatgaggatatattctagtttgtggaatgctgatgactgggcaacaagaggtggacttgtgaagacagattggacacaagctccgttcacagcttcctacagaaacttcaatgctgaggcttgcatatggtcttctggagcatcttcttgcgctaaaacttcttctacacccaccagtggcagtggttcatggctttcacaggaattggacgctacaggccatcagaggttgaagtgggtgcagaagaactacatgatttacaattattgcacagacactaagcgcttcccacagggtcttcctccagaatgcaacatctcttgagagaaaaacattgcaacgcattccttatattttctatgatcagaatgtcataccactaccagtattagttttattgttgtagctactgtagttaaattctttcatttgttcccctgtttggcatcactatgtaaacaaatatggccatttttataataaaataaattcttttgcc

SEQ ID NO: 2259 - protein, 285 aa, Glycine max
  misc_feature (23)..(204): Pfam Name: Glyco_hydro_16 Pfam Description: Glycosyl hydrolases family 16
  misc_feature (228)..(282): Pfam Name: XET_C Pfam Description: Xyloglucan endo-transglycosylase (XET)
  misc_feature: Ceres Clone ID no. 656868
  misc_feature: Bit score of 669.6 for HMM based on sequences of Figure 46
  misc_feature: Functional Homolog Of SEQ ID NO. 2190
MASTVSYMLLLPLLVMVAFAGDLNKDFDITWGDGRSKILNHGELLTLSLDKASGSGFQSKNEYLFGKIDMQLKLVPGNSAGTVTTYYLSSKGSTWDEIDYEFLGNLSGDPYILHTNVFSQGKGDREQQFYLWFDPTADFHTYSIMWNPQRIIFSVDGTPIREFKNSEAIGVPFPKNQPMRIYSSLWNADDWATRGGLVKTDWTQAPFTASYRNFNAEACIWSSGASSCAKTSSTPTSGSGSWLSQELDATGHQRLKWVQKNYMIYNYCTDTKRFPQGLPPECNIS

SEQ ID NO: 2260 - DNA, 1094 bp, Gossypium hirsutum
  misc_feature: Ceres Clone ID no. 1793334
  misc_feature: Encodes the peptide sequence at SEQ ID NO. 2261
atcacctattctctgctgtgccaaaaaacaaaagacaaaatgagttattccagttcctccaagtttcccttgcttatgcctcttatggttgcctgtcttattatggcagcctcaggtagcaacttccacaacgattttgacatcacatggggagatgggcgtggtaagattgttaacaatggcgaggttctcactctctccctcgataaacaatctggttctggtttccaatccaagaatgagtatctttttggcaagattgatatgcagctcaagcttgtccctggaaactctgccggcactgtcactgcatactatttatcatcaaaaggaacaacgtgggatgaaattgatttcgagttccttggaaatctaagtggtgacccttatattctacacacaaatgcgtttagtcaaggaaaaggcaacagagaacaacaattctacctctggtttgacccaactacagatttgcatacttattccatcctatggaatccagaacgcatcatcttctccgtggatgatacacccattagagagttcaaaaacatggagtcgattggtgtcccatttcccaagaaccagcccatgagaatttactccagcttgtggaatgctgatgactgggccacaaggggtggtctggttaagaccgactggacccaagctcctttcactgcctcgtacaggaacttcaatgccgatgcttgtgtgtggtccaatggagcttcttcctgcaaatcaaatgccccatcttcttctacatcaacaaacaatgcatggttctctcaagagatggattcagcaaagcagcaaaggctacaatgggtgcagcagaattacatgatctacaattactgcactgacgccaagagatttcctcaaggtctaccttcagagtgcaagatgtcttaaggactagaacagaaaattagagatggtattatgttagtcttagagatcatcaatattcaatattctttaattttttttttcttttttttttcttaaaaccaagtggtgattctttttcatctttgagaattctcattgctttgtacgtgatacatgattaatttaattcccctttc

SEQ ID NO: 2261 - protein, 292 aa, Gossypium hirsutum
  misc_feature (29)..(210): Pfam Name: Glyco_hydro_16 Pfam Description: Glycosyl hydrolases family 16
  misc_feature (234)..(289): Pfam Name: XET_C Pfam Description: Xyloglucan endo-transglycosylase (XET)
  misc_feature: Ceres Clone ID no. 1793334
  misc_feature: Bit score of 654.0 for HMM based on sequences of Figure 46
  misc_feature: Functional Homolog Of SEQ ID NO. 2190
MSYSSSSKFPLLMPLMVACLIMAASGSNFHNDFDITWGDGRGKIVNNGEVLTLSLDKQSGSGFQSKNEYLFGKIDMQLKLVPGNSAGTVTAYYLSSKGTTWDEIDFEFLGNLSGDPYILHTNAFSQGKGNREQQFYLWFDPTTDLHTYSILWNPERIIFSVDDTPIREFKNMESIGVPFPKNQPMRIYSSLWNADDWATRGGLVKTDWTQAPFTASYRNFNADACVWSNGASSCKSNAPSSSTSTNNAWFSQEMDSAKQQRLQWVQQNYMIYNYCTDAKRFPQGLPSECKMS

SEQ ID NO: 2262 - protein, 283 aa, Cucumis sativus
  misc_feature (24)..(205): Pfam Name: Glyco_hydro_16 Pfam Description: Glycosyl hydrolases family 16
  misc_feature (229)..(280): Pfam Name: XET_C Pfam Description: Xyloglucan endo-transglycosylase (XET)
  misc_feature: Public GI ID no. 29500891
  misc_feature: Bit score of 652.3 for HMM based on sequences of Figure 46
  misc_feature: Functional Homolog Of SEQ ID NO. 2190
MASTTLFLTLLFSASLIAISSANFNQDFQITWGDGRAKILNNGELLTLSLDKASGSGFQSQNEYLFGKIDMQLKLVAGNSAGTVTAYYLSSKGSTWDEIDFEFLGNLSGDPYTLHTNVFSQGKGNREQQFHLWFDPTADFHTYSILWNPNRIIFSVDGTPIREFKNWESNGVPFPKDQPMRIYSSLWNADDWATRGGLVKTDWTKAPFTASYKNFKAEACVWSGGKSSCSPSPAGSSNSWLSQEMDSASQERLKWVQKNYMIYNYCTDTKRFPQGLPTECNLP

SEQ ID NO: 2263 - DNA, 1142 bp, Gossypium hirsutum
  misc_feature: Ceres Clone ID no. 1895226
  misc_feature: Encodes the peptide sequence at SEQ ID NO. 2264
acaaaacccctctcttcttctctcttttactcattcattctttagtttcaatatcaaagcaaaaatggcttcttcttgtaatgttgtttcaatggctttactggcttgtttggtgttgaactccttggtttttgttgcccatggtggtgacttttaccaggatttcgacctaacatggggtgacaaaagaggcaagattttcaatggtggcaagctcttgtctttgtctttagacagggtttcagggtctggttttaaatccaagaaagagtatttgtttggaaggattgatatgcaactcaagcttgttgctggcaactcagctggcactgtcactgcttattatctgtcatctcaagggccaacccatgatgagatagactttgaattcttagggaatctgagtggtgacccttacattttacacaccaatgtcttcacacaaggcaaaggcaacagagaacaacagttttatctttggtttgaccctacaagaaagttccacacctattccatcatttggaaaccccaacacatcattttcttggtggataacatccccattagagtcttcaaaaatgctgaatccattggtgtaccgttccccaagagccaacccatgaggatttactctagtttatggaatgctgatgattgggccacaaggggtgggttagtgaaaactgattgggcaaaagcacctttcacagcttattacaggaacttcattgccaatgcttgtgtctggtcaggaagaagttcatcatgcgctaaaactaactcggtctccgccggtgcatgggaaacaaacgaacttgatgcaccaggaagaagaagattaagatgggttcaaaaatatttcatgatttataactattgtactgatttgaaacgtttccctcaaggtgttccaccagagtgtaaacgcccaaggttctaaaatcaaacctctcctcctttccatgtaatatattctttttttcactactttcttactatgtattcaagttgcactcaacttgatgcttggggatggatggaataagttgctattattattattcttttttttatgtatttttatttcgttttgttgcttcttaaatcatcttgaaaatagatgtaaattccctgtttctgac

SEQ ID NO: 2264 - protein, 291 aa, Gossypium hirsutum
  misc_feature (30)..(211): Pfam Name: Glyco_hydro_16 Pfam Description: Glycosyl hydrolases family 16
  misc_feature (235)..(286): Pfam Name: XET_C Pfam Description: Xyloglucan endo-transglycosylase (XET)
  misc_feature: Ceres Clone ID no. 1895226
  misc_feature: Bit score of 621.2 for HMM based on sequences of Figure 46
  misc_feature: Functional Homolog Of SEQ ID NO. 2190
MASSCNVVSMALLACLVLNSLVFVAHGGDFYQDFDLTWGDKRGKIFNGGKLLSLSLDRVSGSGFKSKKEYLFGRIDMQLKLVAGNSAGTVTAYYLSSQGPTHDEIDFEFLGNLSGDPYILHTNVFTQGKGNREQQFYLWFDPTRKFHTYSIIWKPQHIIFLVDNIPIRVFKNAESIGVPFPKSQPMRIYSSLWNADDWATRGGLVKTDWAKAPFTAYYRNFIANACVWSGRSSSCAKTNSVSAGAWETNELDAPGRRRLRWVQKYFMIYNYCTDLKRFPQGVPPECKRPRF

SEQ ID NO: 2265 - protein, 284 aa, Asparagus officinalis
  misc_feature (29)..(210): Pfam Name: Glyco_hydro_16 Pfam Description: Glycosyl hydrolases family 16
  misc_feature (234)..(281): Pfam Name: XET_C Pfam Description: Xyloglucan endo-transglycosylase (XET)
  misc_feature: Public GI ID no. 8886865
  misc_feature: Bit score of 632.6 for HMM based on sequences of Figure 46
  misc_feature: Functional Homolog Of SEQ ID NO. 2190
MSSSLMSQCVHIFLAATFVAMSGVHGGNFYRDFDLTWGDGRAKILNNGQMLTLSLDKVSGSGFQSKNQYLFGKIDMQLKLVPGNSAGTVTAYYLSSQGPTHDEIDFEFLGNLSGDPYILHTNIFTQGKGNREQQFYLWFDPTKDFHTYSILWNPQHIIFSVDGIPIRDFKNLEKYRIPFPKIQPMRLYSSLWDADNWATRGGLVKTDWSKAPFTASYRNFQAQACVLSSGRSRCGSGGNRWFNQQLDVASLKRLRWVQKNYMIYNYCTDVKRFPQGIPTECKHP

SEQ ID NO: 2266 - DNA, 1053 bp, Arabidopsis thaliana
  misc_feature: Ceres Annot ID no. 878947
  misc_feature: Encodes the peptide sequence at SEQ ID NO. 2267
aacaaacctaagctcaaagcccaccaaaaagaaaacaatcacttagcaatggcgatgatcagttactccaccattgtggttgctctgcttgcttcttttatgatttgctctgtttccgccaattttcaacgagacgtagagataacttggggagacggacgtggacagatcacaaacaacggcgatcttcttacactctctctcgacaaagcttcaggctcaggattccaatccaagaacgaatatttgttcggtaaaatcgacatgcagatcaaactcgttgccggaaactccgctggaactgtcaccgcttactatttgaaatcccctggatctacatgggacgagattgactttgagttcttgggaaacctaagtggtgatccttacacacttcatactaatgtctttacgcaaggaaaaggcgatagagaacaacaattcaaactctggttcgatcccactagtgatttccacacttactctatcctctggaacccacaacgcatcatattctccgtggatggaactcccataagagaattcaagaacatggaatctcaaggaactctgtttcctaagaaccagccaatgagaatgtactctagtctatggaacgctgaagaatgggccacaaggggtggtctcgtcaaaaccgactggtctaaagctcccttcactgcttcctaccgcggcttcaacgaagaagcttgcgtcgtgatcaacggccagtcttcatgccctaacgtgtcaggacaagggagtactggttcgtggttgtctcaggagctagactcgacgggtcaagaacagatgagatgggtacagaataactacatgatttacaattactgtacggacgctaaaaggttccctcaaggtcttccacgcgagtgcttagctgcgtaaagcttttaaacaaatgatccaaagccatgaaaagtaatactattctttgattcatcttataaagtatctgatgtttggttacatctgttttttatttattctatgtaagtatatttgtattcgaatattgatcaatcactttac

SEQ ID NO: 2267 - protein, 286 aa, Arabidopsis thaliana
  misc_feature (26)..(207): Pfam Name: Glyco_hydro_16 Pfam Description: Glycosyl hydrolases family 16
  misc_feature (231)..(283): Pfam Name: XET_C Pfam Description: Xyloglucan endo-transglycosylase (XET)
  misc_feature: Ceres Annot ID no. 878947
  misc_feature: Bit score of 634.3 for HMM based on sequences of Figure 46
  misc_feature: Functional Homolog Of SEQ ID NO. 2190
MAMISYSTIVVALLASFMICSVSANFQRDVEITWGDGRGQITNNGDLLTLSLDKASGSGFQSKNEYLFGKIDMQIKLVAGNSAGTVTAYYLKSPGSTWDEIDFEFLGNLSGDPYTLHTNVFTQGKGDREQQFKLWFDPTSDFHTYSILWNPQRIIFSVDGTPIREFKNMESQGTLFPKNQPMRMYSSLWNAEEWATRGGLVKTDWSKAPFTASYRGFNEEACVVINGQSSCPNVSGQGSTGSWLSQELDSTGQEQMRWVQNNYMIYNYCTDAKRFPQGLPRECLAA

SEQ ID NO: 2268 - DNA, 1137 bp, Brassica napus
  misc_feature: Ceres Clone ID no. 1045431
  misc_feature: Encodes the peptide sequence at SEQ ID NO. 2269
acattcctcaccaaactccaaacacatacacccacacgtacgcacacataacaatgtctcctttcaaaatattcctcttctcagctctccttgcggcggcgtttttagcctccaccgctgatttcaacagcgacgtcaacgtggcttggggaaacggccgtgggaagatactcaacaacggccagcttctcactctcaccttagacaaatcatctggttctggttttcaatccaaaacagagtatttgttcggtaagattgatatgcagattaagcttgttcctggtaactcagcaggcacggtcacaactttctacctgaagtctgaaggatctacttgggatgagattgattttgagttcttgggtaatatgactggagatccttatactctacacactaatgtgtacactcaaggtaaaggtgacaaagagcaacagttccatctctggttcgacccaacagccaatttccacacttactcaatcctctggaaccctcaaagaatcatattaaccgtcgatgacacaccgattagagagtttaaaaactccgagtcgctcggtgttttatttccaaagagcaagccgatgaggatgtacgcaagtttatggaacgcagacgattgggcaactagaggcggtctggttaaaacagattggtccaaggctccattcactgcttcttacaggaacattaagattgatggttgtgctcattccaacggaagatcgtcttgtacctcaacgaaaccaacctctaattggtacactcaagaaatggattcgactagccaagctagactcagatgggttcagaagaattacatgatctataattactgtacggatactaagaggtttccgcagggaatccctagggaatgtgcaacaagatcatagaagctttaagagagatcatatacatttaatctatttatcctccgctgctttctttcgctttatatgtaaagtactctgcttcttctttagttactacttgtgtgttgattctttcgattgtgtgaatcttggtccaataaaagcaaattaaaggtgtgtctatatatacatgttaagagattgtctattgtaaacaaaaatgtgtatgcaaatgataatagttgcccattctttc

SEQ ID NO: 2269 - protein, 282 aa, Brassica napus
  misc_feature (24)..(205): Pfam Name: Glyco_hydro_16 Pfam Description: Glycosyl hydrolases family 16
  misc_feature (229)..(278): Pfam Name: XET_C Pfam Description: Xyloglucan endo-transglycosylase (XET)
  misc_feature: Ceres Clone ID no. 1045431
  misc_feature: Bit score of 612.8 for HMM based on sequences of Figure 46
  misc_feature: Functional Homolog Of SEQ ID NO. 2190
MSPFKIFLFSALLAAAFLASTADFNSDVNVAWGNGRGKILNNGQLLTLTLDKSSGSGFQSKTEYLFGKIDMQIKLVPGNSAGTVTTFYLKSEGSTWDEIDFEFLGNMTGDPYTLHTNVYTQGKGDKEQQFHLWFDPTANFHTYSILWNPQRIILTVDDTPIREFKNSESLGVLFPKSKPMRMYASLWNADDWATRGGLVKTDWSKAPFTASYRNIKIDGCAHSNGRSSCTSTKPTSNWYTQEMDSTSQARLRWVQKNYMIYNYCTDTKRFPQGIPRECATRS

SEQ ID NO: 2270 - protein, 282 aa, Malus x domestica
  misc_feature (24)..(205): Pfam Name: Glyco_hydro_16 Pfam Description: Glycosyl hydrolases family 16
  misc_feature (229)..(279): Pfam Name: XET_C Pfam Description: Xyloglucan endo-transglycosylase (XET)
  misc_feature: Public GI ID no. 22947852
  misc_feature: Bit score of 653.6 for HMM based on sequences of Figure 46
  misc_feature: Functional Homolog Of SEQ ID NO. 2190
MTKIFLVLVLLVFNVLVATSAGNFNQDFDITWGDGRAKILDNGQSLTLSLDKTSGSGFQSKNQYLFGKIDMQIKLVPGNSAGTVTAYYLSSLGSTHDEIDFEFLGNLSGDPYILHTNIFTQGKGNREQQFYLWFDPTKDFHTYSILWNPQTIIFSVDGTPIREFKNLESKGVSFPKDQGMWIYSSLWNADDWATRGGLVKTDWSKAPFTASYRNFNAQACTWSSGTSRCPSKSPNESSWLTQSLDSTGQERIKWVQKNYMIYNYCRDTKRFPQGFPPECSAA

SEQ ID NO: 2271 - DNA, 1102 bp, Gossypium hirsutum
  misc_feature: Ceres Clone ID no. 1855067
  misc_feature: Encodes the peptide sequence at SEQ ID NO. 2272
aatcacataaattctctgttttatctctgctctgcaaaattatcaaaatacaaaatgatcagtttttcgagtttcaagtttaccttgcttctgcctcttatggttggctgtcttatggcagcagcagcgagcaacttcaacaatgattttgacatcacatggggagacgggcgtggtaagattggcaacaatggagaggtcctcactctctccctcgataaatcttctggttctggtttccagtctaagaatgagtatctcttcggcaagattgatatgcagctcaagcttgtccctggaaactctgctggcactgtcactgcctactatctttcttcgaaaggatcaacatgggatgaaattgatttcgagttccttggaaatctaagtggtgatccttacattcttcacacaaatgtgttcagtcaaggcaagggtaacagagagcaacaattctatctctggtttgacccaactgcagatttccacacttattccatcctctggagcccccaaagtatcatattctctgtggacggtacacccattagagagttcaagaacatggagtcaattggtgtcccatttcctaaaaatcagccgatgagaatttactctagcttgtggaatgctgatgactgggctacaaggggtggtctggttaagactgactggaccctagctcctttcactgcctcttacaggaacttcaatgccgatgcctgtgtgtggtccaatggagcctcttcctgcaaatcgactgctacatcaacaaacagtgcatggttctctcaagagatggattccgcaaagcagcaaaggttgcaatgggtgcagaagaactacatgatctacaactactgcaatgacgctaacagatttcctcaaggtctaccgcctgagtgcagtatgtcttaaaagatttgaagagccaattagagaaacttcttttttgagatttatattcaatattctttcttttttttttctttattcaaaccacgttgcccattcttttcatcttctgaaaattctgatcactttgtatgtgccaagttattatgaaaagatatgaaaaattaagaggattttaatttccctt

SEQ ID NO: 2272 - protein, 287 aa, Gossypium hirsutum
  misc_feature (28)..(209): Pfam Name: Glyco_hydro_16 Pfam Description: Glycosyl hydrolases family 16
  misc_feature (233)..(284): Pfam Name: XET_C Pfam Description: Xyloglucan endo-transglycosylase (XET)
  misc_feature: Ceres Clone ID no. 1855067
  misc_feature: Bit score of 644.6 for HMM based on sequences of Figure 46
  misc_feature: Functional Homolog Of SEQ ID NO. 2190
MISFSSFKFTLLLPLMVGCLMAAAASNFNNDFDITWGDGRGKIGNNGEVLTLSLDKSSGSGFQSKNEYLFGKIDMQLKLVPGNSAGTVTAYYLSSKGSTWDEIDFEFLGNLSGDPYILHTNVFSQGKGNREQQFYLWFDPTADFHTYSILWSPQSIIFSVDGTPIREFKNMESIGVPFPKNQPMRIYSSLWNADDWATRGGLVKTDWTLAPFTASYRNFNADACVWSNGASSCKSTATSTNSAWFSQEMDSAKQQRLQWVQKNYMIYNYCNDANRFPQGLPPECSMS

SEQ ID NO: 2273 - protein, 286 aa, Arabidopsis thaliana
  misc_feature (26)..(207): Pfam Name: Glyco_hydro_16 Pfam Description: Glycosyl hydrolases family 16
  misc_feature (231)..(283): Pfam Name: XET_C Pfam Description: Xyloglucan endo-transglycosylase (XET)
  misc_feature: Public GI ID no. 17064792
  misc_feature: Bit score of 631.0 for HMM based on sequences of Figure 46
  misc_feature: Functional Homolog Of SEQ ID NO. 2190
MAMISYSTIVVALLASFMICSVSANFQRDVEITWGDGRGQITNNGDLLTLSLDKASGSGFQSKNEYLFGKIDMQIELVAGNSAGTVTAYYLKSPGSTWDEIDFEFLGNLSGDPYTLHTNVFTQGKGDREQQFKLWFDPTSDFHTYSILWNPQRIIFSVDGTPIREFKNMESQGTLFPKNQPMRMYSSLWNAEEWATRGGLVKTDWSKAPFTASYRGFNEEACVVINGQSSCPNVSGQGSTGSWLSQELDSTGQEQMRWVQNNYMIYNYCTDAKRFPQGLPRECLAA

SEQ ID NO: 2274 - DNA, 1199 bp, Glycine max
  misc_feature: Ceres Clone ID no. 662227
  misc_feature: Encodes the peptide sequence at SEQ ID NO. 2275
acaaccaataccatcaacacttcatttcttactctcactgaaaaaaaatagcttgttcacaccatcctattttttcaactcatatatacaaatatatataacatggcttctaccttctctcgaagcctagcacttgtaagcttttacattgtcgtttgtgctgccggtaacttgaaccaagactttcagcttacgtggggagatggtcgtgctaaaatactcaacaacgaaaatcttctcactctctcccttgacaaggcctctggctctggcttccaatccaaaaacgaatacttatatggcaagattgacatgcagctcaagctcgttcctggaaactctgctggcactgtcaccgcctattatctgtcttcaaaaggatcaacatgggatgagattgacttcgagttcttggggaatctgagtggcgatccatacattctacacaccaatgtgttcagccaaggcaagggcaacagagagcaacaattctatctctggtttgacccaactgcagatttccacacttattcaattctttggaatccccaacgcattgttttttctgtggatggcacccccatcagggaattcaagaatttggaatcaataggagttccttttccaaagagccaaccgatgaggatatactcaagcctatggaacgctgatgattgggccacaaggggtggactcatcaagactgactggtccaaagctcctttcactgcatcctacagaaacttcaacgccaatgcttgtgtttggaactctggaaaatcctcatgcaaatcaaattcttcaccttcctctgcatctcccactaatgcatggttatcacaagagcttgattccactgctcagcagaggttgcgttgggtgcagaagaactacttgatttacaattactgcaccgacaacaagagatttcctcaaggccttccactcgaatgcaaacactcctagagcctataggactcacatctcgcactacccataacaagtgttgcaatataatcttatgaaccattcttttaatttttgtattcctttttttttttttgttcgatgcttgagtgctatagtgctgttattatacaaatatacaatgtaaaaatatcccatgtaaaataatgcttctgtttttttttttaaaaaaaaaataatgcttctcttgtttgtatgactgaattttgtgt

SEQ ID NO: 2275 - protein, 287 aa, Glycine max
  misc_feature (24)..(205): Pfam Name: Glyco_hydro_16 Pfam Description: Glycosyl hydrolases family 16
  misc_feature (229)..(284): Pfam Name: XET_C Pfam Description: Xyloglucan endo-transglycosylase (XET)
  misc_feature: Ceres Clone ID no. 662227
  misc_feature: Bit score of 654.6 for HMM based on sequences of Figure 46
  misc_feature: Functional Homolog Of SEQ ID NO. 2190
MASTFSRSLALVSFYIVVCAAGNLNQDFQLTWGDGRAKILNNENLLTLSLDKASGSGFQSKNEYLYGKIDMQLKLVPGNSAGTVTAYYLSSKGSTWDEIDFEFLGNLSGDPYILHTNVFSQGKGNREQQFYLWFDPTADFHTYSILWNPQRIVFSVDGTPIREFKNLESIGVPFPKSQPMRIYSSLWNADDWATRGGLIKTDWSKAPFTASYRNFNANACVWNSGKSSCKSNSSPSSASPTNAWLSQELDSTAQQRLRWVQKNYLIYNYCTDNKRFPQGLPLECKHS

SEQ ID NO: 2276 - protein, 289 aa, Vitis vinifera
  misc_feature (30)..(211): Pfam Name: Glyco_hydro_16 Pfam Description: Glycosyl hydrolases family 16
  misc_feature (236)..(288): Pfam Name: XET_C Pfam Description: Xyloglucan endo-transglycosylase (XET)
  misc_feature: Public GI ID no. 225446109
  misc_feature: Bit score of 631.7 for HMM based on sequences of Figure 46
  misc_feature: Functional Homolog Of SEQ ID NO. 2190
MASSPFSSSSLLGLVVYMFCSLMAASAGNFYQEFDITWGNDRAKLLDKGQLLTLSLDRASGSGFKSKNEYLFGKIDMQLKLVPGNSAGTVTAYYFSSLGSTHDEIDFEFLGNLSGDPYILHTNVFSQGKGNREQQFYLWFDPTANFHTYSVLWNPHNILFSVDGTPIRVFKNLEAMGIPFPKKQPMRIYSSLWNADDWATRGGLVKTDWSQAPFTASYRNFDASNACVWSSGASSCSSKSPSSSNSPWMKHELDSTSQARLRWVQKNYMIYNYCTDTKRFPQSPPPECA

SEQ ID NO: 2277 - DNA, 1091 bp, Glycine max
  misc_feature: Ceres Clone ID no. 522574
  misc_feature: Encodes the peptide sequence at SEQ ID NO. 2278
atcaattaattgtgcacgaaataccaattctgtcccaaatattatactaacatattagaagctgtccaattccaatggttccttgtgttaaagcaatggttgcgcttgtcctagcgtttctaatctctttgccttctatggttgcctatgctggcaacatgtaccaagatgttgatgtcacgtggggagatggcagaggcaagattctgaacaatggtcagcttcttactctgtctcttgacagagcctctggctctggctttcagtccaagaatcagtatctatttggcaaaattgacatgcaaatcaaacttgtgcctgcaaattccgctggcacggtcaccgctttttacttacgttcagaagggtcatcttgggatgagatagattttgagttcctgggaaatctgagtggtgatccttacatagttcatactaatgtgtacacacaaggcaagggtaatagggagcaacaattttatctttggtttgacccaactgcagattttcacacctattcctttctctggaatcctacacatgttgtattctatgttgatggaagaccaattagggagttcaagaacttggagggagtgggtgttgaatacccaaagaagcagcctatgaggttatatgccagtctatggaacgctgatgactgggcaacgagaggagggctagtgaagacagattggagtcaagcaccattcactgcttctttcaggaacttcaaagccaatggttgcgtttggtccaatggggtttcttcatgcaactccacctcctcttctgaaaaagcttggctatattctcaacggcttgattccacaaaccagaagaagctaaaatgggtgcacaagaattacatgatttatgattactgcacagaccttaagcgattccctcagggtctccctctcgaatgcacagtccgcaccaagtcataacaaaaatatatgcaaactgctattgtatttgcatgtgtgtgcattccattttcccattacactgcatcgcttctcaatctcattctttatgcaattaatttggatacaaagggcatcgtaatgtaacaattaatgtttatt

SEQ ID NO: 2278 - protein, 291 aa, Glycine max
  misc_feature (29)..(210): Pfam Name: Glyco_hydro_16 Pfam Description: Glycosyl hydrolases family 16
  misc_feature (234)..(285): Pfam Name: XET_C Pfam Description: Xyloglucan endo-transglycosylase (XET)
  misc_feature: Ceres Clone ID no. 522574
  misc_feature: Bit score of 614.7 for HMM based on sequences of Figure 46
  misc_feature: Functional Homolog Of SEQ ID NO. 2190
MVPCVKAMVALVLAFLISLPSMVAYAGNMYQDVDVTWGDGRGKILNNGQLLTLSLDRASGSGFQSKNQYLFGKIDMQIKLVPANSAGTVTAFYLRSEGSSWDEIDFEFLGNLSGDPYIVHTNVYTQGKGNREQQFYLWFDPTADFHTYSFLWNPTHVVFYVDGRPIREFKNLEGVGVEYPKKQPMRLYASLWNADDWATRGGLVKTDWSQAPFTASFRNFKANGCVWSNGVSSCNSTSSSEKAWLYSQRLDSTNQKKLKWVHKNYMIYDYCTDLKRFPQGLPLECTVRTKS

SEQ ID NO: 2279 - protein, 285 aa, Cucumis melo
  misc_feature (25)..(206): Pfam Name: Glyco_hydro_16 Pfam Description: Glycosyl hydrolases family 16
  misc_feature (230)..(282): Pfam Name: XET_C Pfam Description: Xyloglucan endo-transglycosylase (XET)
  misc_feature: Public GI ID no. 115334954
  misc_feature: Bit score of 645.2 for HMM based on sequences of Figure 46
  misc_feature: Functional Homolog Of SEQ ID NO. 2190
MASPIMFLTLLFSAASLIAISSANFNQDFQITWGDGRAKILNNGELLTLSLDKASGSGFQSQNEYLFGKIDMQLKLVAGNSAGTVTAYYLSSKGSTWDEIDFEFLGNLTGDPYTLHTNVFSQGKGNREQQFHLWFDPTADFHTYSILWNPNRIVFSVDGTPIREFKNWESNGVPFPKDQPMRIYSSLWNADDWATRGGLVKTDWTKAPFTASYKNFKAEACVLSGGQSSCSPSAPAGSRNSWLSEEMDSVSQERLKWVQKNYMIYNYCTDTRRFPQGLPTECKLP

SEQ ID NO: 2280 - DNA, 1019 bp, Glycine max
  misc_feature: Ceres Clone ID no. 581426
  misc_feature: Encodes the peptide sequence at SEQ ID NO. 2281
atcaattaattgtgcacgaaataccaattctgtctcacatagttctataacaccacaaactgtccaattccaatggttgttttctcttgtgttaaaacaatggttgtgcttgtccttgcgtttctaatctctgtgccttctatggttgcttctgctgtcagcttgtaccaagatgttgatgtcacgtggggagatggcagaggtaagattctgaacaatggtcagcttcttactctgtctctcgacagagcctctggctctggctttcagtccaagaatcagtatctatatggcaaaattgacatgcaaatcaaacttgtccctggaaattccgctggcacggtcaccgctttttacttacgttcagaagggtcatcttgggatgagatagactttgagttcctgggaaatctgagtggtgatccttacatagttcatactaatgtgtacacacaaggcaagggtaatagggagcaacaattctatctttggtttgacccaactgcagattttcacacctattcctttctctggaatcctgcacatgttgtattctatgttgatggaagaccaattagggagttcaagaacttggagggtgcgggtattgaatacccaaagaaacagcctatgaggttatattcaagtctatggaacgctgatgactgggcaacaagaggagggcttgtgaagacagattggagtgaagcaccattcactgcttctttcaggaacttcagagccaatggttgcgtttggtccaatggggtttcttcatgcaactccagcacctcttctgaaaaagcttggctatattctcaacagcttgattccacaaaccagaagaagctaaaatgggtgcagaagaattacatgatttacgattattgcacagacctcaaacgattccctcagggtcttcctctggaatgcacggttcgcaccaagtcataagaaaaatatatgcaaactgcttttgtatttgtatatgtcaatatgtttgtgcattccattttccc

SEQ ID NO: 2281 - protein, 293 aa, Glycine max
  misc_feature (31)..(212): Pfam Name: Glyco_hydro_16 Pfam Description: Glycosyl hydrolases family 16
  misc_feature (236)..(287): Pfam Name: XET_C Pfam Description: Xyloglucan endo-transglycosylase (XET)
  misc_feature: Ceres Clone ID no. 581426
  misc_feature: Bit score of 619.9 for HMM based on sequences of Figure 46
  misc_feature: Functional Homolog Of SEQ ID NO. 2190
MVVFSCVKTMVVLVLAFLISVPSMVASAVSLYQDVDVTWGDGRGKILNNGQLLTLSLDRASGSGFQSKNQYLYGKIDMQIKLVPGNSAGTVTAFYLRSEGSSWDEIDFEFLGNLSGDPYIVHTNVYTQGKGNREQQFYLWFDPTADFHTYSFLWNPAHVVFYVDGRPIREFKNLEGAGIEYPKKQPMRLYSSLWNADDWATRGGLVKTDWSEAPFTASFRNFRANGCVWSNGVSSCNSSTSSEKAWLYSQQLDSTNQKKLKWVQKNYMIYDYCTDLKRFPQGLPLECTVRTKS

SEQ ID NO: 2282 - protein, 284 aa, Populus tremula x Populus tremuloides
  misc_feature (25)..(206): Pfam Name: Glyco_hydro_16 Pfam Description: Glycosyl hydrolases family 16
  misc_feature (230)..(283): Pfam Name: XET_C Pfam Description: Xyloglucan endo-transglycosylase (XET)
  misc_feature: Public GI ID no. 124109191
  misc_feature: Bit score of 615.1 for HMM based on sequences of Figure 46
  misc_feature: Functional Homolog Of SEQ ID NO. 2190
MGLFCNGFSLFVMVCSMAVVASGNFHQDFDLTWGDRRAKIFNGGQLLSLSLDKVSGSGFQSKKEYLFGRIDMQLKLVAGNSAGTVTAYYLSSQGPTHDEIDFEFLGNLSGDPYILHTNVFTQGKGNREQQFYLWFDPTRNFHTYSIIWNPQHIIFLVDSVPIRVFKNAESIGVPFPKSQPMRIYSSLWNADDWATRGGLVKTDWTKAPFNAYYRNFKANACTWSYGASSCGSKPSSAFSDGAWKTNELDAPSRRRLRWVQKYFMIYNYCTDLRRFPQGPPPECK

SEQ ID NO: 2283 - DNA, 807 bp, Populus balsamifera subsp. trichocarpa
  misc_feature: Ceres Annot ID no. 1471882
  misc_feature: Encodes the peptide sequence at SEQ ID NO. 2284
atggcggtggttgcttcaggcaacttctatcaggattttgacttaacatggggtgaccgacgtgcaaagatattcaacggaggacagcttctgtctttgtctctagacaaggtttctgggtctggatttcagtccaagaaggagtacttgttcgggaggattgatatgcagctcaaacttgtcgctggcaactctgctggcactgtaacagcctactatttgtcttcgcaaggaccaacgcatgacgagatcgacttcgagttcttgggaaaccttagtggcgacccttatattttgcacactaacgtattcactcaggggaagggaaacagagagcagcaattctatctctggtttgaccccacgaggaacttccacacttactccatcatctggaatcctcagcacatcatcttcttggtggacagtattcccatcagggtgttcaaaaatgctgaatcaattggagttccatttcccaagagccaacccatgaggatttactctagcctctggaatgctgatgactgggctacaagaggtggattggtcaaaactgactggactaaggcgcccttcaccgcatactatagaaacttcaaggccaatgcctgtacttggtcttacggtacttcttcttgtggttccaagccttccagcgctttctctgacggtgcatggaaaaccaatgagcttgatgctccaagtagaagaagactgagatgggttcagaaatatttcatgatttacaactactgcactgacctgagacgcttccctcagggtccccctcctgagtgcaaatag

SEQ ID NO: 2284 - protein, 268 aa, Populus balsamifera subsp. trichocarpa
  misc_feature (9)..(190): Pfam Name: Glyco_hydro_16 Pfam Description: Glycosyl hydrolases family 16
  misc_feature (214)..(267): Pfam Name: XET_C Pfam Description: Xyloglucan endo-transglycosylase (XET)
  misc_feature: Ceres Annot ID no. 1471882
  misc_feature: Bit score of 594.4 for HMM based on sequences of Figure 46
  misc_feature: Functional Homolog Of SEQ ID NO. 2190
MAVVASGNFYQDFDLTWGDRRAKIFNGGQLLSLSLDKVSGSGFQSKKEYLFGRIDMQLKLVAGNSAGTVTAYYLSSQGPTHDEIDFEFLGNLSGDPYILHTNVFTQGKGNREQQFYLWFDPTRNFHTYSIIWNPQHIIFLVDSIPIRVFKNAESIGVPFPKSQPMRIYSSLWNADDWATRGGLVKTDWTKAPFTAYYRNFKANACTWSYGTSSCGSKPSSAFSDGAWKTNELDAPSRRRLRWVQKYFMIYNYCTDLRRFPQGPPPECK

SEQ ID NO: 2285 - protein, 284 aa, Beta vulgaris subsp. vulgaris
  misc_feature (24)..(205): Pfam Name: Glyco_hydro_16 Pfam Description: Glycosyl hydrolases family 16
  misc_feature (229)..(281): Pfam Name: XET_C Pfam Description: Xyloglucan endo-transglycosylase (XET)
  misc_feature: Public GI ID no. 34809190
  misc_feature: Bit score of 623.4 for HMM based on sequences of Figure 46
  misc_feature: Functional Homolog Of SEQ ID NO. 2190
MASSSIVFATIFLASLIATTRANFNNDFAITWGDGRAKILNNGDDLTLSLDKATGSGFQSKNEYLFGSIDMQLKLVPGNSAGHVTAYYLSSFGYNPDEIDFEFLGNASGQPYTLHTNVFAQGKGNREQQFHLWFDPTKDFHTYSILWNPQRIVFSVDGIPIREFKNMESQGVSFPKNQPMRIYSSLWNADDWATQGGRVKTDWTHAPFTASYRNFNANACVWASGSSSCGSSPSADSGSDWLNQELDSASLERMRWVQTNYMVYNYCADLQRFPQGLPTECTTT

SEQ ID NO: 2286 - protein, 291 aa, Cucumis sativus
  misc_feature (29)..(210): Pfam Name: Glyco_hydro_16 Pfam Description: Glycosyl hydrolases family 16
  misc_feature (234)..(287): Pfam Name: XET_C Pfam Description: Xyloglucan endo-transglycosylase (XET)
  misc_feature: Public GI ID no. 29500893
  misc_feature: Bit score of 627.5 for HMM based on sequences of Figure 46
  misc_feature: Functional Homolog Of SEQ ID NO. 2190
MASSSVFSTTLFLSLLFTSFFLPSSASNFHQSTDITWGDGRAQILNNGDLLSLSLDKASGSGFQSRNEYLYGKIDMQIKLVPGNSAGTVTAYYLRSEGSTWDEIDFEFLGNLSGDPYTVHTNVFSQGKGNREQQFHLWFDPTADFHTYSILWNPQRIVFYVDGTPIREFKNMESIGVAFPKNQPMRLQSSLWNADDWATRGGLIKTDWTQAPFTASYRNFNENACIWSSGQSSCGSNSSPAASDKPWYSQELDTDSEGKLKWVQKNYMIYNYCTDVNRFPQGLPPECNGTA

SEQ ID NO: 2287 - DNA, 885 bp, Populus balsamifera subsp. trichocarpa
  misc_feature: Ceres Annot ID no. 1452398
  misc_feature: Encodes the peptide sequence at SEQ ID NO. 2288
atgtcattctcttgtcctagtaaacttccctcgacgcttctgtttgcttcattacttgcttgtctactgggagcctccatgggtggcaatttcttccaagattttgacatcacctggggcgatcaacgtgctaagatactaaatggtggccaacttctcacactatctcttgacaaggattctggttctggcttccgatccaagaatgagtacttgtttggccgaatcgacatgcaaatcaagctagtatcgggcaactcggctggcactgtcaccacatactatctatcttctcaagggccgacccacgacgagattgacttcgagtttctaggcaatgtaactggagaaccatatactctccataccaatgtgttctcccaagggaaaggcaacaaagaacagcagttttatctctggtttgatcccacaaaggctttccacacctactctattgtgtggaaccaacaacgaataattttcttggtggacaacatccccataagagtattccacaactcggaatcaatcggagtgccgttcccgacgaagcaacccatgaggatatattcgagtctctggaatgctgatgattgggcaacgagaggggggcttgtgaagactgactggacacaagctcctttcactgcttcttacagaaatttcaaagccagtgcttgtgtttcgtcacctggatcatcttgcacctccacctcccccaattccttgcaggacagtacctggcaagttcaagctcttgatgcctccggccgcaacaggcttcgatgggtgcagcagaagtacatgatttacaactactgcactgacttgaaacgattccctcagggtatcccagctgaatgcaagcgatcaagattcctttga

SEQ ID NO: 2288 - protein, 294 aa, Populus balsamifera subsp. trichocarpa
  misc_feature (31)..(212): Pfam Name: Glyco_hydro_16 Pfam Description: Glycosyl hydrolases family 16
  misc_feature (235)..(288): Pfam Name: XET_C Pfam Description: Xyloglucan endo-transglycosylase (XET)
  misc_feature: Ceres Annot ID no. 1452398
  misc_feature: Bit score of 606.1 for HMM based on sequences of Figure 46
  misc_feature: Functional Homolog Of SEQ ID NO. 2190
MSFSCPSKLPSTLLFASLLACLLGASMGGNFFQDFDITWGDQRAKILNGGQLLTLSLDKDSGSGFRSKNEYLFGRIDMQIKLVSGNSAGTVTTYYLSSQGPTHDEIDFEFLGNVTGEPYTLHTNVFSQGKGNKEQQFYLWFDPTKAFHTYSIVWNQQRIIFLVDNIPIRVFHNSESIGVPFPTKQPMRIYSSLWNADDWATRGGLVKTDWTQAPFTASYRNFKASACVSSPGSSCTSTSPNSLQDSTWQVQALDASGRNRLRWVQQKYMIYNYCTDLKRFPQGIPAECKRSRFL

SEQ ID NO: 2289 - protein, 288 aa, Populus tremula x Populus tremuloides
  misc_feature (25)..(206): Pfam Name: Glyco_hydro_16 Pfam Description: Glycosyl hydrolases family 16
  misc_feature (230)..(283): Pfam Name: XET_C Pfam Description: Xyloglucan endo-transglycosylase (XET)
  misc_feature: Public GI ID no. 124109199
  misc_feature: Bit score of 610.8 for HMM based on sequences of Figure 46
  misc_feature: Functional Homolog Of SEQ ID NO. 2190
MGVFCNGFSLFLIACSMVVVASGSFYQDFDLTWGDHRAKIFNGGQLLSLSLDKVSGSGFKSKKEYLFGRIDMQLKLVAGNSAGTVTAYYLSSQGPTHDEIDFEFLGNLTGDPYILHTNVFTQGKGNREQQFYLWFDPTRNFHTYSIIWSQQHIIFLVDNFPIRVFKNAESIGVPFPKSQPMRIYSSLWNADDWATRGGLVKTDWTKAPFTAYYRNFKADACTWSYGTSSCGSSSSSSFSDRSWQTNALDAPSRRRLRWVQKYFMIYNYCADLKRFPQGLPPECRRSRF

SEQ ID NO: 2290 - DNA, 861 bp, Populus balsamifera subsp. trichocarpa
  misc_feature: Ceres Annot ID no. 1478206
  misc_feature: Encodes the peptide sequence at SEQ ID NO. 2291
atggcttctttgaatactgtgcttgtgccccttgtggctcttcttgtgacggttgcatcagcaagcaacttctacaacgattttgatattacctggggagatggtcgtgctaagatcctcagcaacggcgagctcctcactctcaaccttgacaaggcctctggctctggatttcaatccaggaatgagtatctgttcggaaagattgacatgcaactcaagcttgtccctggcaactctgcaggcactgtcactgcttattatctgtcatcaaaagggtctgcatgggatgagatagattttgaattcctggggaatttgagcggtgatccttacatcctgcacactaatgtgtttagccaaggcaagggcaacagagagcagcaattctatctttggtttgacccaactgctgatttccacacctattccattctgtggaatccacagcgcattgtcttctctgtggatggcactccaattcgagagttcaagaacctggagtctatgggggttccctttccaaaaaaccagccgatgaggatttactcgagtctatggaatgctgatgactgggctacaagaggtggcttggtcaagacagattgggccctggctcctttcaccgcttcttatagaaatttcaatgccgaagcttgtgttttgtctaatggggcatcttcttgtggcacaaccacttctcctcccgcccccacctcgaatgcttggttctcagaggagcttgattcaacaaggcaggagaggttgaaatgggcccgggagaattacatggtatacaattactgcaaagatatcaatagatttccccaaggtctacctccggaatgcagcatgtcctag

SEQ ID NO: 2291 - protein, 286 aa, Populus balsamifera subsp. trichocarpa
  misc_feature (24)..(205): Pfam Name: Glyco_hydro_16 Pfam Description: Glycosyl hydrolases family 16
  misc_feature (229)..(283): Pfam Name: XET_C Pfam Description: Xyloglucan endo-transglycosylase (XET)
  misc_feature: Ceres Annot ID no. 1478206
  misc_feature: Bit score of 651.4 for HMM based on sequences of Figure 46
  misc_feature: Functional Homolog Of SEQ ID NO. 2190
MASLNTVLVPLVALLVTVASASNFYNDFDITWGDGRAKILSNGELLTLNLDKASGSGFQSRNEYLFGKIDMQLKLVPGNSAGTVTAYYLSSKGSAWDEIDFEFLGNLSGDPYILHTNVFSQGKGNREQQFYLWFDPTADFHTYSILWNPQRIVFSVDGTPIREFKNLESMGVPFPKNQPMRIYSSLWNADDWATRGGLVKTDWALAPFTASYRNFNAEACVLSNGASSCGTTTSPPAPTSNAWFSEELDSTRQERLKWARENYMVYNYCKDINRFPQGLPPECSMS

SEQ ID NO: 2292 - DNA, 867 bp, Populus balsamifera subsp. trichocarpa
  misc_feature: Ceres Annot ID no. 1445599
  misc_feature: Encodes the peptide sequence at SEQ ID NO. 2293
atggggctgttctgcaatggattctctctgtttctgatagtttgctccatggtggtggttgcttctggtagtttctatcaggattttgacttgacatggggcgaccaccgggcaaagatattcaacggaggacagctcctctccctgtctctagacaaggtttctgggtctggatttcagtccaagaaggaatacttgtttgggaggattgatatgcagctcaaacttgttgccggcaactctgctggcactgtaacagcctactacttgtcttctcaaggagcaacacatgacgagatcgacttcgagttcttggggaacctcagcggcgacccttacattttgcacactaatgtgttcactcaggggaagggaaacagagagcagcaattctatctctggtttgaccccacaagaaacttccacacttactccatcatctggagccaacaacacatcattttcttggtggataattttcccataagggtgttcaagaatgccgaatcaattggagttcctttccccaagagccagcccatgaggatttactccagcctctggaacgccgatgactgggctacaagaggcgggttggtgaagacggactggacgaaggcaccctttacagcttactacagaaacttcaaagctgatgcctgtacttggtcctatggcacttcttcctgtggttccaggtcttccagttctttctctgatcgtgcatggcataccaacgccctcgatgctccaagcagaagaagactgagatgggtccagaaatacttcatgatttacaactactgcgctgacctaaaacgcttccctcaaggtctccctcctgagtgcagacgctcaagattctga

SEQ ID NO: 2293 - protein, 288 aa, Populus balsamifera subsp. trichocarpa
  misc_feature (25)..(206): Pfam Name: Glyco_hydro_16 Pfam Description: Glycosyl hydrolases family 16
  misc_feature (230)..(283): Pfam Name: XET_C Pfam Description: Xyloglucan endo-transglycosylase (XET)
  misc_feature: Ceres Annot ID no. 1445599
  misc_feature: Bit score of 613.3 for HMM based on sequences of Figure 46
  misc_feature: Functional Homolog Of SEQ ID NO. 2190
MGLFCNGFSLFLIVCSMVVVASGSFYQDFDLTWGDHRAKIFNGGQLLSLSLDKVSGSGFQSKKEYLFGRIDMQLKLVAGNSAGTVTAYYLSSQGATHDEIDFEFLGNLSGDPYILHTNVFTQGKGNREQQFYLWFDPTRNFHTYSIIWSQQHIIFLVDNFPIRVFKNAESIGVPFPKSQPMRIYSSLWNADDWATRGGLVKTDWTKAPFTAYYRNFKADACTWSYGTSSCGSRSSSSFSDRAWHTNALDAPSRRRLRWVQKYFMIYNYCADLKRFPQGLPPECRRSRF

SEQ ID NO: 2294 - DNA, 885 bp, Populus balsamifera subsp. trichocarpa
  misc_feature: Ceres Annot ID no. 1452397
  misc_feature: Encodes the peptide sequence at SEQ ID NO. 2295
atgtctttctcttgttcgagtagactttcttccatgcctttgtttgctctgttaattgcttgtctagtgggagcctccatgggtggcaatttcttccaagattttgacatcacctggggcgatcaacgtgctaagatactaaatggtggccaacttctcacactatctcttgacaaggattctggttctggcttccgatccaagaatgagtacttgtttggccgaatcgacatgcaaatcaagctagtatcgggcaactcggctggcactgtcaccacatactatctatcttctcaagggccgacccacgacgagattgacttcgagtttctaggcaatttaactggagaaccatatactctccataccaatgtgttctcccaagggaaaggcaacaaagaacagcagttttatctctggtttgatcccacaaaggctttccacacctactctattgtgtggaaccaacaacaaataattttcttggtggacaacatccccataagagtattccacaactcggaatcaatcggagtgccgttcccgacgaagcaacccatgaggatatattcgagtctctggaatgctgatgattgggcaacgagaggggggcttgtgaagactgactggacacaagctcctttcactgcttcttacagaaatttcaaagccagtgcttgtgtttcgtcacctggatcatcttgcacctccacctcccccaattccttgcaggacagtacctggcaagttcaaggtcttgatgcctccggccgcaacaggcttcgatgggtgcagcagaagtacatgatttacaactactgcactgacttgaaacgattccctcagggtatcccagctgaatgcaagcgatcaagattcctttga

SEQ ID NO: 2295 - protein, 294 aa, Populus balsamifera subsp. trichocarpa
  misc_feature (31)..(212): Pfam Name: Glyco_hydro_16 Pfam Description: Glycosyl hydrolases family 16
  misc_feature (235)..(288): Pfam Name: XET_C Pfam Description: Xyloglucan endo-transglycosylase (XET)
  misc_feature: Ceres Annot ID no. 1452397
  misc_feature: Bit score of 608.8 for HMM based on sequences of Figure 46
  misc_feature: Functional Homolog Of SEQ ID NO. 2190
MSFSCSSRLSSMPLFALLIACLVGASMGGNFFQDFDITWGDQRAKILNGGQLLTLSLDKDSGSGFRSKNEYLFGRIDMQIKLVSGNSAGTVTTYYLSSQGPTHDEIDFEFLGNLTGEPYTLHTNVFSQGKGNKEQQFYLWFDPTKAFHTYSIVWNQQQIIFLVDNIPIRVFHNSESIGVPFPTKQPMRIYSSLWNADDWATRGGLVKTDWTQAPFTASYRNFKASACVSSPGSSCTSTSPNSLQDSTWQVQGLDASGRNRLRWVQQKYMIYNYCTDLKRFPQGIPAECKRSRFL

SEQ ID NO: 2296 - protein, 285 aa, Glycine max
  misc_feature (24)..(205): Pfam Name: Glyco_hydro_16 Pfam Description: Glycosyl hydrolases family 16
  misc_feature (229)..(282): Pfam Name: XET_C Pfam Description: Xyloglucan endo-transglycosylase (XET)
  misc_feature: Public GI ID no. 19911573
  misc_feature: Bit score of 652.5 for HMM based on sequences of Figure 46
  misc_feature: Functional Homolog Of SEQ ID NO. 2190
MAFSRVALLICTVGYFVIASAGNFHQDFDITWGDGRAKILNNGELLTLSLDKASGSGFQSKNEYLFGKIDMQLKLVPGNSAGTVTAYYLSSKGATWDEIDFEFLGNLSGDPYILHTNVFSQGKGNREQQFYLWFDPTADFHTYSILWNPQRIVFSVDGSPIREFKNMESKGVPFPKNQAMRIYSSLWNADDWATRGGLVKTDWTQAPFTASYRNFNANACTMSSGTSSCGSNNPSSSNNNVWLSEELDSTDQERLKWVQKNYMIYNYCSDTQRFPQGLPSECNTA

SEQ ID NO: 2297 - protein, 281 aa, Populus tremula
  misc_feature (23)..(204): Pfam Name: Glyco_hydro_16 Pfam Description: Glycosyl hydrolases family 16
  misc_feature (228)..(278): Pfam Name: XET_C Pfam Description: Xyloglucan endo-transglycosylase (XET)
  misc_feature: Public GI ID no. 124109181
  misc_feature: Bit score of 624.6 for HMM based on sequences of Figure 46
  misc_feature: Functional Homolog Of SEQ ID NO. 2190
MFTCFTVISFLFMAAAAMAAGNFNQQFDTTWGDGRARVLQNGQLLTLSLDKTSGSGFKSKSQYLFGKIDMQLKLVPGNSAGTVTAYYLSSLGSAHDEIDFEFLGNLSGDPYILHTNVFTQGKGNREQQFYLWFDPTKDFHTYSVLWNPLSIILSVDGTPIREFKNMESKGIPYPKSQPMWIYSSLWNADDWATRGGLIKTDWSQAPFTASYRNFNAQACTWTSGSSSCSSSGSSSNSWLSQSLGSTGQGRIKWVQKNYMIYNYCTDTKRFPQGSPPECSMA

SEQ ID NO: 2298 - protein, 284 aa, Arabidopsis thaliana
  misc_feature (30)..(211): Pfam Name: Glyco_hydro_16 Pfam Description: Glycosyl hydrolases family 16
  misc_feature (235)..(282): Pfam Name: XET_C Pfam Description: Xyloglucan endo-transglycosylase (XET)
  misc_feature: Public GI ID no. 22327914
  misc_feature: Bit score of 599.7 for HMM based on sequences of Figure 46
  misc_feature: Functional Homolog Of SEQ ID NO. 2190
MDRSTFILSLLFTLTVSTTTLFSPVFAGTFDTEFDITWGDGRGKVLNNGELLTLSLDRASGSGFQTKKEYLFGKIDMQLKLVPGNSAGTVTAYYLKSKGDTWDEIDFEFLGNLTGDPYTMHTNVYTQGKGDREQQFHLWFDPTADFHTYSVLWNPHHIVFMVDDIPVREFKNLQHMGIQYPKLQPMRLYSSLWNADQWATRGGLVKTDWSKAPFTASYRNFRADACVSSGGRSSCPAGSPRWFSQRLDLTAEDKMRVVQRKYMIYNYCTDTKRFPQGFPKECRH

SEQ ID NO: 2299 - protein, 290 aa, Solanum lycopersicum
  misc_feature (28)..(209): Pfam Name: Glyco_hydro_16 Pfam Description: Glycosyl hydrolases family 16
  misc_feature (224)..(285): Pfam Name: XET_C Pfam Description: Xyloglucan endo-transglycosylase (XET)
  misc_feature: Public GI ID no. 42795468
  misc_feature: Bit score of 548.0 for HMM based on sequences of Figure 46
  misc_feature: Functional Homolog Of SEQ ID NO. 2190
MSSKFSSTLLLLISILMSIQLLASAGNFYRDVDITWGEGRGKIQEGGRGLALSLDKLSGSGFQSKNEYLFGRFDMQLKLVPKNSAGTVTTFFLSSQGEGHDEIDFEFLGNVSGQPYTIHTNVYTQGKGNKEQQFHLWFDPTAAFHTYTIVWNPHRIVFLVDNSPIRVFNNHESMGIPFPKSQAMKVYCSLWNADEWATQGGRVKTDWALAPFTAYYRNINIDGCAVSSGASTCKSIGSTNNAKPWQTHELDGKGRNRLRWVQTKHMVYNYCADSKRFPQGFSAECKSSRF

SEQ ID NO: 2300 - protein, 287 aa, Solanum lycopersicum
  misc_feature (27)..(208): Pfam Name: Glyco_hydro_16 Pfam Description: Glycosyl hydrolases family 16
  misc_feature (231)..(283): Pfam Name: XET_C Pfam Description: Xyloglucan endo-transglycosylase (XET)
  misc_feature: Public GI ID no. 42795462
  misc_feature: Bit score of 639.3 for HMM based on sequences of Figure 46
  misc_feature: Functional Homolog Of SEQ ID NO. 2190
MASSSSKLVLVMCFMISAFGIAIGAKFDQEFDITWGDGRAKILNNGDLLTLSLDKISGSGFQSKNEYLFGKIDMQLKLVPGNSAGTVTAYYLSSQGPTHDEIDFEFLGNLSGDPYTLHTNVFSQGKGNREQQFHLWFDPTADFHTYSITWNPQRIIFYVDGTPIREYKNSESIGVSYPKNQPMRIYSSLWNADDWATRGGLVKTDWSQAPFSASYRNFSANACIPTSSSSCSSNSAASTSNSWLNEELDNTSQERLKWVQKNYMVYDYCTDSKRFPQGFPADCVQNI

SEQ ID NO: 2301 - DNA, 819 bp, Populus balsamifera subsp. trichocarpa
  misc_feature: Ceres Annot ID no. 1466060
  misc_feature: Encodes the peptide sequence at SEQ ID NO. 2302
atggctgcttcagctggtaatttcaatcaagaagttgacctaacatggggtggtgatcgtgctaagatactcagtggaggaagcgttctgtctcttacacttgataaggtctccggctctggctttcaatccaagagcgagtatctcttcggaaggatagatatgcagatcaagcttgttggtggtaactctgctggttctgtcactgcttactatttatcctcagaagggccataccatgatgaaattgattttgagttcttagggaaccttagcggagaaccctatactgttcacactaatgtgtacactcaagggaaaggggatagggaacaacagttccacctttggtttgatccaacaaaagattttcacttgtattctgttgtatggaaccaccaacgtatcattttcttagtggatgacacgcctataagagtgtacgaaaatcaagaatccattggagttcccttcccgaagaaccaaccgatgaaactttactccagcctatggaatgctgatcaatgggcgacaagaggtggactagtgaaagcagattggtctaaggcacctttcacagcatactacaggaatttcaaagccaacgcgtgcttatggtcttcaggatcgtcttcttgttcattgaagactactagctccagcacaaacaatgcttggcagactcaaggtctggattcgactagtcgtagaagccttagatgggtgcaaaaatactacatgatttacaattattgcacggattataagagatttcctatgggtcgcccgcgtgagtgcaggctttctaagcatttttag

SEQ ID NO: 2302 - protein, 272 aa, Populus balsamifera subsp. trichocarpa
  misc_feature (8)..(189): Pfam Name: Glyco_hydro_16 Pfam Description: Glycosyl hydrolases family 16
  misc_feature (213)..(266): Pfam Name: XET_C Pfam Description: Xyloglucan endo-transglycosylase (XET)
  misc_feature: Ceres Annot ID no. 1466060
  misc_feature: Bit score of 565.2 for HMM based on sequences of Figure 46
  misc_feature: Functional Homolog Of SEQ ID NO. 2190
MAASAGNFNQEVDLTWGGDRAKILSGGSVLSLTLDKVSGSGFQSKSEYLFGRIDMQIKLVGGNSAGSVTAYYLSSEGPYHDEIDFEFLGNLSGEPYTVHTNVYTQGKGDREQQFHLWFDPTKDFHLYSVVWNHQRIIFLVDDTPIRVYENQESIGVPFPKNQPMKLYSSLWNADQWATRGGLVKADWSKAPFTAYYRNFKANACLWSSGSSSCSLKTTSSSTNNAWQTQGLDSTSRRSLRWVQKYYMIYNYCTDYKRFPMGRPRECRLSKHF

SEQ ID NO: 2303 - DNA, 873 bp, Solanum lycopersicum
  misc_feature: Ceres Annot ID no. 8461207
  misc_feature: Encodes the peptide sequence at SEQ ID NO. 2304
atggctaattctcatttacttttaatttccattgtattaatgggcaatttagtggctgtattagcagctggtaattttaatgaccttacagaaatcacttggggtgatggacgtggtaaaatattagatggaggtaaaggtctctctttgtcacttgataattattccgggtcgggttttcaatcgaaaaatgaatatctctacggaagattcgacatgcaactcaaactcgtccctaaaaactctgctggcactgtcaccacgttctttctatcgtcacaaggagaaggacacgatgagatcgatttcgagttcttgggaaatgtgactggtgagccttatacggtacacaccaatgtttattctcaaggaaaaggaaacaaagaacaacaatttcacctttggttcgatccaactgcagcatttcacacttacaccattgtttggaacgctaaccgcatagtgtttttggtggatcagattccaattagagtatacaacaaccatgagagcattggaattgcataccccaaaagtcaaccaatgaaagtctattgtagtttatggaatgcagatgaatgggctacacaaggtggtagagtcaaaactgattggtcacaagcaccatttactgcctattataggaacattaacattgatggctgcgtcgttaaatcaggcgcttcctcatgtgcctcacggtctactgaatccacgaacagtgctaagtcgtgggagacacatgagcttgatgctaagggtcggaacagggtccgatgggtacagagcaaacatatggtttataattattgcgcggattctaagaggtttcctcaaggatattcacaagagtgtaaacgatcaaggttttaa

SEQ ID NO: 2304 - protein, 290 aa, Solanum lycopersicum
  misc_feature (26)..(207): Pfam Name: Glyco_hydro_16 Pfam Description: Glycosyl hydrolases family 16
  misc_feature (231)..(285): Pfam Name: XET_C Pfam Description: Xyloglucan endo-transglycosylase (XET)
  misc_feature: Ceres Annot ID no. 8461207
  misc_feature: Bit score of 567.5 for HMM based on sequences of Figure 46
  misc_feature: Functional Homolog Of SEQ ID NO. 2190
MANSHLLLISIVLMGNLVAVLAAGNFNDLTEITWGDGRGKILDGGKGLSLSLDNYSGSGFQSKNEYLYGRFDMQLKLVPKNSAGTVTTFFLSSQGEGHDEIDFEFLGNVTGEPYTVHTNVYSQGKGNKEQQFHLWFDPTAAFHTYTIVWNANRIVFLVDQIPIRVYNNHESIGIAYPKSQPMKVYCSLWNADEWATQGGRVKTDWSQAPFTAYYRNINIDGCVVKSGASSCASRSTESTNSAKSWETHELDAKGRNRVRWVQSKHMVYNYCADSKRFPQGYSQECKRSRF

SEQ ID NO: 2305 - DNA, 846 bp, Populus balsamifera subsp. trichocarpa
  misc_feature: Ceres Annot ID no. 1506985
  misc_feature: Encodes the peptide sequence at SEQ ID NO. 2306
atgtttacttgttttactgtaataagttttttatttatggcagctgccatggctgctggtaacttcaaccagcaatttgacactacatggggtgatggccgtgctaaagtccttcaaaatggccaacttcttacactctctcttgacaaaacctctggttcagggtttaagtccaagaaccaatacttgtttgggaaaatcgacatgcaactaaagttggtacctggaaactctgccggaactgtcaccgcttactatctatcttctttgggatcagcgcatgatgaaatagattttgagttccttggtaaccttagtggagacccttatattcttcacaccaacgtcttcactcaaggaaaaggaaacagagagcagcaattctatctttggttcgaccccaccaaagatttccacacctattccgttctttggaatcctcttatgaaattatacttttctgtggatgggacaccaattagagagttcaagaacatggaatcaaagggcatcccatacccaaagagccaaccaatgtggatatactcaagcctctggaatgcagatgactgggctacaagaggaggtcttatcaaaaccgattggagccaagcaccgtttacagcttcttacaggaactttaatgctcaagcatgcacttggacctctggctcctcctcttgctcctcctctggctcctccagtaactcttggctatcacagtcactgggtagcacaggccaaggaagaataaaatgggtgcaaaagaactacatgatttataactattgcactgacaccaagcgattcccacaaggaccgcctccggaatgctcagtggcatga

SEQ ID NO: 2306 - protein, 281 aa, Populus balsamifera subsp. trichocarpa
  misc_feature (22)..(204): Pfam Name: Glyco_hydro_16 Pfam Description: Glycosyl hydrolases family 16
  misc_feature (228)..(278): Pfam Name: XET_C Pfam Description: Xyloglucan endo-transglycosylase (XET)
  misc_feature: Ceres Annot ID no. 1506985
  misc_feature: Bit score of 617.8 for HMM based on sequences of Figure 46
  misc_feature: Functional Homolog Of SEQ ID NO. 2190
MFTCFTVISFLFMAAAMAAGNFNQQFDTTWGDGRAKVLQNGQLLTLSLDKTSGSGFKSKNQYLFGKIDMQLKLVPGNSAGTVTAYYLSSLGSAHDEIDFEFLGNLSGDPYILHTNVFTQGKGNREQQFYLWFDPTKDFHTYSVLWNPLMKLYFSVDGTPIREFKNMESKGIPYPKSQPMWIYSSLWNADDWATRGGLIKTDWSQAPFTASYRNFNAQACTWTSGSSSCSSSGSSSNSWLSQSLGSTGQGRIKWVQKNYMIYNYCTDTKRFPQGPPPECSVA

SEQ ID NO: 2307 - protein, 292 aa, Fagus sylvatica
  misc_feature (28)..(209): Pfam Name: Glyco_hydro_16 Pfam Description: Glycosyl hydrolases family 16
  misc_feature (233)..(287): Pfam Name: XET_C Pfam Description: Xyloglucan endo-transglycosylase (XET)
  misc_feature: Public GI ID no. 3901012
  misc_feature: Bit score of 636.4 for HMM based on sequences of Figure 46
  misc_feature: Functional Homolog Of SEQ ID NO. 2190
MASVLVKLLLLLTILASSVLVIAYAGNLHQDFDITWGDGRAMILNNGELLTLSLDKASGSGFQSKNQFLFGKIDTQIKLVPGNSAGTVTAYYLSSKGSTWDEIDYEFLGNLSGDPYTIHTNIYTQGKGNREQQFHLWFDPTANFHTYSILWNPQAIIFSVDGTPIREFKNSESIGVPIPKKQPMRLYSSLWNADDWATRGGLLKTDWARTPFTASYRNFNARACLWSSGESTCTANSQSSTSNNNAWLKEDLDFTRQERLKWVQKNYMIYNYCTDTKRFPQGFPPECAATKA

SEQ ID NO: 2308 - DNA, 819 bp, Populus balsamifera subsp. trichocarpa
  misc_feature: Ceres Annot ID no. 1443040
  misc_feature: Encodes the peptide sequence at SEQ ID NO. 2309
atgtcattctcttgtcccagatcctcaaaaggtggcaatttcttccaagattttgacatcacctggggcgatcaacgtgctaagatactaaacggtggccaacttctcacactatctcttgacactgcttctggttctggcttccaatccaagaatgaatacttatttggccgaatcgacatgcaaatcaagctaataccaggcaactcggctggtactgtcactacatactatctatcgtctcaggggccgacccacgatgagatcgactttgagtttttgggcaatgcaactggagagccatatgttctccataccaatgtgttttcccaggggaaaggcgacagagaacaacaattctatctctggtttgatcccagtaaggcttttcacacctactccattgtgtggaacaaacaactcattattttcttagtggacaacatcccaataagagtgttccaaaacctggaatcaattggtgtggcattcccgaacaagcaagccatgaggatatattcaagtctttggaatgctgatgactgggcaacaagaggggggcttgtaaagactgattggacacaagctcctttcattgcttcttacagaaatttcaaagccaatgcttgtgtttggtcacctggatcaccttgtacctccacctctcccaattctgtgcaagacaatgcctggcaagttcaagcacttgatgccccggggcgcaacagacttcgatgggtgcagcagaagtacatgatttacaactactgcactgacttgaaacggttccctcagggtctcccacctgaatgcaagtga

SEQ ID NO: 2309 - protein, 272 aa, Populus balsamifera subsp. trichocarpa
  misc_feature (14)..(195): Pfam Name: Glyco_hydro_16 Pfam Description: Glycosyl hydrolases family 16
  misc_feature (218)..(271): Pfam Name: XET_C Pfam Description: Xyloglucan endo-transglycosylase (XET)
  misc_feature: Ceres Annot ID no. 1443040
  misc_feature: Bit score of 578.6 for HMM based on sequences of Figure 46
  misc_feature: Functional Homolog Of SEQ ID NO. 2190
MSFSCPRSSKGGNFFQDFDITWGDQRAKILNGGQLLTLSLDTASGSGFQSKNEYLFGRIDMQIKLIPGNSAGTVTTYYLSSQGPTHDEIDFEFLGNATGEPYVLHTNVFSQGKGDREQQFYLWFDPSKAFHTYSIVWNKQLIIFLVDNIPIRVFQNLESIGVAFPNKQAMRIYSSLWNADDWATRGGLVKTDWTQAPFIASYRNFKANACVWSPGSPCTSTSPNSVQDNAWQVQALDAPGRNRLRWVQQKYMIYNYCTDLKRFPQGLPPECK

SEQ ID NO: 2310 - protein, 277 aa, Striga asiatica
  misc_feature (22)..(203): Pfam Name: Glyco_hydro_16 Pfam Description: Glycosyl hydrolases family 16
  misc_feature (218)..(274): Pfam Name: XET_C Pfam Description: Xyloglucan endo-transglycosylase (XET)
  misc_feature: Public GI ID no. 90811697
  misc_feature: Bit score of 612.9 for HMM based on sequences of Figure 46
  misc_feature: Functional Homolog Of SEQ ID NO. 2190
MKKYIVLLALISFAATATGSNFNQDFDITWGDGRAKILNNGKLLTLSLDKTSGSGFRSKKQYMFGKIDLQIKLVPGNSAGTVTTYYLSSLGPNHDEIDFEFLGNLSGQPYTLHTNVFAQGKGGREQQFRLWFDPTKDFHTYSILWNPQSIIFSVDGTPIRQFKNLESKGVPYPKSQPMWVYSSLWNADDWATRGGLVKTDWSQAPFTASYTNFNALACSGATSSCSQNSSANSWFSQSLDFSGQQRIKWVQKNYMTYNYCTDTKRYPQGFPIECSIA

SEQ ID NO: 2311 - DNA, 885 bp, Populus balsamifera subsp. trichocarpa
  misc_feature: Ceres Annot ID no. 1443041
  misc_feature: Encodes the peptide sequence at SEQ ID NO. 2312
atgtcgttcgttcgttcgagaaagctttcttcaatgcttttgtttactctgttatttgcctgtctgatgggagcctccaagggtggcaatttcttccaagattttgacatcacctggggcgatcaacgtgctaagatactaaacggtggccaacttctcacactctctctcgacaaggcttctggttctggctttcaatccaagaatgaatacttatttggccaaatcgacatgcaaatcaagctagtagcaggcaactcggctggtactgtcactgcatactatctatcttctcaagggtcgacccacgatgagattgactttgagtttttggggaatgcaactggagagccatatattctccataccaatgtgttctcccaggggaaaggcaacagagaacaacaattctatctctggtttgatcccactaaggctttccacacctactccattgtgtggaaccaacaacgcattattttcttagtggacaacatcccaataagagtgttccataatctggaatcaatcggtgtgccattcccgaacaagcaagccatgaggatacattcaagtctctggaatgctgatgattgggcaacaagaggggggcttgtaaagactgactggacacaagctcctttcactgcttcttacagaaatttcaaagccaatgcttgtatttggtcatctacatcaccttgtacctccacctctcccaattctgtgcaagacaatgcctggcaagttcaagcacttgatgccccggggcgcaacagacttcgatgggtgcaacaaaagtacatgatttacaactactgcactgacttgaagcggttccctcagggtctcccacctgaatgcaagcgatcaagatttctttga

SEQ ID NO: 2312 - protein, 294 aa, Populus balsamifera subsp. trichocarpa
  misc_feature (31)..(212): Pfam Name: Glyco_hydro_16 Pfam Description: Glycosyl hydrolases family 16
  misc_feature (235)..(288): Pfam Name: XET_C Pfam Description: Xyloglucan endo-transglycosylase (XET)
  misc_feature: Ceres Annot ID no. 1443041
  misc_feature: Bit score of 609.8 for HMM based on sequences of Figure 46
  misc_feature: Functional Homolog Of SEQ ID NO. 2190
MSFVRSRKLSSMLLFTLLFACLMGASKGGNFFQDFDITWGDQRAKILNGGQLLTLSLDKASGSGFQSKNEYLFGQIDMQIKLVAGNSAGTVTAYYLSSQGSTHDEIDFEFLGNATGEPYILHTNVFSQGKGNREQQFYLWFDPTKAFHTYSIVWNQQRIIFLVDNIPIRVFHNLESIGVPFPNKQAMRIHSSLWNADDWATRGGLVKTDWTQAPFTASYRNFKANACIWSSTSPCTSTSPNSVQDNAWQVQALDAPGRNRLRWVQQKYMIYNYCTDLKRFPQGLPPECKRSRFL

SEQ ID NO: 2313 - protein, 290 aa, Vitis vinifera
  misc_feature (30)..(211): Pfam Name: Glyco_hydro_16 Pfam Description: Glycosyl hydrolases family 16
  misc_feature (235)..(288): Pfam Name: XET_C Pfam Description: Xyloglucan endo-transglycosylase (XET)
  misc_feature: Public GI ID no. 157358970
  misc_feature: Bit score of 615.8 for HMM based on sequences of Figure 46
  misc_feature: Functional Homolog Of SEQ ID NO. 2190
MAPCFSLNISSMLLFSVFVSSIMAASAGSFYQDFDLTWGDHRAKILDGEKLLTLSLDKASGSGFQSKKEYLFGKIDMQLKLVSGNSAGTVTAYYLSSQGPTHDEIDFEFLGNLSGDPYILHTNVFTQGKGNREQQFYLWFDPTENFHTYSIIWNLQNIIFLVDNIPIREFKNQESIGVPFPKSQPMRIYSSLWNADDWATRGGLVKIDWSKAPFTASYRNFNAAACLWSHGSSSCASKFTSPVSNIAWQNQGLDAKSRRKLQWVQKNYMIYNYCSDMKRFPGGLPLECRH

SEQ ID NO: 2314 - protein, 287 aa, Capsicum annuum
  misc_feature (21)..(202): Pfam Name: Glyco_hydro_16 Pfam Description: Glycosyl hydrolases family 16
  misc_feature (228)..(282): Pfam Name: XET_C Pfam Description: Xyloglucan endo-transglycosylase (XET)
  misc_feature: Public GI ID no. 90656516
  misc_feature: Bit score of 566.4 for HMM based on sequences of Figure 46
  misc_feature: Functional Homolog Of SEQ ID NO. 2190
MLLQLSILAVLLLYPVWADNFYQDTTVTFGDQRAQIQDGGRILALSLDKISGSGFQSKNEYLFGRFDMQLKLVPGNSAGTVTTFYLSSQGAGHDEIDFEFLGNSSGQPYTVHTNVYSQGKGNKEQQFRLWFDPTSSFHTYSIVWNSQRIIFLVDNIPIRVFNNHEAIGVAFPKNQAMRVYASLWNADDWATQGGRVKTDWSMAPFTAAYRNFNTNACVWSAATSTSSCGGSKTDSVNNAQTWQTQELNASERNRLRWVQQKYMIYNYCADAKRFSQGFSPECKRSRF

SEQ ID NO: 2315 - protein, 289 aa, Solanum lycopersicum
  misc_feature (23)..(204): Pfam Name: Glyco_hydro_16 Pfam Description: Glycosyl hydrolases family 16
  misc_feature (230)..(284): Pfam Name: XET_C Pfam Description: Xyloglucan endo-transglycosylase (XET)
  misc_feature: Public GI ID no. 577066
  misc_feature: Bit score of 573.0 for HMM based on sequences of Figure 46
  misc_feature: Functional Homolog Of SEQ ID NO. 2190
MLLQQLSVLALLLLLCPVWADNFYQDATVTFGDQRAQIQDGGRLLALSLDKISGSGFQSKNEYLFGRFDMQLKLVPGNSAGTVTTFYLSSQGAGHDEIDFEFLGNSSGQPYTVHTNVYSQGKGNKEQQFRLWFDPTSPFHTYSIVWNSQRIIFLVDNIPIRVFNNHEKLGVAFPKNQAMRVYASLWNADDWATQGGRVKTDWSMAPFTASYRNFNTNACVWSAASSTSSCGGSKTDSVNNDQAWQTQELNGNDRNRLRWVQQKYMIYNYCADAKRFSQGLSPECKRSRF

SEQ ID NO: 2316 - protein, 287 aa, Capsicum annuum
  misc_feature (21)..(202): Pfam Name: Glyco_hydro_16 Pfam Description: Glycosyl hydrolases family 16
  misc_feature (228)..(282): Pfam Name: XET_C Pfam Description: Xyloglucan endo-transglycosylase (XET)
  misc_feature: Public GI ID no. 90656520
  misc_feature: Bit score of 563.9 for HMM based on sequences of Figure 46
  misc_feature: Functional Homolog Of SEQ ID NO. 2190
MLLQLSILAVLLLCPVWAENFYQDATVTFGDHRAQIQDGGRVLALSLDKISGSGFQSKNEYLFGRFDMQLKLVPGNSAGTVTTFYLSSQGAGHDEIDFEFLGNSSGQPYTVHTNVYSQGKGNKEQQFRLWFDPTSSFHTYSIVWNSQRIIFLVDDIPIRVFNNHEALGVAFPKNQAMRVYASLWNADDWATQGGWVKTDWSMAPFTASYRNFNTNACVWSAATSTSSCGGSKTDSVNNVQTWQTQELNASERNRLRWVQQKYMIYNYCTDAKRFSQGFSPECKRSRF

SEQ ID NO: 2317 - protein, 287 aa, Solanum tuberosum
  misc_feature (21)..(202): Pfam Name: Glyco_hydro_16 Pfam Description: Glycosyl hydrolases family 16
  misc_feature (228)..(282): Pfam Name: XET_C Pfam Description: Xyloglucan endo-transglycosylase (XET)
  misc_feature: Public GI ID no. 88683124
  misc_feature: Bit score of 563.4 for HMM based on sequences of Figure 46
  misc_feature: Functional Homolog Of SEQ ID NO. 2190
MLLQLSLLALVLLSPVWADNFYQDATVTFGDQRAQIQDGGRLLALSLDKISGSGFQSKNEYLFGRFDMQLKLVPGNSAGTVTTFLLSSQGAGHDEIDFEFLGNSSGKPYTVHTNVYSQGKGNKEQQFRLWFDPTSSFHTYSIVWNSQRIIFLVDNIPIRVFNNHEALGVAFPKNQAMRVYASLWNADDWATQGGRVKTDWSMAPFTASYRNFNTNACVWSAATSTSSCGGSKTESVNNDQTWQSQQLNANGRNRVRWVQQKYMIYNYCADANRFSQGFSPECKRSRF

SEQ ID NO: 2318 - protein, 288 aa, Capsicum annuum
  misc_feature (22)..(203): Pfam Name: Glyco_hydro_16 Pfam Description: Glycosyl hydrolases family 16
  misc_feature (229)..(283): Pfam Name: XET_C Pfam Description: Xyloglucan endo-transglycosylase (XET)
  misc_feature: Public GI ID no. 90656518
  misc_feature: Bit score of 565.4 for HMM based on sequences of Figure 46
  misc_feature: Functional Homolog Of SEQ ID NO. 2190
MLLHLSILALLLLCPAAWAENFYQDATVTFGDQRAQIQDGGRVFALSLDKISGSGFQSKNEYLFGRFDMQLKLVPGNSAGTVTTFYLSSQGAGHDEIDFEFLGNSSGQPYTVHTNVYSQGKGNKEQQFRLWFDPTSSFHTYSIVWNSQRIIFLVDNIPIRVYNNDEAIGVPFPKNQAMRVYASLWNADDWATQGGRVKTDWSMAPFTASYRNFNTNACVWSAASSTSSCGGSKTDSVNNAQTWQTQELNANERNRLRWVQQKYMIYNYCADAKRFSQGFSPECKRSRF

SEQ ID NO: 2319 - DNA, 864 bp, Populus balsamifera subsp. trichocarpa
  misc_feature: Ceres Annot ID no. 1482565
  misc_feature: Encodes the peptide sequence at SEQ ID NO. 2320
atgaaagcagggctgctagtctctctgatagtaaactttctggtggttgcttctgccggcagcttctacaatgatttttatttcaactggggacatgaccacggtaaggtatacgacaatggcaatggtctgagcctcattcttgacaaaaattctggatcagggtttcaatccaagaaagagtatttatttggtaagattgatatccagctcaagcttgtccatggcaattcggccggcactgtcactacattttatctatcctctctagggccataccacgatgagatagacttcgaattcttgggaaatacaagtggtcagccatacactcttcacactaacgtgttcagccaaggcaaaggtaacagagagcagcaattctatctttggtttgaccccactgctgatttccacacgtattctatcctttggaatccacaacgcataattttttcagttgatggcattgcaattagagaattcaagaacttagaatccattggcgttccattccctaagaaccaaccaatgaggatttactccagtctttgggaagctgatgactgggcaacatgtggtggaagagttaagacagattggacaaaagcacccttcgttgcttcgtttaggaacttcaacgtcaatgcctgtgcttggtcttacggagcatcttcttgtaaatcaaaatctggctttgctgactccatcagcaactcatggatctgggaagagctcgatgtcggacgcgaaggccagatgaaatgggtgcgggacaattacatgacctatgactattgcaaagattccaagcgattcccacacggcctccctcgtgagtgctatgtcaccaactttccctga

SEQ ID NO: 2320 - protein, 287 aa, Populus balsamifera subsp. trichocarpa
  misc_feature (22)..(203): Pfam Name: Glyco_hydro_16 Pfam Description: Glycosyl hydrolases family 16
  misc_feature (227)..(281): Pfam Name: XET_C Pfam Description: Xyloglucan endo-transglycosylase (XET)
  misc_feature: Ceres Annot ID no. 1482565
  misc_feature: Bit score of 577.2 for HMM based on sequences of Figure 46
  misc_feature: Functional Homolog Of SEQ ID NO. 2190
MKAGLLVSLIVNFLVVASAGSFYNDFYFNWGHDHGKVYDNGNGLSLILDKNSGSGFQSKKEYLFGKIDIQLKLVHGNSAGTVTTFYLSSLGPYHDEIDFEFLGNTSGQPYTLHTNVFSQGKGNREQQFYLWFDPTADFHTYSILWNPQRIIFSVDGIAIREFKNLESIGVPFPKNQPMRIYSSLWEADDWATCGGRVKTDWTKAPFVASFRNFNVNACAWSYGASSCKSKSGFADSISNSWIWEELDVGREGQMKWVRDNYMTYDYCKDSKRFPHGLPRECYVTNFP

SEQ ID NO: 2321 - protein, 282 aa, Arabidopsis thaliana
  misc_feature (29)..(211): Pfam Name: Glyco_hydro_16 Pfam Description: Glycosyl hydrolases family 16
  misc_feature (235)..(281): Pfam Name: XET_C Pfam Description: Xyloglucan endo-transglycosylase (XET)
  misc_feature: Public GI ID no. 15238891
  misc_feature: Bit score of 544.2 for HMM based on sequences of Figure 46
  misc_feature: Functional Homolog Of SEQ ID NO. 2190
MVSFCGRRFAFLIIFLFAAQYERVYAGSFHKDVQIHWGDGRGKILDNVGNLLSLSLDKFSGSGFQSHQEFLYGKVEVQMKLVPGNSAGTVTTFYLKSPGTTWDEIDFEFLGNISGHPYTLHTNVYTKGTGDKEQQFHLWFDPTVDFHTYCIIWNPQRVIFTIDGIPIREFKNSEALGVPFPKHQPMRLYASLWEAEHWATRGGLEKTDWSKAPFTAFYRNYNVDACVWSNGKSSCSANSSWFTQVLDFKGKNRVKWAQRKYMVYNYCTDKKRFPQGAPPECS

SEQ ID NO: 2322 - DNA, 1282 bp, Panicum virgatum
  misc_feature: Ceres Clone ID no. 1821162
  misc_feature: Encodes the peptide sequence at SEQ ID NO. 2323
ggcaacaacgtggctgtcgtcttggctaggcaccgtaccaatggaggagggcgccgcggggagggcgaggccgccggcggtgtgcgtgaccggcgcggggggattcgtgggctcctggctcgtccagcgcctcctcgccgccggccggtacactgtccacggcaccgtccgcgatcccggcgacgccaagaacgcgcacctggcggcgctgggcgccgccgccggggagcggctgcggctgttcagggccgacgtgctggactacggcgccgtggcggcggccgtcgccggctgcgacggcgtcttccacgtcgcctccccagtccccgtccacgccatcactgaccccgaggtcgagctgctcgctcccgccgtgacgggcaccgcgaacgtgctcagggcgtgctccgaggcccaggtcaggagggtcgtcgtggtgtcgtctctctcggccgtgatggtgaaccctgcctggccgcagagccaggccatggacgaagcctgctggtctgacgtcgagctctgcagatccactcagaactggtattgcctctccaagaccctggcagagctcgaggcattcgaccacgccaagagcaccgggctggacgtggtgtcgctctgcccgtccctggtgatcgggcccctgctgcagtccacactgaacgcgagcagctccgtcatcgccgactgcctgaaaggggatcgcgaggtgaagcttaagctgaggaacttcgtggacgtccgcgacgtcgccgacgcgctgctcctggtgtacgaggcgccggaggcgtcggggaggtacatctgcgatgcgcacgcgaagcaggtgtccgacgtcgtggagctgctgaggagctggtacccggcttgcaagaatgccagcagcaagtttgtgcaggtgagcgatgagccttttttcagctccaagaagctggaggcgctggggtggaaattcaggccgtttgaggagaccctcagggacagcgtcgaatccttcagggaggcaggtgtcctggattgaacaagcagcgcactatcgtggatcaaagtagttttgtgctacatcaaagcagcagcgtcgaaacctttggcttgagaattggaatgggcagtgtgaaaaatcataagggacaaagtttgtcggtgtaatatggcgatatagttacttgcaatgctctagtttcagaattcataatccttaatacttttgaagctgatgaaaatgttgtgacaccttatctaatttggatggaccaacaggctcaagattgttgcgtgc

SEQ ID NO: 2323 - protein, 327 aa, Panicum virgatum
  misc_feature (14)..(258): Pfam Name: Epimerase Pfam Description: NAD dependent epimerase/dehydratase fam
  misc_feature: Ceres Clone ID no. 1821162
  misc_feature: Bit score of 882.6 for HMM based on sequences of Figure 41
  misc_feature: Functional Homolog Of SEQ ID NO. 2323
  misc_feature: in Figure 41
MEEGAAGRARPPAVCVTGAGGFVGSWLVQRLLAAGRYTVHGTVRDPGDAKNAHLAALGAAAGERLRLFRADVLDYGAVAAAVAGCDGVFHVASPVPVHAITDPEVELLAPAVTGTANVLRACSEAQVRRVVVVSSLSAVMVNPAWPQSQAMDEACWSDVELCRSTQNWYCLSKTLAELEAFDHAKSTGLDVVSLCPSLVIGPLLQSTLNASSSVIADCLKGDREVKLKLRNFVDVRDVADALLLVYEAPEASGRYICDAHAKQVSDVVELLRSWYPACKNASSKFVQVSDEPFFSSKKLEALGWKFRPFEETLRDSVESFREAGVLD

SEQ ID NO: 2324 - DNA, 1257 bp, Arabidopsis thaliana
  misc_feature: Ceres Annot ID no. 860791
  misc_feature: Encodes the peptide sequence at SEQ ID NO. 2325
aaggaagaagaaaaatcgagaaccatcttctcagccgattttagtaaccatcttcttgtttgctccgaacaatcaagagatcgaaaatggctgatgttcacaaaggaaaggtttgtgtaaccggtgccggagggtttttgggttcgtgggtcgtcgatcttcttctctctaaggattacttcgtccatggcactgtcagagaccctgataatgaaaagtatgctcatttgaagaagctcgagaaagctggtgacaaactcaagctcttcaaggctgatttgttggactacggctctcttcaatctgctattgcaggttgcagcggagtcttccatgtcgcttgcccggttccaccagcttcagtccctaatcctgaggtagaattgatcgcacctgctgtggatggcacgctgaatgtgcttaaggcatgcattgaagcgaatgttaagcgtgttgtgtatgtttcctctgtagctgcggctttcatgaaccctatgtggtcaaagaatcaagtattagatgaggcatgttggtctgaccaggaatactgcaagaaaactgagaattggtattgtctggcaaagacacgagcagagagtgaagcttttgaatttgcaaaacgaaccggacttcatctcgtcagtgtttgccctacccttgttttgggacctatactgcagcagaacacagtaaatgctagtagcctggttcttcttaagcttcttaaagagggttttgaaacacgtgataaccaagaacgtcatttggtagatgtgcgtgatgtagctcaagctttactcttggtttatgagaaagcagaagctgaaggaagatacatatgtacatcccacacggttaaagaagagattgtggttgagaagctgaagagtttttatccacattacaactacccaaagaaatacattgatgcggaagatagagtgaaggtgagttcagagaaattgcagaagttgggttggacttaccggccgttggaggaaacacttgtggattctgttgagagctaccggaaagctaagcttgtggactgaaaacttggaaagaagagcaaaatagtgttttagcttcatatgttatagttatagtgttccattctgcacacacacacacactctctcatcgtttactcaataataagagttgtgcattcaccatggatttctgagtttttgttattttctttttagatatcattacttttattaccaatctacaattttctttccataatatttt

SEQ ID NO: 2325 - protein, 321 aa, Arabidopsis thaliana
  misc_feature (9)..(253): Pfam Name: Epimerase Pfam Description: NAD dependent epimerase/dehydratase fam
  misc_feature: Ceres Annot ID no. 860791
  misc_feature: Bit score of 868.0 for HMM based on sequences of Figure 41
  misc_feature: Functional Homolog Of SEQ ID NO. 2323
  misc_feature: in Figure 41
MADVHKGKVCVTGAGGFLGSWVVDLLLSKDYFVHGTVRDPDNEKYAHLKKLEKAGDKLKLFKADLLDYGSLQSAIAGCSGVFHVACPVPPASVPNPEVELIAPAVDGTLNVLKACIEANVKRVVYVSSVAAAFMNPMWSKNQVLDEACWSDQEYCKKTENWYCLAKTRAESEAFEFAKRTGLHLVSVCPTLVLGPILQQNTVNASSLVLLKLLKEGFETRDNQERHLVDVRDVAQALLLVYEKAEAEGRYICTSHTVKEEIVVEKLKSFYPHYNYPKKYIDAEDRVKVSSEKLQKLGWTYRPLEETLVDSVESYRKAKLVD

SEQ ID NO: 2326 - DNA, 1227 bp, Zea mays
  misc_feature: Ceres Clone ID no. 100899726
  misc_feature: Encodes the peptide sequence at SEQ ID NO. 2327
aacaagtaataatcctctcgatacccgaatcggtgaaggaaaacaagacgagtccgtcggtcgtgatcggtaccaatggaaggcgcagcggggatcaggacgaggccggcggtgtgcgtgaccggcgcgggcggcttcgtggcctcgtggctcgtcgagcgcctcctcgccggcggccgatacatggtccatggcaccgtccgtgatccgggcgacgccaagaacgcgcacctggcggcgatggacggcgccgcggaccggctgcgcctgttcagggccgaattgctcgactacggcagcgtggcggcggccatcgccggctgcgacggcgtcttccacgtcgcgtccccagtccccatgacctatccaatcggtgaccccgaggtagagctgctcgctccggccgtgacgggcaccaagaacgtcctgaaggcgtgctcggaggccaaggtgaagagggtcgtcgtggtgtcgtcggtggccgccgtgatggtgaaccctggctggccccagaacgaggccatggacgaggcttgttggtccgacgtcgaattctgcagaaccactcagaactggtactgtctctccaagacactcgcggagctggaagcgcttgattacgcaaagaggagtggactagacgtggtgtccgtctgcccgtcgctggtgatcgggcccttgctgcagtcgacggtgaacgcaagcagctccgtcatagtcgattgcttgaaaggagatcgtgaggtgaagctgaagctgaggaacttcgtggacgtccgcgacgtcgccgacgctctgctcctggtgtacgagactccggaggcgtctggacggtacatttgcgacgcaaatgcaaggcagatgtttgaggtcgtagcgctgctcaaggactggtaccctgcctacagtcatgctgccaccaagttcgtgcaggtgagcgatgagcctttgttcagctccaagaagctgcaggcgctgggctggaaattccggactctggaggagagcctcagggacagcgttgaatccttcaaggcggcaggtgtcctggtggattgaacagaacaggcagcgccctattcctggatgaccttcgcattttgtaaaccgaagttgctgttttgtgcaagagcatcccgacgtcctcggataatgtaataaaaaaagcaaaagcgacaaagtttgccgtgtattatagcggcattgttacttaacgctgttttattt

SEQ ID NO: 2327 - protein, 327 aa, Zea mays
  misc_feature (13)..(257): Pfam Name: Epimerase Pfam Description: NAD dependent epimerase/dehydratase fam
  misc_feature: Ceres Clone ID no. 100899726
  misc_feature: Bit score of 896.7 for HMM based on sequences of Figure 41
  misc_feature: Functional Homolog Of SEQ ID NO. 2323
  misc_feature: in Figure 41
MEGAAGIRTRPAVCVTGAGGFVASWLVERLLAGGRYMVHGTVRDPGDAKNAHLAAMDGAADRLRLFRAELLDYGSVAAAIAGCDGVFHVASPVPMTYPIGDPEVELLAPAVTGTKNVLKACSEAKVKRVVVVSSVAAVMVNPGWPQNEAMDEACWSDVEFCRTTQNWYCLSKTLAELEALDYAKRSGLDVVSVCPSLVIGPLLQSTVNASSSVIVDCLKGDREVKLKLRNFVDVRDVADALLLVYETPEASGRYICDANARQMFEVVALLKDWYPAYSHAATKFVQVSDEPLFSSKKLQALGWKFRTLEESLRDSVESFKAAGVLVD

SEQ ID NO: 2328 - DNA, 981 bp, Sorghum bicolor
  misc_feature: Ceres Annot ID no. 8743558
  misc_feature: Encodes the peptide sequence at SEQ ID NO. 2329
atggaagtcgcagcagggaggacgaggccggggacggcggtgtgcgtgaccggcgcgggaggcttcgtggcctcgtggctcgtcgagcgcctcctcgccggcggccggtacgtggtccatggcaccgtccgtgatccgggcgacgccaagaacgcgcacctggcggcgatggacggcgccgcggcccggctgcgcctgttcagggccgacttgctggactacggcagcgtggcggcggccgtcgccggctgcgacggcgtcttccacgtcgcgtccccagtccccagcacctacccaatcggtgaccccgaggtagagctgctggctccggccgtgacgggcaccatgaacgtcctcaaggcgagctccgaggccaaggtcaagagggtcgtcgtggtgtcgtcggtggccgccgtgatggtgaaccctggctggccccaggacgaggtcatggacgaagcttgttggtctgatgtcgaattctgcagaaccaatcagaactggtattgtctctccaagacactagcagagacggaggcatttgattacgccaagagaacgggactagatgtggtgtcagtctgcccatccctggtgatcgggcccttgcggcagtcgacagtgaacgcaagcagctccatcatagtcgattgcttgaaaggagatcatgaggtgaaactgaagctgaggaacttcgtggatgttcgcgacgtcgccaatgctctgctcctggtgtacgagactccggaggcgtctggacgctacatctgcgatgcaaatgcaaggcaggtgtctgatgtcatagcgctgctgaagaactggtaccctgcctacaatcatgccaccaagctcgtgcaagtgagcgatgaacctttgttcagctccaagaagctggaggcgctgggctggaaattcaggacgttcgaggagaccctcagggacagcgttgaatccttcacggcggcaggtgtcctggattga

SEQ ID NO: 2329 - protein, 326 aa, Sorghum bicolor
  misc_feature (14)..(258): Pfam Name: Epimerase Pfam Description: NAD dependent epimerase/dehydratase fam
  misc_feature: Ceres Annot ID no. 8743558
  misc_feature: Bit score of 898.3 for HMM based on sequences of Figure 41
  misc_feature: Functional Homolog Of SEQ ID NO. 2323
  misc_feature: in Figure 41
MEVAAGRTRPGTAVCVTGAGGFVASWLVERLLAGGRYVVHGTVRDPGDAKNAHLAAMDGAAARLRLFRADLLDYGSVAAAVAGCDGVFHVASPVPSTYPIGDPEVELLAPAVTGTMNVLKASSEAKVKRVVVVSSVAAVMVNPGWPQDEVMDEACWSDVEFCRTNQNWYCLSKTLAETEAFDYAKRTGLDVVSVCPSLVIGPLRQSTVNASSSIIVDCLKGDHEVKLKLRNFVDVRDVANALLLVYETPEASGRYICDANARQVSDVIALLKNWYPAYNHATKLVQVSDEPLFSSKKLEALGWKFRTFEETLRDSVESFTAAGVLD

SEQ ID NO: 2330 - protein, 321 aa, Oryza sativa subsp. japonica
  misc_feature (11)..(253): Pfam Name: Epimerase Pfam Description: NAD dependent epimerase/dehydratase fam
  misc_feature: Public GI ID no. 115469012
  misc_feature: Bit score of 871.3 for HMM based on sequences of Figure 41
  misc_feature: Functional Homolog Of SEQ ID NO. 2323
  misc_feature: in Figure 41
MLGGDGRTKTVCVTGAGGFVASWLVKLLLSRGCYTVHGTVRDPGDAKNAHLMSLDGAAERLRLFKADLLDYGSVAAAIAGCDDVFHVACPVLLSAPNPEVDILAPAVTGTTNVLKACSEAKVGRVVVVSSVSAAMVNPNWSEGKAIDEDCWSDVDYCRATKNWYTLGKTLAEIEAFDYAKRSGLDLVTLCPSLVIGPLLQPTVNASSTVILGCLKGDCEVKIKLRNFVDVRDVADALLLLYETPGVSGRYICSSHARRMPHIIDLLKSWYPGYKFADKFVEVSDEPQFNSGKLEKLGWKIKPFEETLRDSVESYRAAGVLD

SEQ ID NO: 2331 - DNA, 1292 bp, Triticum aestivum
  misc_feature: Ceres Clone ID no. 696103
  misc_feature: Encodes the peptide sequence at SEQ ID NO. 2332
agataagccagacatcgagtagtccctctcgggtcgcagtacagagtacggacagaggagcgatatggacccggccggcgcggggaaggcgacggcggcggcggcggctgtgtgcgtgacgggcgcgggaggcttcatcgcctcgtggctcgtggagcgccttctcgccggaggagactacgcggtgcatggcaccgtccgtgatcccagcgaccccaagaataaacacctgagggcgctggacggcgccggcgagcggctgcgcctgttcaaggccgacgtgctggactacgcgagcgtggcgtccaccgtggccggctgtgccggcgtcttccacgtcgccagcccctgccccgccgcccaacccacgaaccccgaggtggagctgcttgccccggcggtggccggcacgctgaacgtgctccgggcctgccgggaggccggcgtccgccgcgtcgtggtggtgtcgtcggtcggcgcggtcttcatgaaccccaacccccccgagggccccaccatggacgaacactgctggtcgaacgaggagtactgcagagccaccgagaactggtactgcctctccaagacgctggtcgagcgcgaggcctgggcttacgcagagaaggccgggctggacgtggtgaccgtgtgcccgccgctggtgttcgggcctctgctgcagcccacggtgaacaccagcagcctgttcctcatcagatacctgaaatgcgacggcgtgaacgccatggacgacagggtgaggaacatggtggacgtcagggacgtcgccgacgcccttgtgctggcgtacgagagcccggaggcggccggccggtacatctgcagtgcgcacgccaggaaggtgtccgaaatggtttccgtcgtcaggagcctgcatccgagcctgaactgcgcaaacaagttcgttcagctggtgggagatgagaaagtgttcagcaccgagaagctgcagaggctggggtggaagttcaggacgctggaggagacgctcaaggacagcgtcgagtcctacatgtctgcaggcatactcagctgagcagggcccaaggttgcgcgcggatcggagccaggtgggcattttgtatcctaacgagcactgcggatgtgccgctagtttcagttcaaggatagcacggtagctaatgcgatgatcaaacggtggtgtgaaattgtattgatcaaactagtgtcacaaatactgcaattgctatatgtaaattgactgaatttgtaatttgggtaagtcggttttatgggagaaggagctattg

SEQ ID NO: 2332 - protein, 330 aa, Triticum aestivum
  misc_feature (16)..(261): Pfam Name: Epimerase Pfam Description: NAD dependent epimerase/dehydratase fam
  misc_feature: Ceres Clone ID no. 696103
  misc_feature: Bit score of 862.2 for HMM based on sequences of Figure 41
  misc_feature: Functional Homolog Of SEQ ID NO. 2323
  misc_feature: in Figure 41
MDPAGAGKATAAAAAVCVTGAGGFIASWLVERLLAGGDYAVHGTVRDPSDPKNKHLRALDGAGERLRLFKADVLDYASVASTVAGCAGVFHVASPCPAAQPTNPEVELLAPAVAGTLNVLRACREAGVRRVVVVSSVGAVFMNPNPPEGPTMDEHCWSNEEYCRATENWYCLSKTLVEREAWAYAEKAGLDVVTVCPPLVFGPLLQPTVNTSSLFLIRYLKCDGVNAMDDRVRNMVDVRDVADALVLAYESPEAAGRYICSAHARKVSEMVSVVRSLHPSLNCANKFVQLVGDEKVFSTEKLQRLGWKFRTLEETLKDSVESYMSAGILS

SEQ ID NO: 2333 - DNA, 1264 bp, Gossypium hirsutum
  misc_feature: Ceres Clone ID no. 1930079
  misc_feature: Encodes the peptide sequence at SEQ ID NO. 2334
aatgaacttcggaaaaacaagcatcgcattgagtcagagaagtgactatcgtgtgacgagtgaaaacagctgactcatctacatacttcaaaattaatacatacgcgaagtccagaatgttattttagagataaacataaaccaatattgtgagagaaaatatggctcaggccactggaaaagtgtgtgtgacaggagccggcggctaccttggctcttgggttgtcaagcatcttctctccaacaactacacagtccacggcaccgttagacaacctggggatgccaaatatgcccatttgaatcaacttgagagagcatctcacaacctccaactcttcaaggctgatgttctggattacgattctctttgttccgccattacaggctgcaccggtgtcttccatgttgcctctcccgttccctccaccatcgttcctaatccccaggaggaagtgattgaaccggctgtaaagggcacacttactgtgctcaaagcatgtgttgaatccaatgttaaacgagttgttgttgtgtcttctgtgactgctgtttccttgaaccctaggtggccggtgggtcagatcaaggatgaggcttgctggtctgacaaggaatactgcgcagcaacaaagaattggtattgcctttcaaagacagaagcagagagtgaggcttttgagtttgcaaaaaagtctggacttgacgttgttactgtttgtcctactctcatatgggggccacttctgcagtccaccatcaatgctagtagcaaggttctcattaatcttttaaaagagggatacgacactctggaaatcaaacttcgaaagatagttgatgtgcgcgatgtagctcaggcactgcttctggtgtatgagaagccagcggctgaaggaaggtacatatgcacggctcacacgatcaaggcacgtgatcttgttgataagttgagaagtatgtttcctcaatacaattatcctaaaagctttactgcgggaggggaggaagatacggttagttcagagaaattacaaaggctggggtggagttatcggccattggaagaaactcttgtggattccattgagagctataagaaggctggaatcttggattaatatataaaacagccttttggttgtgattttaatttctgttcactatgtgctctagtttcctcctggtcgcatgagattgcccacttgttgtgttcaacattttcaaaataataatgtcatacaacttgcatttctttcatgct

SEQ ID NO: 2334 - protein, 319 aa, Gossypium hirsutum
  misc_feature (8)..(251): Pfam Name: Epimerase Pfam Description: NAD dependent epimerase/dehydratase fam
  misc_feature: Ceres Clone ID no. 1930079
  misc_feature: Bit score of 872.4 for HMM based on sequences of Figure 41
  misc_feature: Functional Homolog Of SEQ ID NO. 2323
  misc_feature: in Figure 41
MAQATGKVCVTGAGGYLGSWVVKHLLSNNYTVHGTVRQPGDAKYAHLNQLERASHNLQLFKADVLDYDSLCSAITGCTGVFHVASPVPSTIVPNPQEEVIEPAVKGTLTVLKACVESNVKRVVVVSSVTAVSLNPRWPVGQIKDEACWSDKEYCAATKNWYCLSKTEAESEAFEFAKKSGLDVVTVCPTLIWGPLLQSTINASSKVLINLLKEGYDTLEIKLRKIVDVRDVAQALLLVYEKPAAEGRYICTAHTIKARDLVDKLRSMFPQYNYPKSFTAGGEEDTVSSEKLQRLGWSYRPLEETLVDSIESYKKAGILD

SEQ ID NO: 2335 - protein, 323 aa, Vitis vinifera
  misc_feature (10)..(253): Pfam Name: Epimerase Pfam Description: NAD dependent epimerase/dehydratase fam
  misc_feature: Public GI ID no. 157350602
  misc_feature: Bit score of 851.6 for HMM based on sequences of Figure 41
  misc_feature: Functional Homolog Of SEQ ID NO. 2323
  misc_feature: in Figure 41
MAEKRDEERVCVTGAGGYVASWVVKLLLSKGFIVHGTVRDPCDEKNSHMKKLEKASENLKLFKADLLELESLCAAIDGCTGVFHVASPVPSAKVANPEVELLEPAVTGTRNVLKACEKAKVKKVVVVSSVAAVNRNPNWPMDRPKDEECWSDPEFCRTNQDFYSLAKTLAESEALEHAKKSDLNIVTICPSMVIGPMLQSTLNASSLLLLKYLKDANGSVENKERPIIDVHDLADAIFLIYDKPEAEGRYICSSYTILVQKLIEKLKNIYPNYNYPKSYTEVEEAFKLSSKKLESLGWKYRSLEETLMDAVKDFEENGLLDKH

SEQ ID NO: 2336 - DNA, 948 bp, Sorghum bicolor
  misc_feature: Ceres Annot ID no. 8743563
  misc_feature: Encodes the peptide sequence at SEQ ID NO. 2337
atggagacggtgtgcgtgaccggcgcgggcgggttcgtggcctcgtggctcgtcgagcgcctcctcgccgctggccgatacatggtccacggcaccgtccgcgatcccggcgacgccaagaacgcgcacctgctggcgctggacggcgccgcggagcggctgcgcctgttcaaggccgacctgctcgactccggcagcgtggcggcggccgtcgcaggctgcgacggcgtcttccacgtcgcctgccctgtccccgactatgccctcactgaccccgaggtcgagcttgtggctcctgccgtgacgggcaccatgaacgtcctcagggcgtgctccgaggccgaggtcaagagggtcgtcgtggtgtcgtctctctcggctgtgatgataaagcctgagtgggacgagtgcaaggtcatggacgaaggttgctggtctgacgtcggccactgcagaaccactgagaactggtattgcctttccaagacactggcagagatggaggcatttgaatacgccaagagaactggggtcgatgtggtttcagtctgcccatccctggtaatcgggcccttgctgcaacccacactgaacgcgagcagtgcggtcgttgttgatttcctcaaaggagatcgcttggtgaaaatgaaactcagacactttgtggatgttcgcgatgtcgctgatgctcttctcctagtgtatgagaccccagaggcatctgggaggtatatctgcaattcgcacgcaaggctggtatctgatgtcataaagctacttaagagctggtacccgacttatcaatatgccaccaagttcgtccaagtgaaccacgagcccccattcagttccaagaagttgcaggcgcttggctggaaattcaggccgttcgaggagaccctcagggacagcgttgaatccttcaaagcggcaggtgtcttggattga

SEQ ID NO: 2337 - protein, 315 aa, Sorghum bicolor
  misc_feature (4)..(247): Pfam Name: Epimerase Pfam Description: NAD dependent epimerase/dehydratase fam
  misc_feature: Ceres Annot ID no. 8743563
  misc_feature: Bit score of 800.1 for HMM based on sequences of Figure 41
  misc_feature: Functional Homolog Of SEQ ID NO. 2323
METVCVTGAGGFVASWLVERLLAAGRYMVHGTVRDPGDAKNAHLLALDGAAERLRLFKADLLDSGSVAAAVAGCDGVFHVACPVPDYALTDPEVELVAPAVTGTMNVLRACSEAEVKRVVVVSSLSAVMIKPEWDECKVMDEGCWSDVGHCRTTENWYCLSKTLAEMEAFEYAKRTGVDVVSVCPSLVIGPLLQPTLNASSAVVVDFLKGDRLVKMKLRHFVDVRDVADALLLVYETPEASGRYICNSHARLVSDVIKLLKSWYPTYQYATKFVQVNHEPPFSSKKLQALGWKFRPFEETLRDSVESFKAAGVLD

SEQ ID NO: 2338 - DNA, 963 bp, Sorghum bicolor
  misc_feature: Ceres Annot ID no. 8743566
  misc_feature: Encodes the peptide sequence at SEQ ID NO. 2339
atggcggcggcggcgaagagcgtatgcgtgaccggcgcgggcggcttcatcgcgtcgtggctcgtgaagctcctcctctcccgtggccaatacacggtccgcggcaccgtgcgcgaccctggtgctagcaagaatgctcatctcaaggcgctggaaggagctatggaaaggttgcagcttcttaaggttgatttgttggactacagcagtgttgcatcagcaattgccggctgtgagggtgtcttccatgtagctagtcctgttccttccggtcggtcctccaaccctgaggtggaggtcataggtcctgctgtattaggaacaaccaatgtgttaaaggcttgctatgaggcaaaagttaagcgagttgtggtggtgtcttctgttgcagctatattcagtaacccttactggcctaagggcaaggcctttgatgaagactgttggtcagatgaggattactgcaggaagaatgaggattggtattacctttccaaaactctgtccgaacgtgaggcttttgcttatgcagcaaaaacggggttggatgttgtaactatttgcccggccttggtatttggacccttgatgcagtctatattaaatgcgagtagtaaaatactccttaactatttcaaaggagatcgtgagaccattgaaaatagactcagaaatattgtggatgttcgtgatgttgctgatgctcttcttctggcatatgaaaaaccagaagcgtctggacgatacatctgcagctcacaaccaataaaagtttctgatatgataaacatattaaagactttatatccaacttacccttatcccaaaaactttgtggaaatggatgacaactccatatacagttctgagaaacttcagaagctagggtggaccttcaggcctatagaggagaccctccgcgaaagtgttgaatcctacaaagcatttggcatcctgaattga

SEQ ID NO: 2339 - protein, 320 aa, Sorghum bicolor
  misc_feature (8)..(252): Pfam Name: Epimerase Pfam Description: NAD dependent epimerase/dehydratase fam
  misc_feature: Ceres Annot ID no. 8743566
  misc_feature: Bit score of 742.3 for HMM based on sequences of Figure 41
  misc_feature: Functional Homolog Of SEQ ID NO. 2323
MAAAAKSVCVTGAGGFIASWLVKLLLSRGQYTVRGTVRDPGASKNAHLKALEGAMERLQLLKVDLLDYSSVASAIAGCEGVFHVASPVPSGRSSNPEVEVIGPAVLGTTNVLKACYEAKVKRVVVVSSVAAIFSNPYWPKGKAFDEDCWSDEDYCRKNEDWYYLSKTLSEREAFAYAAKTGLDVVTICPALVFGPLMQSILNASSKILLNYFKGDRETIENRLRNIVDVRDVADALLLAYEKPEASGRYICSSQPIKVSDMINILKTLYPTYPYPKNFVEMDDNSIYSSEKLQKLGWTFRPIEETLRESVESYKAFGILN

SEQ ID NO: 2340 - DNA, 1226 bp, Triticum aestivum
  misc_feature: Ceres Clone ID no. 677424
  misc_feature: Encodes the peptide sequence at SEQ ID NO. 2341
gtctgctgtccacttcagcgcagcgtggcgagacgcggagcaaccaaactccgcacagcagaggggactagccggagcggggagaaaaaacagcatggcggcggcggcggcggcgaggaagagcgtgtgcgtgaccggcgcagggggcttcgtcgcctcgtggctcgtcaagctcctcctctctaagggccactacgcggtccgcggcaccgtgcgcgatcccggtaatgctaagaatgctcaccttaaggcgctagaaggtgctggggaaaggttggagctgctcagcgccgacctgctgaactacgacagcattgcgtcagcggttgctggctgtgagggcgtctttcatgttgctagccctgtcccttctggcagatcaaccaatcctgaggaagaagttatagcccctgctgtaacaggcacactgaatgtcttgaaggcttgctacgaggcgaaagttaagcgagttgtcatggtgtcttcagttgctgctgtgtccaataatcctaactggcctaaggataaattatttgatgaagatagctggtcagacgaggatctctgcagaaagggtgaggattggtatttcctttccaaaacactcgcagagcgtgaggcttttgcttatgcagcaaaaactgggctggatattgtaactatttgcccgtcgttggtaattggccccttgatgcagtctacagtaaatacaagcagtaacattctccttaattacctcaaaggagaacgtgatactgtagaaaataaactcaggaatgtagtggatgtccgtgatgttgccgatgctcttctattggcatatgaaaatccagaggcgtctggacggtacatctgcagttcaaaaccagtaaaagtctctgatatgataagcgtactgaagaccttatatccaatgtacacttatcccaaaaactttacggaagtggaagaaaataccatttatagttcagagaaacttcagaagctagggtggaccttcaggcctttagagaagaccctgggggacagcgtggaatcctacaaagcatctggcgtcctgaactgagcatccaaccagggaaagtttggctgttaatgcttgcaaactccttgtggttcatgtaagcagtgaaacaaaataagttggtgacacaatcgtcacgagagtctgtgtgaacatgaacaaagcatgaatcgtatgcgcgcctttcttttggtgtgtcttg

SEQ ID NO: 2341 - protein, 323 aa, Triticum aestivum
  misc_feature (11)..(255): Pfam Name: Epimerase Pfam Description: NAD dependent epimerase/dehydratase fam
  misc_feature: Ceres Clone ID no. 677424
  misc_feature: Bit score of 749.8 for HMM based on sequences of Figure 41
  misc_feature: Functional Homolog Of SEQ ID NO. 2323
MAAAAAARKSVCVTGAGGFVASWLVKLLLSKGHYAVRGTVRDPGNAKNAHLKALEGAGERLELLSADLLNYDSIASAVAGCEGVFHVASPVPSGRSTNPEEEVIAPAVTGTLNVLKACYEAKVKRVVMVSSVAAVSNNPNWPKDKLFDEDSWSDEDLCRKGEDWYFLSKTLAEREAFAYAAKTGLDIVTICPSLVIGPLMQSTVNTSSNILLNYLKGERDTVENKLRNVVDVRDVADALLLAYENPEASGRYICSSKPVKVSDMISVLKTLYPMYTYPKNFTEVEENTIYSSEKLQKLGWTFRPLEKTLGDSVESYKASGVLN

SEQ ID NO: 2342 - DNA, 993 bp, Sorghum bicolor
  misc_feature: Ceres Annot ID no. 8743556
  misc_feature: Encodes the peptide sequence at SEQ ID NO. 2343
atggacggcggcgacgcgggcaagacgaggacgatgaagaagacggtgtgcgtgacgggcgccggcggcttcgtcgcctcgtggctcgtgcagcgcctcctctccagaggcgactacctcgtgcgtggcactgttcgcgatccgagtgatcccaagaacgcgcacctgatggcgctggacggcgccggggagcgcctgcggctgttcaaggctgacttgttggaccgtgccagcgtcgccgccgccgttgctggctgcgacggcgtcttccacgtcgccagccccgtcccggccgtcgagcccaccaaccccgatgtggagatcatggctccggcggtgaccggcacgcagaacatgctggaggctagccacgcggccaacgtccgccgcgtcgtggtggtgtcgtcggtcgccgcggtgatcgcgaaccccaccagcatccccgatgacgccgtcgccgacgaagactgctggtcggacgaggactactgcagagccactaagaactggtactgcctttccaagacggtggccgaacgcgaggcactggcatacggcgagaggactgggatggacgtggtcaccgtctgtccgccgtgggttctgggtccgctgctgcagccgacggtgaacgccaccagcatgggtttcgtgaaatacctgaaaggagaaaacaccgatgagaagaggaggaacatggtggacgtgcgcgacgtcgcagacgctctggtcctgacgtacgagacgccggaggcggctggccggcgatacatctgtagcgcacacgccatgaaggtgtctgaaataatcagcctcgtcagcagcctgtacccagacctgaagctgcactaccccagggagtttgttcagaaggaagacgagaagggagtgagctccaagaggctgcaggcgctggggtggaaattcaggacggtggaggaaactctgagagacaccatcgactcgtacaaggctgctggaatcctcaactga

SEQ ID NO: 2343 - protein, 330 aa, Sorghum bicolor
  misc_feature (16)..(260): Pfam Name: Epimerase Pfam Description: NAD dependent epimerase/dehydratase f
  misc_feature: Ceres Annot ID no. 8743556
  misc_feature: Bit score of 712.1 for HMM based on sequences of Figure 41
  misc_feature: Functional Homolog Of SEQ ID NO. 2323
MDGGDAGKTRTMKKTVCVTGAGGFVASWLVQRLLSRGDYLVRGTVRDPSDPKNAHLMALDGAGERLRLFKADLLDRASVAAAVAGCDGVFHVASPVPAVEPTNPDVEIMAPAVTGTQNMLEASHAANVRRVVVVSSVAAVIANPTSIPDDAVADEDCWSDEDYCRATKNWYCLSKTVAEREALAYGERTGMDVVTVCPPWVLGPLLQPTVNATSMGFVKYLKGENTDEKRRNMVDVRDVADALVLTYETPEAAGRRYICSAHAMKVSEIISLVSSLYPDLKLHYPREFVQKEDEKGVSSKRLQALGWKFRTVEETLRDTIDSYKAAGILN

SEQ ID NO: 2344 - DNA, 981 bp, Sorghum bicolor
  misc_feature: Ceres Annot ID no. 8690999
  misc_feature: Encodes the peptide sequence at SEQ ID NO. 2345
atggtggcatgccaaggcgagacggcgacgacgacggtttgcgtgactggcgctggtggcttcatcgcgtcgtggctggtgcagcgcctcctctccagcggcagctacgtcgtgcacggcgccgtgcgcgacccgagcgacccgaagtacgcgcacctgatggcgctggatggcgccgtggagcggctgcggctgttcaaggcggacatgctggaccacgccggcgtcgcggctgccgtggccggctgcgacggcgtcttccacgttgccagccccgtcccggcgtcgaagcccgcggacccggagctggaggtcgtggcccccgcggtggacggcacgcgcaacgtgctcagggcctgccacgaggctaacgtccgccgcgtcgtggtggtctcgtccgtcgcggccatcgccgtgaaccccaactgccgcaacggcgtcgtcctggacgaggagtggtggtccgacgaggacttctgcagaaccattaagggctggtattttctgtccaagacgctagccgaacgcgccgccttcgcgtacgccaaggagaccgggcttgacgtggtgagcgtctgcccgtcgtggtgtctcggacctctgctgcagcccaccgtgaacaacagcagcttgacactcattgactacctcaaaggtgaccgcgacaccgtcgacgacaagatgaagaacgtcgtggacgtccgcgacgtcgccgaggctctcgtcctggtgtatgagaccccggaggcttccgggcgctacatctgcaggtcatatccaatgagcatgactgagatccttgacatcatcaagagcttctatcccaacctcagctaccctaacaacttcgttaaagtgcaagacgaaaggatgttcacatcgaagaagctgcaagcgctggggtggagctacaggccggcagaggaaaccttcaaggacacagtaaaatcctacaagaatgcagccatcctcaacttttaa

SEQ ID NO: 2345 - protein, 326 aa, Sorghum bicolor
  misc_feature (13)..(257): Pfam Name: Epimerase Pfam Description: NAD dependent epimerase/dehydratase fam
  misc_feature: Ceres Annot ID no. 8690999
  misc_feature: Bit score of 697.7 for HMM based on sequences of Figure 41
  misc_feature: Functional Homolog Of SEQ ID NO. 2323
MVACQGETATTTVCVTGAGGFIASWLVQRLLSSGSYVVHGAVRDPSDPKYAHLMALDGAVERLRLFKADMLDHAGVAAAVAGCDGVFHVASPVPASKPADPELEVVAPAVDGTRNVLRACHEANVRRVVVVSSVAAIAVNPNCRNGVVLDEEWWSDEDFCRTIKGWYFLSKTLAERAAFAYAKETGLDVVSVCPSWCLGPLLQPTVNNSSLTLIDYLKGDRDTVDDKMKNVVDVRDVAEALVLVYETPEASGRYICRSYPMSMTEILDIIKSFYPNLSYPNNFVKVQDERMFTSKKLQALGWSYRPAEETFKDTVKSYKNAAILNF

SEQ ID NO: 2346 - protein, 321 aa, Oryza sativa subsp. japonica
  misc_feature (10)..(253): Pfam Name: Epimerase Pfam Description: NAD dependent epimerase/dehydratase fam
  misc_feature: Public GI ID no. 115469010
  misc_feature: Bit score of 733.3 for HMM based on sequences of Figure 41
  misc_feature: Functional Homolog Of SEQ ID NO. 2323
MAAAAARQTVCVTGAGGFMASSHVELLLSRGNYAVRGTVRDPGDAKNDHLRALQGAEERLQLLKADLLDYDSVASAVAGCEGVFHVASPVPSGRSTNPEVEVIAPAVTGTLNVLKACHEAKVKRVVMVSSIAAVFSNPNWPKDKAFTEDSWSDEELCRKNQDWYYLSKTVAEREAFAYAAKTGLDIVTICPSLVIGPLMQSTVNASSKVLINYFKGDRDTVENRLRNVVDVRDVANALLLAYENPASGRYICSSAPIRVSDMINILKTLYPTYTYPKNFVDVEENTIYSFEKLQKLGWSFRPIEETLRDSVESYKAFGILD

SEQ ID NO: 2347 - protein, 321 aa, Oryza sativa subsp. indica
  misc_feature (10)..(253): Pfam Name: Epimerase Pfam Description: NAD dependent epimerase/dehydratase fam
  misc_feature: Public GI ID no. 125556115
  misc_feature: Bit score of 733.6 for HMM based on sequences of Figure 41
  misc_feature: Functional Homolog Of SEQ ID NO. 2323
MAAAAARQTVCVTGAGGFMASSHVELLLSRGNYAVRGTVRDPGDAKNDHLRALQGAEERLQLLKADLLDYDSVASAVAGCEGVFHVASPVPSGRSTNPEVEVIAPAVTGTLNVLKACHEAKVKRVVMVSSIAAVFSNPNWPKDKAFTEDSWSDEELCRKNQDWYYLSKTVAEREAFAYAAKTGLDIVTICPSLVIGPLMQSTVNASSKVLINYFKGDRDTVENRLRNVVDVRDVANALLLAYENPASGRYICSSAPIRVSDMINILKTLYPTYTYPKNFVDVEENTIYSIEKLQKLGWSFRPIEETLRDSVESYKAFGILD

SEQ ID NO: 2348 - protein, 320 aa, Zea mays
  misc_feature (8)..(252): Pfam Name: Epimerase Pfam Description: NAD dependent epimerase/dehydratase fam
  misc_feature: Public GI ID no. 212721784
  misc_feature: Bit score of 725.7 for HMM based on sequences of Figure 41
  misc_feature: Functional Homolog Of SEQ ID NO. 2323
MEAVGKSVCVTGAGGFIASWLVKLLLCRGQYKVRGTVRDPGASKNAHLKVLEGAGERLQLVKADLLDYSSVASAIAGCEGVFHVASPVPSGRSSNPEVEVIGPAVTGTTNVLKACYEAKVGRVVVVSSCAAVYANPNYPKGKVFDEDCWSDEAYCRKNEDWYFVSKTLAEREAFAYAAKTGLDVVTICPSLVFGPLMQPTVNSSSKIILKYFTGDRETVENILRNMVDVRDVADALLLAYEKPEASGRYICSSHAIKVADMINILKTLYPSYPYPKNFVEDDDNSVYSSEKLQKLGWSFKPIEESLRDTVESYKAFGILN

SEQ ID NO: 2349 - DNA, 978 bp, Sorghum bicolor
  misc_feature: Ceres Annot ID no. 8704900
  misc_feature: Encodes the peptide sequence at SEQ ID NO. 2350
atggaggcggcggcggagaggggcaccgtcgtcaccgcctgcgtgaccggcgcggggggcttcctggcgtcgtggctcgtcaagctcttgctctccaccggccgctacgccgtccgcggcaccgtgcgggatctcggtgatggcaagaatgcccatcttatgacactcgaagacgccggcgagaggttgcagttggtcaaggctgacatgctggactacggcagcgttgcgtccgcggtcgccggctgtgagggtgtcttccatgtcgcgagccctgtcccctccggtcaactctccaaccctgaggcagatgtcatagctcctgctgtaactggtacactgaatgtgttgaaagcttgccacgaggcaaaagtgaagagagttgttgtggtatcttcagtggctgctgtgttcaataatcctaactggcctaagggcgaggcctttaccgaggatagctggtcagatgcagagtattgcagaaaaaatgaggaatggtatttcctttctaaaacactggcagaacatgaggcttttgcttatgcagcaaaaactgggctagacattgtaactatttgcccatcattggtgattggacctttgttgcaacccacagtaaatgcaagtgttaaaatcttcctcggttatatcaaaggagatcaggagacagtcaataatggatccatgaatctagtggatgttcgtgatgtcgctgacgcccttctgttggcttacgaaaatcctcaggcatctggacggtacctctgctgttcaccagcaataagagtctctgatattgtaaacacactaaagacctcatatccaacacacacttatccccaaaaattcgttgaagtggaaggtagcaacacatatatcacggagaagcttcggaagctagggtggacctctaggcctatggaggaaaccctgcgggacagcgtcgattgctaccgagctttggggatcctgaactga

SEQ ID NO: 2350 - protein, 325 aa, Sorghum bicolor
  misc_feature (13)..(257): Pfam Name: Epimerase Pfam Description: NAD dependent epimerase/dehydratase fam
  misc_feature: Ceres Annot ID no. 8704900
  misc_feature: Bit score of 683.6 for HMM based on sequences of Figure 41
  misc_feature: Functional Homolog Of SEQ ID NO. 2323
MEAAAERGTVVTACVTGAGGFLASWLVKLLLSTGRYAVRGTVRDLGDGKNAHLMTLEDAGERLQLVKADMLDYGSVASAVAGCEGVFHVASPVPSGQLSNPEADVIAPAVTGTLNVLKACHEAKVKRVVVVSSVAAVFNNPNWPKGEAFTEDSWSDAEYCRKNEEWYFLSKTLAEHEAFAYAAKTGLDIVTICPSLVIGPLLQPTVNASVKIFLGYIKGDQETVNNGSMNLVDVRDVADALLLAYENPQASGRYLCCSPAIRVSDIVNTLKTSYPTHTYPQKFVEVEGSNTYITEKLRKLGWTSRPMEETLRDSVDCYRALGILN

SEQ ID NO: 2351 - DNA, 969 bp, Sorghum bicolor
  misc_feature: Ceres Annot ID no. 8743557
  misc_feature: Encodes the peptide sequence at SEQ ID NO. 2352
atggacatggacggcggcgacgccggcaagacgaggacgatgaagacggtgtgcgtgacgggcgccgggggcttcgtcgcctcgtggctcgtgcagcgcctcctatccagaggcgactacctcgtgcgtggcactgttgacgacccgagtgatcccaagaacgcgcacctgatggcgctggacggcgcggcggagcgcctgcggctattcaaggccgatttgctggaccgtgccagcgtcgccgccgccgttgctggctgcgacggcgtcttccacgtcgccagccccgtcccggccgtcgagcccaccaaccccgatgtggacatcctggctccggcggtgaccggcacgcagaacgtgctcgagggtagccacgcggccaacgtccgccgcgtcgtggtggtgtcgtcggtcgccgcggtgctcgcgaaccccagcgtccccgatggcgccatcgtcgacgaagactgctggtcggacgaggactactgcagagccactaagaactggtactgcgtttccaagacactggccgaacgcgaggcactggcatacagcgagaggaccgggatggacgttgtcaccgtctgtccgccgtgggttctgggtccgctgctgcagccgacggtgaacgccaccagagataacacctataagaagtggaggaacatggtggacgtgcgcgacgtcgcagatgctctcgtcctgacatacgagacaccggaggcgtctggccggcggcgatacatctgtagcgcgcacgccatgaaggtgtctgaaacggtcggcctcgtcagcagcctgttcccagatctgaagctgcaataccccagggagtttgttcagagggaagacgagaagggagtgagctccaagaggctgcaggcgctggggtggaagttcagggcggtggaggaaactctgagggacaccatcgactcgtacaaggctgctggaatcctcaactga

SEQ ID NO: 2352 - protein, 322 aa, Sorghum bicolor
  misc_feature (17)..(252): Pfam Name: Epimerase Pfam Description: NAD dependent epimerase/dehydratase fam
  misc_feature: Ceres Annot ID no. 8743557
  misc_feature: Bit score of 664.6 for HMM based on sequences of Figure 41
  misc_feature: Functional Homolog Of SEQ ID NO. 2323
MDMDGGDAGKTRTMKTVCVTGAGGFVASWLVQRLLSRGDYLVRGTVDDPSDPKNAHLMALDGAAERLRLFKADLLDRASVAAAVAGCDGVFHVASPVPAVEPTNPDVDILAPAVTGTQNVLEGSHAANVRRVVVVSSVAAVLANPSVPDGAIVDEDCWSDEDYCRATKNWYCVSKTLAEREALAYSERTGMDVVTVCPPWVLGPLLQPTVNATRDNTYKKWRNMVDVRDVADALVLTYETPEASGRRRYICSAHAMKVSETVGLVSSLFPDLKLQYPREFVQREDEKGVSSKRLQALGWKFRAVEETLRDTIDSYKAAGILN

SEQ ID NO: 2353 - DNA, 1318 bp, Zea mays
  misc_feature: Ceres Clone ID no. 229676
  misc_feature: Encodes the peptide sequence at SEQ ID NO. 2354
actgtggaagaaccgttgagctgagccgagcagggagaaggacgcgagagcagcatggagacggcggagaggggcaccaccgtgtgcgtgaccggcgcggggggctttgtggcatcgtggctcgtcaagctcctcctctccaccggccgctacaccgtccggggtaccgtgcgtcatctcggtgatggcaagaatgcccatcttaagacactggaagatgccggggagaggctgcagttggtcaaggctgacatgctggactatggcagcgttgcgtccgcggtcgccggctgtcagggtgtcttccatgtcgcgagccctgtcccctccggcaaatcctccaaccctgaggaagatgtcattgctcctgctgtaactggcacactgaatgtgttgaaagcttgctatgaggccaaagcgaagagagttgttgtggtatcttcagtggctgctgtgttcaataatcctgactggcctaagggcgaggcctttactgaggatagctggtcagatggggaatattgcagaaaaaatgaggaatggtatttcctttctaaaacattggcagaacatgaggcttttgcttatgcagccaaaactgggctagacattgtaactatttgcccatcattggtaattggacctttgttgcaacctgcagtaaatacaagtattaaagtcttcctcagttatatcaaaggagatcaggagatagttaaagatggacccaaaaatcttgtggatgttcgtgatgtcgctggtgcccttctgttggcttacgaaaatctgcaggcatctggacgatacctctgcagctcaccagcaataagagtctctgatattgtaaacatactgaagaccgaatatccaacatacacttaccctcaaaaattcgttgaagcagaaggtagcaacacatacaacacggagaagcttcggaagctagggtggacctctaggcccatggaggaaaccctccgggacagcatcgaatgctacagagctttgggcatcctgaactgagcttcccttcagctttgggctttggctgctgctgctgctgctacttttcagcttctttcttcttcatgtaaacagtgaatcagaaattcagaatacgctggtataggaactagagaagtggatcatggaagatgctgatgctaaaaatgaatttggatactatccatcatttgtgcctgcgggattgagggcaaattaattaagtacttatatttgtaaatctggggccgtcgaactgaaccaacaatgaagaggtgaagaacaaatcgaagtggtagatgagtgcattgctgtg

SEQ ID NO: 2354 - protein, 322 aa, Zea mays
  misc_feature (10)..(254): Pfam Name: Epimerase Pfam Description: NAD dependent epimerase/dehydratase fam
  misc_feature: Ceres Clone ID no. 229676
  misc_feature: Bit score of 673.3 for HMM based on sequences of Figure 41
  misc_feature: Functional Homolog Of SEQ ID NO. 2323
METAERGTTVCVTGAGGFVASWLVKLLLSTGRYTVRGTVRHLGDGKNAHLKTLEDAGERLQLVKADMLDYGSVASAVAGCQGVFHVASPVPSGKSSNPEEDVIAPAVTGTLNVLKACYEAKAKRVVVVSSVAAVFNNPDWPKGEAFTEDSWSDGEYCRKNEEWYFLSKTLAEHEAFAYAAKTGLDIVTICPSLVIGPLLQPAVNTSIKVFLSYIKGDQEIVKDGPKNLVDVRDVAGALLLAYENLQASGRYLCSSPAIRVSDIVNILKTEYPTYTYPQKFVEAEGSNTYNTEKLRKLGWTSRPMEETLRDSIECYRALGILN

SEQ ID NO: 2355 - DNA, 1316 bp, Zea mays
  misc_feature: Ceres Clone ID no. 336720
  misc_feature: Encodes the peptide sequence at SEQ ID NO. 2356
gtctagatcgctcgtccggtgtggtctctggacttgcttgccgttcacttctcttcagcggcagcgtggcaaggcaacgagagcaacgaagagtattcaaaccgaaaacaatggatccggtgcggaagagcgtgtgcgtgaccggcgctggcggcttcgtcgcgtcggagctggtgaagctcctcctctcccggggccaatacgcggtccgcggcaccgtgcgcgaccctggtgctagcaagaatgcccatctcaaggtgctggaaggagctgaggaaaggttgcagcttctcaaggctgatctgatggactacgacagcattgcatcagcagttgccggctgtgagggtgtcttccatgtagctagccctgtcctttcccatcgaccctccaaccctgaggtggaggtcatagctcccgctgtaataggtacaaccaatgtgttaaaggcttgctatgaggcaaaagttaggcgagttgtggtggtgtcttcatgtggagctgtgtatgctaatcctatttatccgaagggtaaggtgtttgatgaagactgctggtcagatgaggattactgcaggaagaaggaggattggtatttagtttccaaaacactgtcggaacgagaggctcttgcttttgcagcaaaaacagggctggacgttgtaactgtttgtccgtcattagtatttggacccttgatgcagcctacagtaaatttgagcagcgaaatgatccttaaatatttcaaagatctcgagactgttgaaaatgtactcagtaatatggtggatattcgtgatgttgctgatgctcttcttctgacttacgaaaagccagaagcgtctggacgatacatctgcagttcacatgcaataaaaatttctgatatgataaacatactgaagaccatgtatccgtcttacccttatcccaaaaattttgtggaagatgatgtcaactctgtatacagctctgagaaactgcagaagctggggtggagcttcaagcctatagaggaatccctccgtgacactgttgaatcctacaaggcatttggcatcctgaattgaacatcgaactaggattgtttccatctgctgttgcctccgaactcctcctgaataatgtaggcgcagtgacaacagcactgccgttctctttatttttcaacactattatgtagtggttcaggccaaataagtaggcccggtgctgactgttgtatggtttgtggcctattgtcgttgctaaaaactagaaatatgcgtactaatgttgcattgctgcacttgatttgcttgtcgtcattctgatgc

SEQ ID NO: 2356 - protein, 319 aa, Zea mays
  misc_feature (8)..(251): Pfam Name: Epimerase Pfam Description: NAD dependent epimerase/dehydratase f
  misc_feature: Ceres Clone ID no. 336720
  misc_feature: Bit score of 688.5 for HMM based on sequences of Figure 41
  misc_feature: Functional Homolog Of SEQ ID NO. 2323
MDPVRKSVCVTGAGGFVASELVKLLLSRGQYAVRGTVRDPGASKNAHLKVLEGAEERLQLLKADLMDYDSIASAVAGCEGVFHVASPVLSHRPSNPEVEVIAPAVIGTTNVLKACYEAKVRRVVVVSSCGAVYANPIYPKGKVFDEDCWSDEDYCRKKEDWYLVSKTLSEREALAFAAKTGLDVVTVCPSLVFGPLMQPTVNLSSEMILKYFKDLETVENVLSNMVDIRDVADALLLTYEKPEASGRYICSSHAIKISDMINILKTMYPSYPYPKNFVEDDVNSVYSSEKLQKLGWSFKPIEESLRDTVESYKAFGILN

SEQ ID NO: 2357 - protein, 322 aa, Zea mays
  misc_feature (10)..(254): Pfam Name: Epimerase Pfam Description: NAD dependent epimerase/dehydratase fam
  misc_feature: Public GI ID no. 194707432
  misc_feature: Bit score of 665.3 for HMM based on sequences of Figure 41
  misc_feature: Functional Homolog Of SEQ ID NO. 2323
METAERGITVCVTGAGGFVASWLVKLLLSTGRYTVRGTVRHLGDGKNAHLKTLEDAEERLQLVKADMLDYGSVASAVAGCQGVFHVASPVPSGKSSNPEEDVIAPAVTGTLNVLKACYEAKAKRVVVVSSVAAVFNNPDWPKGEAFTEDSWSDGEYCRKNEEWYFLSKTLAEHEAFAYAAKTGLDIVTICPSLVIGPLLQPAVNTSVKVFLSYIKGDQEIVKDGPKNLVDVRDVAGALLLAYENLQASGRYLCSSPAIRVSDIVNILKTEYPTYTYPQKFVEAEGSNTYNTEKLRKLGWTSRPMEDTLRDSIECYRAMGILN

SEQ ID NO: 2358 - protein, 321 aa, Arabidopsis thaliana
  misc_feature (9)..(254): Pfam Name: Epimerase Pfam Description: NAD dependent epimerase/dehydratase fam
  misc_feature: Public GI ID no. 15226135
  misc_feature: Bit score of 805.3 for HMM based on sequences of Figure 41
  misc_feature: Functional Homolog Of SEQ ID NO. 2323
MAVVQKGKVCVTGAGGFLGSWVVNHLLSRDYFVHGTVRDPGNEKYAHLKKLDKAGDKLKLFKADLLNYGSLQSAIAGCSGVFHVACPVPSASVPNPEVDLIAPAVDGTLNVLKACVEAKVKRVVYVSSVSAVAMNPMWSKSQVLDETAWSDQDYCKKTENWYSLSKTRAESEAFEFAKRTGLDLVSVCPTLVLGPVLQQHTVNASSLVLLKLLKEGYESRNNQERHLVDVRDVAQALLLVYEKAEAEGRYICIGHTVREQEVAEKLKSLYLNYNYPKRYIEADGKVKVSSEKLQKLGWTYRPLEETLVDSVESYRKAKLVD

SEQ ID NO: 2359 - DNA, 1059 bp, Solanum lycopersicum
  misc_feature: Ceres Annot ID no. 8462178
  misc_feature: Encodes the peptide sequence at SEQ ID NO. 2360
atggcgttgatgggagagaaatttcgagtgtgtgtaactggagcaggtggatacgtggcttcatcgctagtgaagcttctcctttctaaagactacatagttcatggcaccgtcagagatccttctgatgacaagtatgctcatttgaataaccttgataaagctgctgacaaccttaagctattcaaggcagacttgctagatcccaactcacttgctggagccatcaaaggatgcgatggggtatttcatgttgctagtcctgttccttccggctctgtaccaaatcccgaggtagaacttgttgagcctgctgtgaacggcacacttaatgttctcaaggcatgctatgaagaaaacatcaagagagttgtgtttgtgtcttctgttgctgcttctgccttggaccccaactggccaaaaggccaagtgaaggacgagacttgttggtcggatggtgaattctgcaaagcaactgataactggtactgtttttctaaaacggtggctgagaaagaagcttggtcatatgcaaagcaaagtggacttgatttggtaactgtgctcccaacacttgttatagggccaatgttgcagaagacaaaaaactcaagtagtttggtactcattaagctgctgaaagaaggatacgaagagctggaaaacaagaaacggtttttggtagacgtacgtgatttagctgatgctttactgctagtctatgagagacctgaagctgaaggtagatacttgtgcatggctcatgcagtgaaatcagaagatttagttgccatgctaaagaaacaatatcccaactacaactatcctaaacgttttactgatgtgacggaggatggtggttttagttcagagaagctgcagaagttgggttggcaatatagggcactggaggaaactctagttgatgcagttgaaattgaggtacagattaactcaacttattcaagtatttctattcctaaagctttagtagctggagtttcaatgaaggtggttggcgaagaattgaaaattgctacagttggcatacttctataa

SEQ ID NO: 2360 - protein, 352 aa, Solanum lycopersicum
  misc_feature (10)..(254): Pfam Name: Epimerase Pfam Description: NAD dependent epimerase/dehydratase fam
  misc_feature: Ceres Annot ID no. 8462178
  misc_feature: Bit score of 700.0 for HMM based on sequences of Figure 41
  misc_feature: Functional Homolog Of SEQ ID NO. 2323
MALMGEKFRVCVTGAGGYVASSLVKLLLSKDYIVHGTVRDPSDDKYAHLNNLDKAADNLKLFKADLLDPNSLAGAIKGCDGVFHVASPVPSGSVPNPEVELVEPAVNGTLNVLKACYEENIKRVVFVSSVAASALDPNWPKGQVKDETCWSDGEFCKATDNWYCFSKTVAEKEAWSYAKQSGLDLVTVLPTLVIGPMLQKTKNSSSLVLIKLLKEGYEELENKKRFLVDVRDLADALLLVYERPEAEGRYLCMAHAVKSEDLVAMLKKQYPNYNYPKRFTDVTEDGGFSSEKLQKLGWQYRALEETLVDAVEIEVQINSTYSSISIPKALVAGVSMKVVGEELKIATVGILL

SEQ ID NO: 2361 - protein, 323 aa, Vitis vinifera
  misc_feature (10)..(253): Pfam Name: Epimerase Pfam Description: NAD dependent epimerase/dehydratase fam
  misc_feature: Public GI ID no. 157358613
  misc_feature: Bit score of 708.0 for HMM based on sequences of Figure 41
  misc_feature: Functional Homolog Of SEQ ID NO. 2323
MEGKAEKERVCVTGAGGYIASWVVKFLLSKGYIVHGTVRDPSDEKNSHLKKLEKALENLQLFKTDLLDYEGLCAAFAGCSGVFHVASPVPIGPISNPEVELIEPAVVGTRNVLSACEKAKVKKVVVVSSAGAVAMTPNRPKDRPMDEECWSDLEYCKATQNYYCLAKTIAESEALEHTKKSELNIVTVCPSFVFGPMLQSTMNGSCLLLLSFMKDGGESVKNIVYPVVDVRDVAESILLAYENPNAVGRYICSAHSIQAQALAEKLKGMYPNYNYPKSYIEDEKDVELSSEKLQRLGWKYRPLEETLVDAVRNYEENGFLVEH

SEQ ID NO: 2362 - protein, 344 aa, Oryza sativa subsp. indica
  misc_feature (12)..(274): Pfam Name: Epimerase Pfam Description: NAD dependent epimerase/dehydratase fam
  misc_feature: Public GI ID no. 125560374
  misc_feature: Bit score of 595.3 for HMM based on sequences of Figure 41
  misc_feature: Functional Homolog Of SEQ ID NO. 2323
MEAPPPATSSTVCVTGAGGFLASWLVKLLLSKDHYVINGTVRDLGEGKNAHLKALENAGERLRLFKADVLDYGSVAAAIAGCDGVFHVASPVTSGRPTNPEVDIIATAVTGTLNVLRASHEAKVKRVVVVSSVVAVFNNPNWPTGEPFNEDSWSDEETCRKNEEWYPYYLSKTLAEREAFEYAAKTGMDIVTICPALIMGPLAYSTYKIYLEFWSQVLDSRPSCPKPGCAPVSNAGDNETAGNRLETLLDVRDVADAILLVYENSGGSERYICSSTPRKLSDIINTSKSLYPAFNYPQKFVEVDEEQNTRFSSEKLEKLGWTFRPMEETLRDSFESYIGLGILT

SEQ ID NO: 2363 - DNA, 1215 bp, Glycine max
  misc_feature: Ceres Clone ID no. 477792
  misc_feature: Encodes the peptide sequence at SEQ ID NO. 2364
atagcaatggcagcaaagaaggtgtgtgtaacaggtgctggaggattcgtagcgtcttggcttgttaagcttcttctttccaaaggctacattgtccatggaactgtgagagaccctgaacctgctactcagaaatatgaacacttgctcaaactccacggagcttctgaaaacctcactctcttcaaggcagatctcttgaactacgaatctcttcgctcagcaatttctggatgcactgcagttttccatcttgcttgccctgtaccctcaatcagtgttcccaaccctcaggttgaaatgattgagcctgctgtgaaaggaacaactaatgtacttgaagctagccttgaagctaaagtgcaacgacttgtctttgtatcatctttagctgctatttccaatagccccaatttgcctaaagataaagtgattgatgagtcctattggtctgataaagattactgcaaaacaactcagaactggtactgtttttccaagacagaggcggaggagcaggccttggactttgccaaaagaactggccttgatgtggtaagcatttgcccttcccttgttctcgggccaattttacagtcaaccactgttaatgcaagtagcctggctctcctcaaacttttaaaaggtgtcaactcaatggagaataagatccgttggatagtcgatgtacgagatgtagctgatgcaatacttttggcttatgagaagcttgaggcagaagggagatacatatgccattcacataccatcaagacacgggatatgctggagaaactaaagagtatatatcccaactacaaataccctgcgaagtatactgaggtggatgattacataagtttcagctcagagaaactgcaaaggttgggttggaaatacaggtcactggaggaaacactcgttgattctgttgagagctatcgggaagctggccatctgcaatcagaataaatgtgacttagtagaatagaataaaactaagtgctatatgatagtagatacttcagttttttaaaatctttattaggattcgattcgattctagtgtgagtatgaaaaagactatataatgagggatgttgtaggtagtttggtaatctcgggttagtctccagcgtccggaggaatattctagtgtaaaccaagaaaaagtacattttcatactactcttctaaaactttttataagaatac

SEQ ID NO: 2364 - protein, 321 aa, Glycine max
  misc_feature (6)..(251): Pfam Name: Epimerase Pfam Description: NAD dependent epimerase/dehydratase fam
  misc_feature: Ceres Clone ID no. 477792
  misc_feature: Bit score of 706.5 for HMM based on sequences of Figure 41
  misc_feature: Functional Homolog Of SEQ ID NO. 2323
MAAKKVCVTGAGGFVASWLVKLLLSKGYIVHGTVRDPEPATQKYEHLLKLHGASENLTLFKADLLNYESLRSAISGCTAVFHLACPVPSISVPNPQVEMIEPAVKGTTNVLEASLEAKVQRLVFVSSLAAISNSPNLPKDKVIDESYWSDKDYCKTTQNWYCFSKTEAEEQALDFAKRTGLDVVSICPSLVLGPILQSTTVNASSLALLKLLKGVNSMENKIRWIVDVRDVADAILLAYEKLEAEGRYICHSHTIKTRDMLEKLKSIYPNYKYPAKYTEVDDYISFSSEKLQRLGWKYRSLEETLVDSVESYREAGHLQSE

SEQ ID NO: 2365 - DNA, 1275 bp, Panicum virgatum
  misc_feature: Ceres Clone ID no. 1824941
  misc_feature: Encodes the peptide sequence at SEQ ID NO. 2366
acggcgagggcacgcaagatcgtcgcagcgcacgatggccgccggacgcgccgagggcgccgccgggagccgggagacggtctgcgtgacgggcgccggcgggttcatcgcctcgtggctcgtcaagctcctcctcgcccgcggctacgccgtccacggcaccgtccgcgacctggctgagaggaagaccgcccatttgaagcagcttgagaacgcatccgagaacctcaaacttttcaaggccgatatcctggactacgacgccatggcagctgcgatcgcggggtgccagggagttttccacgttgccaccccagttccttcggggaagataactgatccagagcgagaaatgctggggcctgctgttcatggcaccacaaatgtactcaaggccgcctcagctgcgggtgcgcggcgtgtggtcgtggtttcgtccatggtggctgttgagatcgacccgaaaggttggcccaaggacaagatcaaagatgaaggctgctggtcagacccagaagcctgcaggaacaaccaggattggtactctgttgccaagatcgcttcggaacagggtgcgcttgagtatgggaagcaaaccgggctggatgttgtaactgtcaaccccgccctggtcttcggcccccttctgcagccaactcttaacacgagctgccagttcctcgtctacttcctgaaaggaggtcctgatcgaatgaggaacaaactttggcacatcgttgacgtccgggacaccgcagatgctcttttgctggtgtatgagacacctgaagcctccggtaggcacatctgcgcacctcatttcatcagcgcccgtgaccttctggacttactgaagagcatgtacactgagtaccctttcatgagcaaggagagcatctgtgacatggatcacccagctccaatgacgtctgacaagctgaagaaactggggtggaaggtcaggccgttgaaggaaactatcgcggataccgttgaattctgccagaacgctgggtttcttgaggatgtggaggggagtccctgccgttttcctgatatttacaacaaaatctagcttaagaaagaatctagggccggaggaagcgcacgtgtggcaactgtttcgcttcagctgctgcttgatgcttactgtattgttgagcagcaggaatatattttttcccaataatatgttttcccgcactctgatttcaactatgagaaccacttcagtgctgatcgtttttaaagaaacaaacaataattagaaccctt

SEQ ID NO: 2366 - protein, 346 aa, Panicum virgatum
  misc_feature (16)..(260): Pfam Name: Epimerase Pfam Description: NAD dependent epimerase/dehydratase fam
  misc_feature: Ceres Clone ID no. 1824941
  misc_feature: Bit score of 577.0 for HMM based on sequences of Figure 41
  misc_feature: Functional Homolog Of SEQ ID NO. 2323
MAAGRAEGAAGSRETVCVTGAGGFIASWLVKLLLARGYAVHGTVRDLAERKTAHLKQLENASENLKLFKADILDYDAMAAAIAGCQGVFHVATPVPSGKITDPEREMLGPAVHGTTNVLKAASAAGARRVVVVSSMVAVEIDPKGWPKDKIKDEGCWSDPEACRNNQDWYSVAKIASEQGALEYGKQTGLDVVTVNPALVFGPLLQPTLNTSCQFLVYFLKGGPDRMRNKLWHIVDVRDTADALLLVYETPEASGRHICAPHFISARDLLDLLKSMYTEYPFMSKESICDMDHPAPMTSDKLKKLGWKVRPLKETIADTVEFCQNAGFLEDVEGSPCRFPDIYNKI

SEQ ID NO: 2367 - protein, 322 aa, Vitis vinifera
  misc_feature (10)..(253): Pfam Name: Epimerase Pfam Description: NAD dependent epimerase/dehydratase fam
  misc_feature: Public GI ID no. 157344669
  misc_feature: Bit score of 726.3 for HMM based on sequences of Figure 41
  misc_feature: Functional Homolog Of SEQ ID NO. 2323
MAEKEEKERVCITGAGGYIASWVVKLLLSKGFIVHGTVREPCDGKNSHLKKLEKASENLKLFKADLLDYDGLCAAIDGCTGVFHIASPNLYPKVSNPQAEVVEPAVVGTINILKACETARVKKVVVVSSVAAVILNPSWPKDRPKDEECWSDPEICKAPENYYFLSKTLAESETWKHARTSELDIATVCPSFVFGPMLQPTLNASSYVLLTYLKDGPESVENKDRPIIDVRDLAEAILLVYEKPEAQGRYICSSYTISTQELVEKLKSMYPNYNYPKSYTAVEGLKLSSEKLQGLGWKYRPLEETLVDAVKSFQENGFLPKH

SEQ ID NO: 2368 - DNA, 912 bp, Populus balsamifera subsp. trichocarpa
  misc_feature: Ceres Annot ID no. 1506214
  misc_feature: Encodes the peptide sequence at SEQ ID NO. 2369
atggcgttggagaaggggagtgtttgcgtgacaggtgctggagggtacctggcttcttgggtcgtcaagcttcttctctctaaggactatcttgtccatggaaccgttagagatcctgcggatgacaagaatgctcacttgatgaaaattgaccaggcaacggagaatctcaaactctttaaggcagatttactggactacagctctctttcttctgctattcaaggatgcagaggggtggaggtgatcgagccagctgtaaagggcacactaaatgtgcttaaagcatgtgctgaggcaaaggtaaaaagagttgtcattgtgtcctctggaagtgcagttttgtcaaacccaagctggcccaagggtcaagtgatggatgagaattgctggtctgataaggaatactgcagagcaactaagaattggtataatctttccaagacagaagcagaaagtgaggcttgggaatatgcaaaaaggagcgggcttgatgtagtagcaatttgtccttccctcattttggggccaattctgcagtccacagttaacgcaagtacaatggttcttattaagattttgaaagatgggtgcgcctcgttggaaaacaagcttcggccaataatagatgttcgtgatgtgactgaagcactgcttttggcatatgagacacctgaggcagaaggtagatacatatgcacggcacatgcaatcagagttaaagatctagtggagaaattgaggagcatgtatcctaactacaactatcctaaaagtttcactgaagaagagcaggaagcagtgatgatcagttcagaaaagttgcagaggctcggttggagtttccgttcattggatgaaactctcattgactccgtggaaaactatcagaagactggactcctggattaa

SEQ ID NO: 2369 - protein, 303 aa, Populus balsamifera subsp. trichocarpa
  misc_feature (8)..(234): Pfam Name: Epimerase Pfam Description: NAD dependent epimerase/dehydratase fam
  misc_feature: Ceres Annot ID no. 1506214
  misc_feature: Bit score of 701.0 for HMM based on sequences of Figure 41
  misc_feature: Functional Homolog Of SEQ ID NO. 2323
MALEKGSVCVTGAGGYLASWVVKLLLSKDYLVHGTVRDPADDKNAHLMKIDQATENLKLFKADLLDYSSLSSAIQGCRGVEVIEPAVKGTLNVLKACAEAKVKRVVIVSSGSAVLSNPSWPKGQVMDENCWSDKEYCRATKNWYNLSKTEAESEAWEYAKRSGLDVVAICPSLILGPILQSTVNASTMVLIKILKDGCASLENKLRPIIDVRDVTEALLLAYETPEAEGRYICTAHAIRVKDLVEKLRSMYPNYNYPKSFTEEEQEAVMISSEKLQRLGWSFRSLDETLIDSVENYQKTGLLD

SEQ ID NO: 2370 - DNA, 1029 bp, Populus balsamifera subsp. trichocarpa
  misc_feature: Ceres Annot ID no. 1442360
  misc_feature: Encodes the peptide sequence at SEQ ID NO. 2371
atggcagcagagaaggggagggtatgcgtgacaggagctggaggtttcttgggctcttggctcctcaaggttcttctatctaagaactatcttgtccatggaaccgttagagaccccgcggacgagaagtatgctcactggaaaaccattgacaaggcatctgagaatctgaaactctttaaggcagatttactggattacaactctctttgttctgctatcaagggatgtgaaggagtctttcatgttgccagtcctgttccctccactacagtagaattgatcgaacctgctgtaaagggcacattgaatgtgctcagagcatgtgatgaagcaaaggttaagcgagttgttattgtgtcctctatggttgctgtgtgcatgaacccaagcttgccaaagggtcaagtgatggatgagaattggtggtctgacaaggaatactgcagagcaaccaagaactggtattgtctgtccaagacagaagcagaaagtgaggcgtgggaatgtgcaaaaagaagtggacttgatgttgtaacaatttgtccttccctcatcttggggccaattctgcattctgcagtaaatgcaagtagcaagtctgtaacagtggctcatggctcactcgaggctagtaacttgaaacccagaattttatgccatcttctcattgctcactggtgttctgcacgagatgctaatgcagaagggtacgagtcattggaaaacaagctccgacatctagtagatgttcgtgatgttgctgaagcactgcttttggtatatgagaagccagaggcagaagggagatatatatgcacagctcatgaaatcagaacagaggatttggtggagaaattgagaaatatatatcctaactataattatcctaaaagcttcactgaagaagaggaaggaataaatctgagttcagaaaagttacagaggctagggtggagctaccggccactggaggaaactctcattgattcggtggaaagctatcagaagactggaatcttggattaa

SEQ ID NO: 2371 - protein, 342 aa, Populus balsamifera subsp. trichocarpa
  misc_feature (8)..(274): Pfam Name: Epimerase Pfam Description: NAD dependent epimerase/dehydratase f
  misc_feature: Ceres Annot ID no. 1442360
  misc_feature: Bit score of 701.7 for HMM based on sequences of Figure 41
  misc_feature: Functional Homolog Of SEQ ID NO. 2323
MAAEKGRVCVTGAGGFLGSWLLKVLLSKNYLVHGTVRDPADEKYAHWKTIDKASENLKLFKADLLDYNSLCSAIKGCEGVFHVASPVPSTTVELIEPAVKGTLNVLRACDEAKVKRVVIVSSMVAVCMNPSLPKGQVMDENWWSDKEYCRATKNWYCLSKTEAESEAWECAKRSGLDVVTICPSLILGPILHSAVNASSKSVTVAHGSLEASNLKPRILCHLLIAHWCSARDANAEGYESLENKLRHLVDVRDVAEALLLVYEKPEAEGRYICTAHEIRTEDLVEKLRNIYPNYNYPKSFTEEEEGINLSSEKLQRLGWSYRPLEETLIDSVESYQKTGILD

SEQ ID NO: 2372 - DNA, 1317 bp, Panicum virgatum
  misc_feature: Ceres Clone ID no. 1790816
  misc_feature: Encodes the peptide sequence at SEQ ID NO. 2373
aggaagagctgcccagctgtggaggagactcggaggaggcctcgtcaacgccatggccgggagttcgacggtgtgcgtgaccggcgccggcgggttcatcgcctcgtggctcgtcaagctcctcctctcccgcggctacaccgtccacggcaccgtccgcgacctgggtgacaagaagtcagcccatctgaagcggctcgagtatgccgctgaaagcctcaggattttcaaggccgatctcctggactacgacgcgatggctgctgccattgtgggatgccagggggttttccatgtggccactcctgtgccatcagagaagctgactgatctagagctgcaaatgctggctccggctgttactggcaccacgaatgtgctcagggctgcctcggccgcgggtgtccagcgagtggtggtcgtgtcatccatagtggccgtggagatcaacccgaaagattggcctgaaggcaagatcagagacgagagctgctggtcagacgaggagttctgcaggaacaataacatctggtacccggtcgccaagatcatctcggaagaggcggcgctggagtacgggcgtcagaccgggctcgacgtggtgtccgtcaatccggggttggtgttcgggcccatgctgcagccgacggttaacgcgagcagccagttcctcatctacttactgaaaggaggccctgacaaggtgaggaacaagctctggcacatcgtcgacgtccgcgaccttgccgaggcgctgctcttggtctacgagggtgctggagcctccggtaggcacatctgcgcacctcatgtcgtcagcgtccgcgaactcctcgactcgctgaagagcaactaccctgattacccttgcattgccaaggagagcgtatttgacagagatcacccggctccgatgagttctgagaagctgaagaagctcgggtggagcttccggccgctggaggagacgatcgccgacgcgatcgggttctgccagcgcgctgggttccttggtgatgcggatggggcggctccctgccgtttccctcctcttttcaaccaaatctagtcttggaaatcgcatggatcaatcgttcagaaaaaaaaagaaatcgcatggatctgggggcaacgcagccaagcgtgcaaatgtttatgcttttctgtatctctcgtgtggtaccaacttagatttgtgaactgttttggttgtaatctggtgatgctactgtgcatgcgcttatcaggtcagcagaatggttatcaggtctgtaattctttcctatgaataaaagggaagtattgtactcttcgtct

SEQ ID NO: 2373 - protein, 338 aa, Panicum virgatum
  misc_feature (7)..(258): Pfam Name: Epimerase Pfam Description: NAD dependent epimerase/dehydratase fam
  misc_feature: Ceres Clone ID no. 1790816
  misc_feature: Bit score of 574.1 for HMM based on sequences of Figure 41
  misc_feature: Functional Homolog Of SEQ ID NO. 2323
MAGSSTVCVTGAGGFIASWLVKLLLSRGYTVHGTVRDLGDKKSAHLKRLEYAAESLRIFKADLLDYDAMAAAIVGCQGVFHVATPVPSEKLTDLELQMLAPAVTGTTNVLRAASAAGVQRVVVVSSIVAVEINPKDWPEGKIRDESCWSDEEFCRNNNIWYPVAKIISEEAALEYGRQTGLDVVSVNPGLVFGPMLQPTVNASSQFLIYLLKGGPDKVRNKLWHIVDVRDLAEALLLVYEGAGASGRHICAPHVVSVRELLDSLKSNYPDYPCIAKESVFDRDHPAPMSSEKLKKLGWSFRPLEETIADAIGFCQRAGFLGDADGAAPCRFPPLFNQI

SEQ ID NO: 2374 - DNA, 1228 bp, Zea mays
  misc_feature: Ceres Clone ID no. 1536779
  misc_feature: Encodes the peptide sequence at SEQ ID NO. 2375
aatccattaccacgcctcctcacagtcacacctcacacgagcagcagcggacgataagagatgtgctgaagctgaacggtggccatgtccaccggacgcacagaggaggccaccgggagcgcggagacggcgtgcgtgacgggcgccggcgggtacatcgcctcgtggctcgtcaagctcctcctctcccgtggctacaccgtccacggcaccgtccgcgacctcggtgacaataaaaccgctcatctgaagcggttagagaatgcttccgaaaacctcaagcttttcaaggctgatgtccttgactacgacgctatggcagctgcagtcgcagggtgccagggagtctttcatgtcgccactcctgttccttcagggaagatcaccgatccagagcgagagatgctgggtcctgctgttaccggcaccataaacgcactcaaggctgcgtctgctgcaaatgctcgtcgagtggtcgtcgtttcatccatggttgccgttgagatcaacccgaaagactggcccaaagacaagatcaaagatgagaactgctggtcagataaagagttctgcaggaacgaagagaactggtattctgtcgccaagatctcgtcagaagaggccgcacttgtatacgcgaagcagaccgggctggatgttgtgacggtcaatccagctgtggtcttcggccctcttctgcagccgacgctcaacacgagctgccagttcctcgtctacttcctgaaaggaggacctgatcgaatgagggacaagctttggcacatcgtcgacgtcagggacactgccgatgctctcctgcttgtgtatgagacaccacaagcctccggcaggcacatctgcgctcctcatttcatcagcgcccgtggcctgctggagctgctgaagacgatgtaccctgatgattaccctttcattagcaaggagagcatctacgacatggagcacccagctccaatgacgtccgacaagctcaagaaactgggatggaaggtcaggccgctgaaggaaacaattgcggagaccgttgagttctgccagcaggctgggtttctcgaggacgtggagggattccgttttcctcccctgtacaacataatctagtttacaataacgtcagtaatgtaagagcaactccaacggaatccgtaaaatttacacacaaaactttgatttggacgctctctaaaaataatagctcgctggaaag

SEQ ID NO: 2375 - protein, 345 aa, Zea mays
  misc_feature (16)..(260): Pfam Name: Epimerase Pfam Description: NAD dependent epimerase/dehydratase fam
  misc_feature: Ceres Clone ID no. 1536779
  misc_feature: Bit score of 570.3 for HMM based on sequences of Figure 41
  misc_feature: Functional Homolog Of SEQ ID NO. 2323
MSTGRTEEATGSAETACVTGAGGYIASWLVKLLLSRGYTVHGTVRDLGDNKTAHLKRLENASENLKLFKADVLDYDAMAAAVAGCQGVFHVATPVPSGKITDPEREMLGPAVTGTINALKAASAANARRVVVVSSMVAVEINPKDWPKDKIKDENCWSDKEFCRNEENWYSVAKISSEEAALVYAKQTGLDVVTVNPAVVFGPLLQPTLNTSCQFLVYFLKGGPDRMRDKLWHIVDVRDTADALLLVYETPQASGRHICAPHFISARGLLELLKTMYPDDYPFISKESIYDMEHPAPMTSDKLKKLGWKVRPLKETIAETVEFCQQAGFLEDVEGFRFPPLYNII

SEQ ID NO: 2376 - protein, 320 aa, Vitis vinifera
  misc_feature (7)..(250): Pfam Name: Epimerase Pfam Description: NAD dependent epimerase/dehydratase fam
  misc_feature: Public GI ID no. 157344658
  misc_feature: Bit score of 702.9 for HMM based on sequences of Figure 41
  misc_feature: Functional Homolog Of SEQ ID NO. 2323
MGEKKRVCVTGAGGYVASWVVKLLLSKGFIVHGTVRYPYDERNSHLKKLEKASENLKLFKADLMDFQGLFAATDGCTGVFHIASPVPSAKVSNPQLEVVEPAVIGTRNIIKACEMAKVKKLVVVSSLAAVVLNPKWPKDRPKDEECWSDPEFCKTIEYPYFLSKTLAESEALEYAKTSEFNIVTVCPSLVLGPMLQSTLNATSAFLLSYLKDGHESVENKDRPVIDARDLAEAILLVYEKPEAHGRYICSSYTISTQELVEKLKSMYPNYSYPKSYIEGEEHLKLSSQKLQSLGWKYRPLEETLVDAVKSFEEKGFLPKH

SEQ ID NO: 2377 - DNA, 1291 bp, Zea mays
  misc_feature: Ceres Clone ID no. 303165
  misc_feature: Encodes the peptide sequence at SEQ ID NO. 2378
acgggaaaggagtacggagtaccggagacatcgtcaacgccatggccggaggaggtgcaacggtgtgcgtgaccggagccggcgggttcatcgcctcgtgggtagtgaagctcctgctctcccgcgggtacaccgtgcacggcaccgtccgccacctcagtgacgagaagacaggccacctgaagcgcctggagaatgctgccggaaaccttaggatcttcaaggctgacctgctggactacgacgccatggcagctgcggtcgtcgggtgccagggggttttccatgtggccactcctgtgccttcggaggacctgactgacccagagctacaaatgctgggtcctgctgttaccggcaccacgaatgtgctcaaagctgcctccagcgcgaacgtccagcgagtggtggtggtgtcgtccatggttgccgtcgagatcagccccaaagattggcctgaaggtaaggtccgagatgagaggtgctggtcagaccgagagttctgcaggagcattgagagctggtacccggtggctaagatcatctcagaggaggcggcgctggcgtacgggcagcaaaccgggctcgacgtggtgactatcaatccagggttggtgttcggccccatgctgcagccgacggtcaacacgaccatccagttcctcatctacttcctcaaaggaggccccgacccggtgaagaacaagctctggcacatcgtcgacgtccgcgatgtggccgacgccatgctgctgctctacgaggtgcctgaagcgaccggcagacacatctgcgcgcctcatgttatcagtgcccgcgacctgctggatctgctgaagagcatgtaccctgactacccttgcattgccaacgagagcatacttgacagagaccacccagcgccgatgacctctgacaagctgaagaagatcgggtggagctgccgaccgctggaggagacgatcgtggacaccgtcgagtgctgcctgcgggctggatttctggacgacgtgggtggggagacttcctgtcgcttccctcctcttttaaaccagatctagcctcggcgaaagcatgaattgtgrttgcctatgctcttgcttatgttaccgtggacgacgagcgtcagcttttaaataaacgtcattgcatgctgttgtatttcttatattactgtggacaagcatcgatcagagcttttaaattgttaggatcacaggtgaaaaaggagacagagtttaacgtggaaaaaactctctaatttggaggagaaaaaatcacgggaaaacag

SEQ ID NO: 2378 - protein, 339 aa, Zea mays
  misc_feature (8)..(252): Pfam Name: Epimerase Pfam Description: NAD dependent epimerase/dehydratase fam
  misc_feature: Ceres Clone ID no. 303165
  misc_feature: Bit score of 556.8 for HMM based on sequences of Figure 41
  misc_feature: Functional Homolog Of SEQ ID NO. 2323
MAGGGATVCVTGAGGFIASWVVKLLLSRGYTVHGTVRHLSDEKTGHLKRLENAAGNLRIFKADLLDYDAMAAAVVGCQGVFHVATPVPSEDLTDPELQMLGPAVTGTTNVLKAASSANVQRVVVVSSMVAVEISPKDWPEGKVRDERCWSDREFCRSIESWYPVAKIISEEAALAYGQQTGLDVVTINPGLVFGPMLQPTVNTTIQFLIYFLKGGPDPVKNKLWHIVDVRDVADAMLLLYEVPEATGRHICAPHVISARDLLDLLKSMYPDYPCIANESILDRDHPAPMTSDKLKKIGWSCRPLEETIVDTVECCLRAGFLDDVGGETSCRFPPLLNQI

SEQ ID NO: 2379 - DNA, 1117 bp, Panicum virgatum
  misc_feature: Ceres Clone ID no. 2008188
  misc_feature: Encodes the peptide sequence at SEQ ID NO. 2380
aatcagcctgcggaagacgacgccgagagcgagaggcgctgagcactgagcagcaaggcgcgggcacgatggccgccaggcgcacggagggcgccgccgccaggagccgggagaatgtgtgcgtgacgggtgccggcgggtacatcgcctcgtggctcgtcaagctcctcctcgcccgcggctacgccgtgcacgccaccgtccgcgacccgtctgatcccaagaacgcccacctgaggcagctggaaggggcgtcggagaacctccggctgttccgggccgacgtgctcgaccgcggcgcgctggccgccgcggtcgccgggtgccggggggtcttccatgtcgcctgcccggtgcccacggacaaggttgttgatccggagtcggaagtactggcccctgctgtgaaaggcaccttaaacattcttcaggcttgctcagctaatgacgtccagaaggttgttgtggtttcatccactgccgctgtccatttcaacccgaagtggcctcgggacatacccaaggacgagaattgctggtcggacataaacttttgtgaaaagaatgaggattggtatatggttgccaaggttgttgctgaaaagacagccttggattatgcmkagaaaagtggactaaatgttgttacagtttgccctactatggcattaggcccactcctacggcctgtggccaatgtcagccatgaattcctcatatacattataaaaggaggcccaacgctaatgaagaacattctgtggcacatagttgatgtccgtgatgtggctgatgctttatttctcatatacgagatagaggaatcagctggaagatacctctgtgcgccgcatcatattagcgcaaaggttatggtgaacttgctcaagaagactcaccccaattacaattacgtaaactgtgacagtgatctggaacctaactctatagttacaccacttgtgtcggagaaactgaagaatctagggtggaaaccaaggaagaaaatagaggaaactttgttggacagtattgagtactatgagaaggcaggccttttgcaggatgtggagggacgcccttgccgtcttcctcacctttttcattatggctatag

SEQ ID NO: 2380 - protein, 349 aa, Panicum virgatum
  misc_feature (17)..(260): Pfam Name: Epimerase Pfam Description: NAD dependent epimerase/dehydratase fam
  misc_feature: Ceres Clone ID no. 2008188
  misc_feature: Bit score of 561.6 for HMM based on sequences of Figure 41
  misc_feature: Functional Homolog Of SEQ ID NO. 2323
  misc_feature (185)..(185): Xaa is any aa, unknown, or other
  misc_feature (186)..(186): Xaa is any aa, unknown, or other
MAARRTEGAAARSRENVCVTGAGGYIASWLVKLLLARGYAVHATVRDPSDPKNAHLRQLEGASENLRLFRADVLDRGALAAAVAGCRGVFHVACPVPTDKVVDPESEVLAPAVKGTLNILQACSANDVQKVVVVSSTAAVHFNPKWPRDIPKDENCWSDINFCEKNEDWYMVAKVVAEKTALDYXXKSGLNVVTVCPTMALGPLLRPVANVSHEFLIYIIKGGPTLMKNILWHIVDVRDVADALFLIYEIEESAGRYLCAPHHISAKVMVNLLKKTHPNYNYVNCDSDLEPNSIVTPLVSEKLKNLGWKPRKKIEETLLDSIEYYEKAGLLQDVEGRPCRLPHLFHYGY

SEQ ID NO: 2381 - protein, 325 aa, Arabidopsis thaliana
  misc_feature (7)..(253): Pfam Name: Epimerase Pfam Description: NAD dependent epimerase/dehydratase fam
  misc_feature: Public GI ID no. 145337634
  misc_feature: Bit score of 584.2 for HMM based on sequences of Figure 41
  misc_feature: Functional Homolog Of SEQ ID NO. 2323
MAVKQKVCVTGAGGFIASWLVKFLLSRGYTVHGTVRDPCDEKNDHLRKLDNASKNLKLFKADLFDDEGLFSAIDGCSGVFHIASPVPFEGVPLTEEELIKPALTGTKNVLEACTETKVQKVVVVSSIAAVVYNPKWPQDVAKDEDCWSDTQYLHSLEGYWRYYYLAKTLTEREALEWSKRNFADVVTLCPSVIIGPRLQSTLNSSSLGLLKFIKGGIKSLLSDELYLVDVRDVADALLLVYENREATGRYICNSHSLYTDSLMEKLKNMYPKRNFPESFTEVKEKEVRPLSAEKLKNLGWKFRPLEETIDDSVVSFEAAGDLPKA

SEQ ID NO: 2382 - DNA, 1436 bp, Triticum aestivum
  misc_feature: Ceres Clone ID no. 569938
  misc_feature: Encodes the peptide sequence at SEQ ID NO. 2383
aaacgacctgccacttccagttctgctattactttagccacttgctgcgcacatctcggtgagctcgccactccggtggcggcggcggcgggcggagggaagaaaatggcaccgccgcggcgcgtgtgcgtgaccggcggcggcgggttcatcgcctcgtggctcgtcaagctgctcctctcccgcggctacgccgtccacgccaccctccgggacccatgtgaccccaagaatgtccacctcaagcagatggacgaggcccgggagaatctgcacctgctcaaggccgacgtgctcgactacgacgcgctaacacgtgcgtttgagggatgtgagggggtcttccacctcgccactccggtgcctgaagataagattgctgatcctgagtcagaagtattggctcctgctgtgaaaggtacttcaaatgtgctgaaggcctgctcagctatgaaggttcagaaggttattgtcttgtcatccaatgctgctgttgattttaacccgaattggcctcaagacagactcaaagatgagagtagctggtcagacaaagatttctgccaggagaatgaggactggtattctgttgccaagattgtggccgaacaggcatccttggaatattcagagaaacatggattaaatgttgttacgctttgccctcctttggtttttggcccattgttgcagcctactgtgaataccagtagcaaattcttaatctatgttattaatggaggacctgacgtgatgagcaacaagctgtggcacattgtagacgtccgtgatgtcgcggatgccttgctgcttgtgtacgagaaggccgaatcgtctgggagatacatttgcgcgccgaatagcgtctgcacaaaggacttggtggacttgctgaggaagatgtacccacagtacagctatgtgaacaacatcgacgcggaccgtaaagcgccgctgtcatcgcagaagctgaaggatctgggctggaagccgaggaagctggaggagacgctctcggacagcgtgggctgctacgagaaggccggccttctgcagggttccgctgcgcgtcattgccggcttccgcatctgttccgtctggctggtgatcagtgaatgtaccgtggtgactggtgctttgttttcatatggtcggacttctgtaagctgtagtgtcgctggacggagcctcgcaacagcaacaatggtcgaacctcttcctttgcatccacaaataagcagctatccctgctgtatctgccgccccctgtctgtcacctccggaaatggacaaagtgtaaaacaagcagagcagagacgaaatgcatgtacttcctccgttcctaaataagtactatctctttctagagatttgtataagtgactacatacagagcaaaatgagtgaatctacactctaaattatgtttacatac

SEQ ID NO: 2383 - protein, 336 aa, Triticum aestivum
  misc_feature (7)..(250): Pfam Name: Epimerase Pfam Description: NAD dependent epimerase/dehydratase fam
  misc_feature: Ceres Clone ID no. 569938
  misc_feature: Bit score of 577.7 for HMM based on sequences of Figure 41
  misc_feature: Functional Homolog Of SEQ ID NO. 2323
MAPPRRVCVTGGGGFIASWLVKLLLSRGYAVHATLRDPCDPKNVHLKQMDEARENLHLLKADVLDYDALTRAFEGCEGVFHLATPVPEDKIADPESEVLAPAVKGTSNVLKACSAMKVQKVIVLSSNAAVDFNPNWPQDRLKDESSWSDKDFCQENEDWYSVAKIVAEQASLEYSEKHGLNVVTLCPPLVFGPLLQPTVNTSSKFLIYVINGGPDVMSNKLWHIVDVRDVADALLLVYEKAESSGRYICAPNSVCTKDLVDLLRKMYPQYSYVNNIDADRKAPLSSQKLKDLGWKPRKLEETLSDSVGCYEKAGLLQGSAARHCRLPHLFRLAGDQ

SEQ ID NO: 2384 - protein, 317 aa, Arabidopsis thaliana
  misc_feature (7)..(245): Pfam Name: Epimerase Pfam Description: NAD dependent epimerase/dehydratase fam
  misc_feature: Public GI ID no. 12323980
  misc_feature: Bit score of 585.1 for HMM based on sequences of Figure 41
  misc_feature: Functional Homolog Of SEQ ID NO. 2323
MAVKQKVCVTGAGGFIASWLVKFLLSRGYTVHGTVRDPCDEKNDHLRKLDNASKNLKLFKADLFDDEGLFSAIDGCSGVFHIASPVPFEGEELIKPALTGTKNVLEACTETKVQKVVVVSSIAAVVYNPKWPQDVAKDEDCWSDTQYLHSLERYYYLAKTLTEREALEWSKRNFADVVTLCPSVIIGPRLQSTLNSSSLGLLKFIKGGIKSLLSDELYLVDVRDVADALLLVYENREATGRYICNSHSLYTDSLMEKLKNMYPKRNFPESFTEVKEKEVRPLSAEKLKNLGWKFRPLEETIDDSVVSFEAAGDLPKA

SEQ ID NO: 2385 - DNA, 966 bp, Populus balsamifera subsp. trichocarpa
  misc_feature: Ceres Annot ID no. 1442362
  misc_feature: Encodes the peptide sequence at SEQ ID NO. 2386
atgtccgagaaaattgtgtgtgtaacaggtgcaggagggtacttggcatcgtggctggtaaagtttcttctttcagagggctatgtggtgcatggaactgtgagagacccaagtgatgaaaagaacgcacatctgttgaagttggaaaacgctagagagaatctgaaactcttcaagacagatttgctagattatgaaggtctttctactgcaatctcaggatgtgccggggtttttcacgttgcttgcccaattcctacagatcctgccagcattcttaatcccaaggacaagatgctggaagcggcagtcaccggcacacggaatgtactgaatgcttgctccataactaaagtgaagaaagttattgctgtgtcatctatagctgctgttatgctaaacccaaattggccaaaggatcaggcgatgaacgaggagtcttggtctgacttcgagttttgtaaggcaaatgagcaatggtattttcttgccaagacaaaagcagaaaaagaagctttggaatatggaaagacgaacgagctcaaaattgtgaccatctgtccctccattatcatagggcctttgttgcagccaaccatgaatagcagtagcttatacctcctaagttacttaaaagatggattggaaacactagacagtggaacccgttcttttgtagatgtgcgcgatacagcaaaagcactcttgctgatatacgagaaggatgaagctgagggaaggtatatatgttcatcacatgatatcacaactcaggatttggcagaaaagttgaaggcaatgtatccccattacaactaccccaagagtttttccggagggatgccatcaatggacatgagttcagagaaattgctgaatttaggatggaagtacagatcattagaggagtcacttgttgatgctgtcaagaactacggagagagaggcgatttggctaaaaactaa

SEQ ID NO: 2386 - protein, 321 aa, Populus balsamifera subsp. trichocarpa
  misc_feature (6)..(251): Pfam Name: Epimerase Pfam Description: NAD dependent epimerase/dehydratase fam
  misc_feature: Ceres Annot ID no. 1442362
  misc_feature: Bit score of 621.5 for HMM based on sequences of Figure 41
  misc_feature: Functional Homolog Of SEQ ID NO. 2323
MSEKIVCVTGAGGYLASWLVKFLLSEGYVVHGTVRDPSDEKNAHLLKLENARENLKLFKTDLLDYEGLSTAISGCAGVFHVACPIPTDPASILNPKDKMLEAAVTGTRNVLNACSITKVKKVIAVSSIAAVMLNPNWPKDQAMNEESWSDFEFCKANEQWYFLAKTKAEKEALEYGKTNELKIVTICPSIIIGPLLQPTMNSSSLYLLSYLKDGLETLDSGTRSFVDVRDTAKALLLIYEKDEAEGRYICSSHDITTQDLAEKLKAMYPHYNYPKSFSGGMPSMDMSSEKLLNLGWKYRSLEESLVDAVKNYGERGDLAKN

SEQ ID NO: 2387 - DNA, 1403 bp, Triticum aestivum
  misc_feature: Ceres Clone ID no. 726598
  misc_feature: Encodes the peptide sequence at SEQ ID NO. 2388
gaaattgttaaagcagagcaagctgcgagccatccaggaggtggatggcaccaccgtcgccgtcgccgccgccgccgcgagtgtgcgtgaccggcggcggcgggttcatcgcctcgtggctcgtcaagctgctcctctcccggggctacgccgtccacgccacgctccgcgacccgagtgatccgaagaacgcgcatctgatgcagctggacggcgcggcggagagcctgagcttgttcaaggccgacgtgctcgaccgcgccgcgctggccgccgccgtcgcgggttgccagggcgtcttccatgtcgcctcccctgtgcccgcggagaagatcgtcgatcctgagtcagaagtcatggtgcctgccgtgaagggcaccttaaatattcttgaagtttgttcatctctgaaggttcagaaagttgtggtggtgtcatccactgctgccgttcattatgatcccaactggcctcagggtaaacccaaagacgagagttgctggtcggacagaaaagtatgcaaggataatgagatctggtatagtcttgctaaaactgttgctgaagagacagtttgggaatatgcagagaagtacaggctaaatgctgttgcagtatgcccttgtattgttctggggccacaattgcaatgtgctgtcaatactacaagcgaactcctcctctatgtcataacaggaggtcctaatgcgttgaatgacgtgctgtggcacatagtcgatgtccgtgatgtggccgatgccctgcttctgctatacgagaaacccgaatcatccgggagatatatctgcgcaccaaattacattagcacaaaggctttgctggagctgctaaagaagacgcaccctgactacaactatgtgaaatgcaaggctgatgcgcagcagaactctcgtatcacgccgatctcgtcgggaaaactgagtaatctgggctggaagccgagggcattggaggagacgctcctggatagcatcgaataccaccggaaggcgggaaatctgcagggtgtggagggacagacctaccgccttcctgatattttccgtcattttcaagctgccgacgaatgagtcgagagcgcagagcggcagtggcctgtgctttatagttatgtcattgtccttgtgagtgctgaatattgtgggaaatagttaaggatctgctgggaagttggtaggagaccagagagagtgaagctgctcattgcctcgccgtcgattggctttggcaacacaacttttcggttcaggatcgtatctcctgatcttctgctgtgttgtgtccagatctcattgatgaagcaaactggattacaaatgttattgttcagaacattttaccctcgtcgataatgaaggggtagaaccccgattacatgaatg

SEQ ID NO: 2388 - protein, 348 aa, Triticum aestivum
  misc_feature (13)..(256): Pfam Name: Epimerase Pfam Description: NAD dependent epimerase/dehydratase fam
  misc_feature: Ceres Clone ID no. 726598
  misc_feature: Bit score of 531.3 for HMM based on sequences of Figure 41
  misc_feature: Functional Homolog Of SEQ ID NO. 2323
MAPPSPSPPPPRVCVTGGGGFIASWLVKLLLSRGYAVHATLRDPSDPKNAHLMQLDGAAESLSLFKADVLDRAALAAAVAGCQGVFHVASPVPAEKIVDPESEVMVPAVKGTLNILEVCSSLKVQKVVVVSSTAAVHYDPNWPQGKPKDESCWSDRKVCKDNEIWYSLAKTVAEETVWEYAEKYRLNAVAVCPCIVLGPQLQCAVNTTSELLLYVITGGPNALNDVLWHIVDVRDVADALLLLYEKPESSGRYICAPNYISTKALLELLKKTHPDYNYVKCKADAQQNSRITPISSGKLSNLGWKPRALEETLLDSIEYHRKAGNLQGVEGQTYRLPDIFRHFQAADE

SEQ ID NO: 2389 - DNA, 1511 bp, Panicum virgatum
  misc_feature: Ceres Clone ID no. 1814046
  misc_feature: Encodes the peptide sequence at SEQ ID NO. 2390
tgttgtttactcgatctgctcgtttgaggctgcatcgatctgtggatttgagcttaattaactgcggcagccatatactatctcgacgatttctagtcgcggggttctcgctcagaaatcggtgaacgggtgggtggtgccgcagcggagaggagggagggggatggcgcagccgccgcgtgtgtgcgtgaccggtggcggcgggttcatcgcctcctggctcgtcaagctgctgctctcccgcggctacgccgtccacgccaccctccgtgacccaggcaacccaaagaacgcccatttgaaggagctggacaatgccccagagaacctgcttctgttcaaggccgatgtgctagactacgacacgctaacacctgctgttgaaggatgtgagggggtcttccatcttgccactccggtgcctgaagataagattgttgatcctgagtcacaactcgatactgctgtgaaaggtaccttaaatatactaaaggtctgctcagctgcaaaggttcagaaacttgttgtgatgtcctccaatgctgctgtggattttaacccgaattggcctcaagatataatcaaagatgagagttgctggtccgacaaagagttctgcaaggaaaatggggactggtattctgttgctaagattatgggtgaacaggcagccttggaatatgcagataaaaatggactgaatgttgttacactttgcccacctttggtttttggcccactgttgcagcctacggtgaatactagcagcaaatttctcatctacgttataaaaggaggccctgatgtgatgaacaacaaactgtggcacatagtagacgtccgtgatgtggctgatgctttgcttctgctgtacgagaaggaagagtcatccgggagatacatctgctcgccgcatcacattcgcacgagggatttggtggccttgttgaagaagatgcacccagagtacaactacgtagacaacatcctcgatgtcgatcagaaagcgtcgttgacatgccagaagctgatggacctgggctgggaacccaggacgacgctggaggagacgctctcggactgcgtcgagtgctacgaaaaggcaggcgcgctccaggatgtacccgggcgtcctcgccgtctcccccatctcttccgtctggctggtgaccaatgaatcaactgtcgtgtcgtggcagtgccctgtttggttctctagcgctagcgctacttgctctacaaaaggaattttgtatgtacgaagtactaaacgaatttatttgcaaatttttttcacagatgggtgcaactttacgcgacgaatctaatgagtctaattaattcatgattggatacagtaatactacagtaaccattctctaatcgtgcggtcgaagaactcattagattcgtctcgcaaagtagcgcagatgttgtggagttggttttgtaaactacatttattttatacctgtaattaatggtcaaagttggctatagttttttttttg

SEQ ID NO: 2390 - protein, 337 aa, Panicum virgatum
  misc_feature (7)..(249): Pfam Name: Epimerase Pfam Description: NAD dependent epimerase/dehydratase fam
  misc_feature: Ceres Clone ID no. 1814046
  misc_feature: Bit score of 570.4 for HMM based on sequences of Figure 41
  misc_feature: Functional Homolog Of SEQ ID NO. 2323
MAQPPRVCVTGGGGFIASWLVKLLLSRGYAVHATLRDPGNPKNAHLKELDNAPENLLLFKADVLDYDTLTPAVEGCEGVFHLATPVPEDKIVDPESQLDTAVKGTLNILKVCSAAKVQKLVVMSSNAAVDFNPNWPQDIIKDESCWSDKEFCKENGDWYSVAKIMGEQAALEYADKNGLNVVTLCPPLVFGPLLQPTVNTSSKFLIYVIKGGPDVMNNKLWHIVDVRDVADALLLLYEKEESSGRYICSPHHIRTRDLVALLKKMHPEYNYVDNILDVDQKASLTCQKLMDLGWEPRTTLEETLSDCVECYEKAGALQDVPGRPRRLPHLFRLAGDQ

SEQ ID NO: 2391 - protein, 320 aa, Arabidopsis thaliana
  misc_feature (7)..(248): Pfam Name: Epimerase Pfam Description: NAD dependent epimerase/dehydratase fam
  misc_feature: Public GI ID no. 6554472
  misc_feature: Bit score of 574.7 for HMM based on sequences of Figure 41
  misc_feature: Functional Homolog Of SEQ ID NO. 2323
MAVKQKVCVTGAGGFIASWLVKFLLSRGYTVHGTVRDPCDEKNDHLRKLDNASKNLKLFKADLFDDEGLFSAIDGCSGVFHIASPVPFEGEELIKPALTGTKNVLEACTETKVQKVVVVSSIAAVVYNPKWPQDVAKDEDCWSDTQYLHSLEGYWRYYYLAKTLTEREALEWSKRNFADVVTLCPSVIIGPRLQSTLNSSSLGLLKFIKGGIKSLLSDELYLVDVRDVADALLLVYENREATGRYICNSHSLYTDSLMEKLKNMYPKRNFPESFTEVKEKEVRPLSAEKLKNLGWKFRPLEETIDDSVVSFEAAGDLPKA

SEQ ID NO: 2392 - protein, 331 aa, Picea sitchensis
  misc_feature (16)..(259): Pfam Name: Epimerase Pfam Description: NAD dependent epimerase/dehydratase fam
  misc_feature: Public GI ID no. 116780880
  misc_feature: Bit score of 563.9 for HMM based on sequences of Figure 41
  misc_feature: Functional Homolog Of SEQ ID NO. 2323
MTLTVEKTVQFHGETVCVTGAGGFIASWLVRLLLEQGYNVRGTVREPGGEKNVHLENLEGAKERLKILKANLLDYDSLLEAINGCTGVFHTASPVLSQTASNPEVEVINPAIKGTLNVLKACSVSKVKRVIMTSSVGAVLLDPKRPRDKFVDESCWSDPEYCRATQNWYYMSKTVAEQDAWHYSEESGLDLISICPSLVLGPILQPNLNASCLVLVKLLNGDPERCENKARNIVDVRDVARAHILAYENPSAAGRYLCTAHSVRTKELVDILKRLYPQYTYPKDYVDVGLDVSGIEQVSGNKLRELGLDCMQLEQTLVDIVECFQHKGILK

SEQ ID NO: 2393 - DNA, 1332 bp, Zea mays
  misc_feature: Ceres Clone ID no. 221950
  misc_feature: Encodes the peptide sequence at SEQ ID NO. 2394
actacgtagctgcctgtgcctctttctggctccctgctgtctgcctggccggtgctcacagacacgcgcaagatggccggacgcacggaggaggctcgcaggagcggggagagggagacggtgtgcgtgacgggcgccggcgggtacatcgcctcatggctcgtcaagctcctcctctcccgcggctacgccgtgcacgccaccgtccgtgacccgcgtgatcccaagaacgcccacctggggcagctggaatgggccgcggagaatctccggctgttcaaggccgacgtgctcgacagcgacgcgctggctgccgcagtctccgggtgccggggggtcttccatgttgcctgtccggtgcccacggatagggttcttgatccggagtcagaagtactggctcctgctgtgcaaggtaccttaaacattcttcaggcttgctcagctaataatattcagaaggttgttgtggtttcgtctaccgccgctgttcatttcgacccaaattggcctccacatagacctaaagacgaggattgctggtcggacataaacttttgcaaaaagaacgaggactggtatatggttgccaaggttattgctgaaaagacagccctagaatacggagagagaaatggattaaatgttgttacagtttgccctactatggctttaggaccgctcttgcggcctatgctcaatgtcagccatgaattcctcatgtacattattaaaggaggtcctactatgatgaagaacattccatggcacatagttgatgtccgagatgtggttgatgctttgcttatggtatacaagaaagaggaatcgacagggagatacatctgtgcaccaaattgcatcagtgcaaaagatctggtgaacatgctgaagagggattatcctaattacaattatgtaaactgcgacaatgatatggtgcttaactctatagttacaccacttatgtcggagaaactgaagaatttgggctggaaaccaatgaagacactagaggaaacattattggatagtgttgaatgctataagaagatggggcttctaaaagatgctgagggatgcccttgtcgtcttcctcacctttttcatatggctatagaaaaatgaagaatactcaccattgcttcttgtgttacctaattactctttgaacattgttgggtatgtgttctaatcacacaccaataatgttgacattcaatgggttgtggttgatttgaaataaatgtttggtttcttatgtaatctatatggaacaaagtgcacctttcactttttttgtatggaagttgtcatgcatcttttttctcg

SEQ ID NO: 2394 - protein, 351 aa, Zea mays
  misc_feature (17)..(260): Pfam Name: Epimerase Pfam Description: NAD dependent epimerase/dehydratase fam
  misc_feature: Ceres Clone ID no. 221950
  misc_feature: Bit score of 544.1 for HMM based on sequences of Figure 41
  misc_feature: Functional Homolog Of SEQ ID NO. 2323
MAGRTEEARRSGERETVCVTGAGGYIASWLVKLLLSRGYAVHATVRDPRDPKNAHLGQLEWAAENLRLFKADVLDSDALAAAVSGCRGVFHVACPVPTDRVLDPESEVLAPAVQGTLNILQACSANNIQKVVVVSSTAAVHFDPNWPPHRPKDEDCWSDINFCKKNEDWYMVAKVIAEKTALEYGERNGLNVVTVCPTMALGPLLRPMLNVSHEFLMYIIKGGPTMMKNIPWHIVDVRDVVDALLMVYKKEESTGRYICAPNCISAKDLVNMLKRDYPNYNYVNCDNDMVLNSIVTPLMSEKLKNLGWKPMKTLEETLLDSVECYKKMGLLKDAEGCPCRLPHLFHMAIEK

SEQ ID NO: 2395 - DNA, 1056 bp, Sorghum bicolor
  misc_feature: Ceres Annot ID no. 8654926
  misc_feature: Encodes the peptide sequence at SEQ ID NO. 2396
atggccggacgcactacggagggggctcgctgcagcggggagacgacggtgtgcgtgacgggcgccggcggctacatcgcctcgtggctcgtcaagctcctcctctcccgcggctacaccgtgcacgccaccgtccgcgacccgggtgatcccaagaacgcccacctggggcggctggaaggggcctcggagaacctccggctgttcaaggccaacgtgctcgaccagaacgcgctggctgccgcagtctccgggtgccggggggtcttccatcttgcctgtccggtgcccacggataaggttcttgatccggagtcagaagtactggctcctgctgtgcaaggtaccttgaacattcttcaggcttgctcaaataataatattcagaaagttattgtggtttcgtccaccgccgctgttcatttcaacccaaattggcctcaacacatacccaaagacgaggagtgctggtcggacataaacttttgcaaaatgaatgaggactggtatatggttgccaaggttattgctgaaaagacagccttggaatatgcagagaaaaatggactgaatgttgttacagtttgccctactatggctttaggaccgctcctacggcctatggtcaatgtcagccatgaattcctgctatacattattaaaggaggtcctactgtgatgaggaacattccctggcacatagttgatgtccgtgatgtggctgatgctttgcttctcgtatacgagaaagagaaatcagcaaggagatacatctgcgcgccaaattacatcagtgcgatagatctggtgaacatgctgaagaaggctcatcctaattacaattacgtaaactgcggcaatgatttggttcctaactctatagttacgccaataatgtcggagaaactgaagaatttgggctggaaaccaaggaagacgctacataaaacattgatggatagtgttgaatgctatgagaagatggggcttctgcaagatgttgagggatgcccttgccgtcttcctcacctttttcatatggctatagaaaaatga

SEQ ID NO: 2396 - protein, 351 aa, Sorghum bicolor
  misc_feature (17)..(260): Pfam Name: Epimerase Pfam Description: NAD dependent epimerase/dehydratase fam
  misc_feature: Ceres Annot ID no. 8654926
  misc_feature: Bit score of 545.7 for HMM based on sequences of Figure 41
  misc_feature: Functional Homolog Of SEQ ID NO. 2323
MAGRTTEGARCSGETTVCVTGAGGYIASWLVKLLLSRGYTVHATVRDPGDPKNAHLGRLEGASENLRLFKANVLDQNALAAAVSGCRGVFHLACPVPTDKVLDPESEVLAPAVQGTLNILQACSNNNIQKVIVVSSTAAVHFNPNWPQHIPKDEECWSDINFCKMNEDWYMVAKVIAEKTALEYAEKNGLNVVTVCPTMALGPLLRPMVNVSHEFLLYIIKGGPTVMRNIPWHIVDVRDVADALLLVYEKEKSARRYICAPNYISAIDLVNMLKKAHPNYNYVNCGNDLVPNSIVTPIMSEKLKNLGWKPRKTLHKTLMDSVECYEKMGLLQDVEGCPCRLPHLFHMAIEK

SEQ ID NO: 2397 - protein, 284 aa, Picea sitchensis
  misc_feature (16)..(259): Pfam Name: Epimerase Pfam Description: NAD dependent epimerase/dehydratase fam
  misc_feature: Public GI ID no. 116786601
  misc_feature: Bit score of 470.0 for HMM based on sequences of Figure 41
  misc_feature: Functional Homolog Of SEQ ID NO. 2323
MTLTVEKTVQFHGETVCVTGAGGFIASWLVKLLLEQGYNVRGTVREPGGEKNVHLENLERAKERLKILKANLLDYDSLLEAINGCTGVFHTASPVLSQTASNPEVEVINPAIKGTLNVLKACSVSKVKRVIMTSSVGAVLLDPKRPRDKFVDESCWSDPEYCRATQNWYYMSKTVAEQDAWHYSEESGLDLISICPSLVLGPILQPNLNASCLVLVKLLNGDPERCENKARNIVDVRDVARAHILAYENPSAAGRYLCTAHSVRTKELVDILKRLYPQYTYPKE

SEQ ID NO: 2398 - DNA, 1032 bp, Sorghum bicolor
  misc_feature: Ceres Annot ID no. 8654929
  misc_feature: Encodes the peptide sequence at SEQ ID NO. 2399
atggcgccgccgcggcgtgtgtgcgtgaccggaggcggagggttcattgcctcctggctcgtcaagctcctcctctcccgcggctacgccgtcccacgccacccttcgcgacccaatgtgggtgctcgttcaggtgatccaaagaatgcccatttgaaggagctggagaaggccccagagaatctgcatctgttcaaggccgacgtgctagactacgacacgctaacacctgcagttgagggatgtgaggggatcttccatctcgccactccggtgcctgaagataagattgttgatcctgagtcagaagtgctcgatactgctgtgaaaggtaccttaaatgtactgaagatctgctccgcttcaaaggttcacaaacttgttgtgatgtcctccaatgctgctgtggattttaacccaaattggcctcaggatgtagtgaaagatgagagttgctggtcagacaaggagttctgcaaggaaaatagggactggtattctgtcgccaagattactgcagaacagatagctttggaatatgcggttgaaaatggcctcaatgttgttacactttgcccgcctttggtttttggcccactgttgcagcctgcagtgaataccagcagcaaattcctcatatatgttataaaaggaggtcctgatgtgatgaacaacagactgtggcacatagtagacgtccgtgatgtggccgacgctttactcctgctgtacgagaagaaagagtcgtcagggagatacatctgctcaccgaatcacatttgcacaaaggatttggtggccttgttgaagaagctgcactcacagtatagctacataactaacatccttgatgtcgatcagaaagcatcgttaacatgtcagaagctgatggacctgggctgggaaccaaggaaactggaggagacgctctcggacagcgtcgagtgctacgaaaaggcagggcttctccgggatgtggccgggcatccttgccgccttccccatctcttccgtctggcatgtgaccagtga

SEQ ID NO: 2399 - protein, 343 aa, Sorghum bicolor
  misc_feature (7)..(256): Pfam Name: Epimerase Pfam Description: NAD dependent epimerase/dehydratase fam
  misc_feature: Ceres Annot ID no. 8654929
  misc_feature: Bit score of 529.1 for HMM based on sequences of Figure 41
  misc_feature: Functional Homolog Of SEQ ID NO. 2323
MAPPRRVCVTGGGGFIASWLVKLLLSRGYAVPRHPSRPNVGARSGDPKNAHLKELEKAPENLHLFKADVLDYDTLTPAVEGCEGIFHLATPVPEDKIVDPESEVLDTAVKGTLNVLKICSASKVHKLVVMSSNAAVDFNPNWPQDVVKDESCWSDKEFCKENRDWYSVAKITAEQIALEYAVENGLNVVTLCPPLVFGPLLQPAVNTSSKFLIYVIKGGPDVMNNRLWHIVDVRDVADALLLLYEKKESSGRYICSPNHICTKDLVALLKKLHSQYSYITNILDVDQKASLTCQKLMDLGWEPRKLEETLSDSVECYEKAGLLRDVAGHPCRLPHLFRLACDQ

SEQ ID NO: 2400 - DNA, 960 bp, Sorghum bicolor
  misc_feature: Ceres Annot ID no. 8654924
  misc_feature: Encodes the peptide sequence at SEQ ID NO. 2401
atggccggaggtacaacggtgtgcgtgaccggcgccggcgggttcatcgcctcgtggctcgtgaagctcctgctctcccgcggctacaccgtgcacggcaccgtccgcgacctcagtgacgagaagacgaaccatctgaagcgcctggagaatgctgccggaaacctcaggattttcaaggctgatctgctggactacgacgccatggcagctgcggtcgtcgggtgccagggagttctccatgtggccactccagtgccttcagagaacctgactgacccagagctacaaatgttgggtcctgctgtcactggtacaactaatgtgctcaaggctgcctctgccgcgaatgtccagcgagtggtggttgtgtcatccatggttgccgttgagatcagcccaaagattggcctgaagagctggtacccggtcgccaagatcatctcagaagaggcggcgctcgcatacgggcggcaaaccgggcttgacgtggtgactatcaatccagggttggtgttcggccccctgctgcagccgacggtgaacgcaagcatccagttcctcatctacttcctcaaaggaggccccgacctggtgaggaacaagctctggcacgtcgtcgatgtccgtgacctcgccgacgcgctgctgctgctctacgaggtgcctgaagcagccggcaggcacatctgcgcgcctcatgttatcagtgcccgcgacctgctggacttgctgaagagcatgtaccctgacaaccctttcattgccaaggagagcatatgtgatagagatcacccagcaccgatgacttctgacaagctaaagaacctcgggtggagctgccggccgctggaagagacgatcctggacacagtcgagtgctgccagcgggctgggtttcttgacggtgtggctggggagactccctgtcgtttccctcctatcttcaacaaaatctag

SEQ ID NO: 2401 - protein, 319 aa, Sorghum bicolor
  misc_feature (7)..(232): Pfam Name: Epimerase Pfam Description: NAD dependent epimerase/dehydratase fam
  misc_feature: Ceres Annot ID no. 8654924
  misc_feature: Bit score of 468.0 for HMM based on sequences of Figure 41
  misc_feature: Functional Homolog Of SEQ ID NO. 2323
MAGGTTVCVTGAGGFIASWLVKLLLSRGYTVHGTVRDLSDEKTNHLKRLENAAGNLRIFKADLLDYDAMAAAVVGCQGVLHVATPVPSENLTDPELQMLGPAVTGTTNVLKAASAANVQRVVVVSSMVAVEISPKIGLKSWYPVAKIISEEAALAYGRQTGLDVVTINPGLVFGPLLQPTVNASIQFLIYFLKGGPDLVRNKLWHVVDVRDLADALLLLYEVPEAAGRHICAPHVISARDLLDLLKSMYPDNPFIAKESICDRDHPAPMTSDKLKNLGWSCRPLEETILDTVECCQRAGFLDGVAGETPCRFPPIFNKI

SEQ ID NO: 2402 - protein, 372 aa, Saccharum officinarum
  misc_feature (31)..(270): Pfam Name: Epimerase Pfam Description: NAD dependent epimerase/dehydratase fam
  misc_feature: Public GI ID no. 3341511
  misc_feature: Bit score of 407.0 for HMM based on sequences of Figure 41
  misc_feature: Functional Homolog Of SEQ ID NO. 2323
MTVVDAVSTDAAGAPAAAAAPVQQPGNGQTVCVTGAAGYIASWLVKLLLEKGYTVKGTVRNPDDPKNAHLKALDGAAERLILCKADLLDYDAICRAVQGCHGVFHTASPVTDDPEQMVEPAVRGTEYVINAAAEAGTVRRVVFTSSIGAVTMDPSRGPDVVVDESCWSDLEFCKKTRNWYCYGKAVAEQAAWDAARQRGVDLVVVNPVLVVGPLLQPTVNASIAHVVKYLDGSARTFANAVQAYVDVRDVADAHLRVFESPRASGRYLCAERVLHREDVVRILAKLFPEYPVPTRCSDEVNPRKQPYKFSNQKLRDLGLEFRPVSQSLYDTVKNLQEKGHLPVLGEQTTEADDKEAAPAAAELQQGGIAIRA

SEQ ID NO: 2403 - protein, 322 aa, Picea abies
  misc_feature (13)..(251): Pfam Name: Epimerase Pfam Description: NAD dependent epimerase/dehydratase fam
  misc_feature: Public GI ID no. 104162062
  misc_feature: Bit score of 415.0 for HMM based on sequences of Figure 41
  misc_feature: Functional Homolog Of SEQ ID NO. 2323
MTAGKQTGAGQTVCVTGAGGFIASWLVKLLLERGYTVRGTVRNPEDQKNAHLRQLEGAEERLTLVKADLMDYNSLLNAITGCQGVFHVASPVTDDPVQMVEPAVNGTKNVLDACAEAAVRRVVFTSSIGAVYMDPTRDYDALVDESCWSNLDFCKDTKNWYCYGKAVAEKAAWDRAKEKGLDLVVVNPCVVLGPVLQSSINASILHILKYLTGSAKTYANSVQAYVHVRDVAEAHILVYESPSASGRYLCAESVLHRGDVVELLEKMFPQYPIPTKCKDDGKPRVKPWKVSNQKLKDLGLEFTPAKQCLYETVISLQEKGHI

SEQ ID NO: 2404 - DNA, 1318 bp, Gossypium hirsutum
  misc_feature: Ceres Clone ID no. 1895447
  misc_feature: Encodes the peptide sequence at SEQ ID NO. 2405
aaaacaaagcatcaaaaccccagaagacaagagtttcacctcaacaaaacacctacagagcaaatatgccaattgagagctcttccactaatgccccaaccgtctgtgtcaccggtgccggtggcttcatcgcctcctggattgtcaagcttcttcttgaaaaaggttacactgtcaagggcactgtaaggaacccagacgatcccaagaattgtcatttgagagagcttgaaggagcaaaggagaggctatctcttcacaaagctgaccttcttgattaccagtctcttaaggaagccattagcggttgcgatggagttttccatactgcttcacctgtgactgatgatcctgaacaaatggtggagccggccgtgattgggactaagaatgtgataatggcagcggcagaggccaaagttcgacgtgtggtgttcacatcttccataggtgccgtgtacatggaccccaacaggagccctgatgtggtggtcgatgagtcttgctggagcgacctcgagttttgcaaaaataccaagaattggtattgttatgggaaggcagtggcagaacaagcagcctgggaaacagccaaggaaaaaggggtggaccttgtggcgataaccccagttttggtgctgggtccattgctgcaaccaactgtgaatgccagcattgttcacatcctcaagtacttaaccggctcggcaaagacctatgccaattcagttcaagcctatgttcacgtcagagatgtcgcattagcacaccttctcgtgtatgagaatccctctgcctccggccgctacctctgcgctgagagcgtcctccaccgtggtgaagtggtggagattttagccaagttcttccccgagtatcccatccctaccaagtgctcagatgagaagaacccaagagcaaaaccctacaagttcacgaaccagaagctgagggatttggggttggagttcaccccggtgaagcagtgcctatacgagacggtgaaaagcttgcaagagaaaggtcacctgcctataccagcgcaacaccaggaagattctggccttcgtattcaatcttaagccttattctcatacacttaatactcctgcttagcttacctactattaagggaaccgagacatgcaccctggatggctagcattactgaatgccaatgtgttgtgtgcccattttgtgttgtcgtatctaattaatagcaaaaatagcttattggacccaataatctgttgaacttttccatcttctaattaatcaattatttaaaatgaaatgtgtggaaaatattatattttcg

SEQ ID NO: 2405 - protein, 338 aa, Gossypium hirsutum
  misc_feature (13)..(251): Pfam Name: Epimerase Pfam Description: NAD dependent epimerase/dehydratase fam
  misc_feature: Ceres Clone ID no. 1895447
  misc_feature: Bit score of 424.3 for HMM based on sequences of Figure 41
  misc_feature: Functional Homolog Of SEQ ID NO. 2323
MPIESSSTNAPTVCVTGAGGFIASWIVKLLLEKGYTVKGTVRNPDDPKNCHLRELEGAKERLSLHKADLLDYQSLKEAISGCDGVFHTASPVTDDPEQMVEPAVIGTKNVIMAAAEAKVRRVVFTSSIGAVYMDPNRSPDVVVDESCWSDLEFCKNTKNWYCYGKAVAEQAAWETAKEKGVDLVAITPVLVLGPLLQPTVNASIVHILKYLTGSAKTYANSVQAYVHVRDVALAHLLVYENPSASGRYLCAESVLHRGEVVEILAKFFPEYPIPTKCSDEKNPRAKPYKFTNQKLRDLGLEFTPVKQCLYETVKSLQEKGHLPIPAQHQEDSGLRIQS

SEQ ID NO: 2406 - DNA, 984 bp, Sorghum bicolor
  misc_feature: Ceres Annot ID no. 8643098
  misc_feature: Encodes the peptide sequence at SEQ ID NO. 2407
atggcgtcgcagctgccacgagtgtgcgtcactggaggcggcgggttcatcgcctcctggctcgtgaagctgctcctctcccgtggctatgccgtccatgccactctccgtgacccatgcatgtacctatctattcacaattcacgtgatccaaagaatgcccatctgaagaagctggatagagccccagagaatctgcatctgttcaaggctgatgtgctggactgcgagactctgacgcccgcagttcaaggatgtcagggagtcttccatcttgccactccggtgcctgaagataagattcttcatcctgacgtttgctcaactctgaaggttcacaaagttgttgtgatgtcctccaatgctgctgttacttccaacccgaattggcctcaagatagactcaaagatgagagttgctggtcagacacagagttctgcaaggagaaggaggactggtattctgttgccaagactctggctgaacaagaagcctcggaatatgcacgtaacaatggactaaatgttgttgcactgtgccctccttatgtttttggtccactgttgcagtcttcagtgaacacaagcagcaaactcctcatctatgttataaaaggaggtcctgatgtgatgaccaacagaatgtgggacgtagtagacgtccgtgatgtggccgatgctctgctcctgttgtacgagaatgatcggtcatcagggagatacatttgctcgccgaatcgcgtttgcacgagggatttggtggacctgttgaagaagatgtacccagagtacggttacgtaaataacgtcgtcgatgctgaccatgcaggaccacctttatctagtcagaagctgaaggatctgggttgggaaccaaggaagctggaatcgacgctctcagacagcgtccagtcatatgaaaaggcagggcttctccaggggaatccttgtcgcctcccctttctcattcgtgcgtggctgtag

SEQ ID NO: 2407 - protein, 327 aa, Sorghum bicolor
  misc_feature (8)..(244): Pfam Name: Epimerase Pfam Description: NAD dependent epimerase/dehydratase family
  misc_feature: Ceres Annot ID no. 8643098
  misc_feature: Bit score of 489.9 for HMM based on sequences of Figure 41
  misc_feature: Functional Homolog Of SEQ ID NO. 2323
MASQLPRVCVTGGGGFIASWLVKLLLSRGYAVHATLRDPCMYLSIHNSRDPKNAHLKKLDRAPENLHLFKADVLDCETLTPAVQGCQGVFHLATPVPEDKILHPDVCSTLKVHKVVVMSSNAAVTSNPNWPQDRLKDESCWSDTEFCKEKEDWYSVAKTLAEQEASEYARNNGLNVVALCPPYVFGPLLQSSVNTSSKLLIYVIKGGPDVMTNRMWDVVDVRDVADALLLLYENDRSSGRYICSPNRVCTRDLVDLLKKMYPEYGYVNNVVDADHAGPPLSSQKLKDLGWEPRKLESTLSDSVQSYEKAGLLQGNPCRLPFLIRAWL

SEQ ID NO: 2408 - protein, 348 aa, Hordeum vulgare
  misc_feature (21)..(260): Pfam Name: Epimerase Pfam Description: NAD dependent epimerase/dehydratase fam
  misc_feature: Public GI ID no. 25140432
  misc_feature: Bit score of 406.2 for HMM based on sequences of Figure 41
  misc_feature: Functional Homolog Of SEQ ID NO. 2323
MTVVDAAAAVAQELPGHGQTVCVTGAAGYIASWLVKLLLERGYTVKGTVRNPDDPKNAHLKALDGAAERLVLCKADLLDYDAICAAVEGCHGVFHTASPVTDDPEQMVEPAVRGTEYVIDAAADAGTVRRVVFTSSIGAVTMDPNRGPDVVVDESCWSDLEFCKKTKNWYCYGKAVAEQAAWEKARARGVDLVVVNPVLVVGPLLQPTVNASAAHILKYLDGSARKYANAVQAYVDVRDVAGAHLRVFEAPQASGRYLCAERVLHRQDVVHILAKLFPEYPVPTRCSDEVNPRKQPYKMSNQKLQDLGLKFTPVNDSLYETVKSLQEKGHLPVPRKDILAPQLDGATA

SEQ ID NO: 2409 - protein, 332 aa, Solanum lycopersicum
  misc_feature (9)..(247): Pfam Name: Epimerase Pfam Description: NAD dependent epimerase/dehydratase fam
  misc_feature: Public GI ID no. 65306612
  misc_feature: Bit score of 410.6 for HMM based on sequences of Figure 41
  misc_feature: Functional Homolog Of SEQ ID NO. 2323
MPSVSGRVVCVTGAGGFIASWLVKLLLEKGYTVRGTVRNPDDPKNCHLRELEGAKERLTLCRGDLLDYQSLREAINGCDGVFHTASPVTDDPEQMVEPAVIGTKNVITAAAEANVRRVVFTSSIGAVYMDPSRDPEKVVDETCWSDPDFCKNTKNWYCYGKMVAEQAAWDEAREKGVDLVAINPVLVLGPLLQNTVNASVLHILKYLTGSAKTYANSVQAYVHVKDVALAHILLYETPSASGRYLCAESVLHRGDIVEILAKFFPEYPIPTKCSDVTKPRVKPYKFSNQKLKDLGMEFTPVKQCLYETVKSLQEKGHLPIPTQKDEIIRIQT

SEQ ID NO: 2410 - DNA, 1472 bp, Zea mays
  misc_feature: Ceres Clone ID no. 238838
  misc_feature: Encodes the peptide sequence at SEQ ID NO. 2411
aggatgaatcggaagagagaatcctaccaaacctagctaccaactcgatcgtcgtcatcacgctcgaccgcacaactgcaccgaggggggaggagacctaaaaactactacatcttttagctacacatctagctaaagatcgagaggggtaaataaggacgagcgggcgcgagctagaagagcagctgcaggtactaccatcatcgtcgtcgtcgtcgccaggatgaccgttgtcgacgccgtctcctccaccgatgccggcgccgccgccgccacggtaccggcggggaacgggcagaccgtgtgcgtcaccggcgcggccgggtacatcgcctcgtggttagtgaagctgctgctcgagaagggatacactgtgaagggcaccgtgaggaacccagatgacccgaagaacgcgcacctcaaggcgctggacggcgccgccgagcggctgatcctctgcaaggccgatctgctggactacgacgccatctgccgcgccgtgcagggctgccagggcgtcttccacaccgcctcccccgtcaccgacgacccggagcaaatggtggagccggcggtgcgcggcaccgagtacgtgatcaacgcggcggcggaggccggcacggtgcggcgggtggtgttcacgtcgtccatcggcgccgtgaccatggaccccaagcgcgggcccgacgtcgtggtcgacgagtcgtgctggagcgacctcgagttctgcgagaaaaccaggaactggtactgctacggcaaggcggtggcggagcaggcggcgtgggagacggcccggcggcggggcgtggacctggtggtggtgaaccccgtgctggtggtgggccccctgctgcaggcgacggtgaacgccagcatcgcgcacatcctcaagtacctggacggctcggcccgcaccttcgccaacgccgtgcaggcgtacgtggacgtgcgcgacgtggccgacgcgcacctccgcgtcttcgagagcccccgcgcgtccggccgccacctctgcgccgagcgcgtcctccaccgcgaggacgtcgtccgcatcctcgccaagctattccccgagtaccccgtcccagccaggtgctccgacgaggtgaatccgcgaaagcagccgtacaagttctccaaccagaagctccgggacctggggctgcagttccggccggtcagccagtcgctttacgacacggtgaagaacctccaggagaagggacacctgccggtgctcggagagcggacgacgacggaggccgccgacaaggatgcccccacggccgagatgcagcagggagggatcgccatccgtgcctgagagggcgatgccacacatgaacacaaagcaatgttcatactgctgccctgcacctgcaccttcccctgctgtgtaaacaggcctgtgtttgttctggctgatagtgatgtaccctaagacttgtaacgtcatgttcgttcttgtg

SEQ ID NO: 2411 - protein, 367 aa, Zea mays
  misc_feature (27)..(266): Pfam Name: Epimerase Pfam Description: NAD dependent epimerase/dehydratase fam
  misc_feature: Ceres Clone ID no. 238838
  misc_feature: Bit score of 404.0 for HMM based on sequences of Figure 41
  misc_feature: Functional Homolog Of SEQ ID NO. 2323
MTVVDAVSSTDAGAAAATVPAGNGQTVCVTGAAGYIASWLVKLLLEKGYTVKGTVRNPDDPKNAHLKALDGAAERLILCKADLLDYDAICRAVQGCQGVFHTASPVTDDPEQMVEPAVRGTEYVINAAAEAGTVRRVVFTSSIGAVTMDPKRGPDVVVDESCWSDLEFCEKTRNWYCYGKAVAEQAAWETARRRGVDLVVVNPVLVVGPLLQATVNASIAHILKYLDGSARTFANAVQAYVDVRDVADAHLRVFESPRASGRHLCAERVLHREDVVRILAKLFPEYPVPARCSDEVNPRKQPYKFSNQKLRDLGLQFRPVSQSLYDTVKNLQEKGHLPVLGERTTTEAADKDAPTAEMQQGGIAIRA

SEQ ID NO: 2412 - DNA, 1014 bp, Populus balsamifera subsp. trichocarpa
  misc_feature: Ceres Annot ID no. 1490817
  misc_feature: Encodes the peptide sequence at SEQ ID NO. 2413
atgcctgtcgatacttcatcacttccatgccaaggccaaactgtctgtgtcaccggggctggtggcttcattgcttcatggattgttaaacttcttctagagaaaggttactctgttaaaggaactgtgaggaacccagctgatcccaagaattcccatttgagggagcttgagggagctcaagaaagattaactttatgcaaggctgatctccttgattatgagtctcttaaagaggctattcaagggtgtgatggagttttccatactgcttctcctgtcacagacgatccagagcaaatgctggagccagcagtgaatggaaccaagaatgtgatcatggcagcagctgaggcccaagtccgacgagtggttttcacgtcttcaattggtactgtgtacatggaccccaataggagccctgatgttgtcgttgatgaatcttgctggagtgatcttgagttctgcaagaacaccaagaattggtattgctatggaaagactgtggcggaacaggatgcatgggatgtggctaagaagaatggagttgacctagtggtggtgaacccagtgctggtgcttggaccattgttgcaacccactgtcaatgctagcatcgttcacatcctcaagtacctaaccggctcagccaagacatatgctaactctgttcaagcttatgtgcatgttaaggatgtggcactagcccacattttagtcttcgagacaccttccgcctccggccgttacatttgcgctgagagaatgctccaccgtggagaggtggtggaaatccttgcaaagttcttcccggagtatcccatccccaccaagtgttcagatgagaagaacccaagaaaacaaccctacaagttcacaaaccagaagatcaaggatctgggcatcgaattcacaccagtgaaacagtgcctgtatgaatctgttaagagcttgcaggaaaagggtcaccttccaatcccaaaacaagctgaagactctgtgaaaattcaataa

SEQ ID NO: 2413 - protein, 337 aa, Populus balsamifera subsp. trichocarpa
  misc_feature (15)..(253): Pfam Name: Epimerase Pfam Description: NAD dependent epimerase/dehydratase fam
  misc_feature: Ceres Annot ID no. 1490817
  misc_feature: Bit score of 427.1 for HMM based on sequences of Figure 41
  misc_feature: Functional Homolog Of SEQ ID NO. 2323
MPVDTSSLPCQGQTVCVTGAGGFIASWIVKLLLEKGYSVKGTVRNPADPKNSHLRELEGAQERLTLCKADLLDYESLKEAIQGCDGVFHTASPVTDDPEQMLEPAVNGTKNVIMAAAEAQVRRVVFTSSIGTVYMDPNRSPDVVVDESCWSDLEFCKNTKNWYCYGKTVAEQDAWDVAKKNGVDLVVVNPVLVLGPLLQPTVNASIVHILKYLTGSAKTYANSVQAYVHVKDVALAHILVFETPSASGRYICAERMLHRGEVVEILAKFFPEYPIPTKCSDEKNPRKQPYKFTNQKIKDLGIEFTPVKQCLYESVKSLQEKGHLPIPKQAEDSVKIQ

SEQ ID NO: 2414 - DNA, 1017 bp, Populus balsamifera subsp. trichocarpa
  misc_feature: Ceres Annot ID no. 1448084
  misc_feature: Encodes the peptide sequence at SEQ ID NO. 2415
atgcctgttgatgcttcatcactttcaggccaaggccaaactatctgtgtcaccggggctggtggtttcattgcttcttggatggttaaacttcttttagataaaggttacactgttagaggaactgcgaggaacccagctgatcccaagaattctcatttgagggggcttgaaggagctgaagaaagattaactttatgcaaagctgatcttcttgattatgagtctcttaaagaggctattcaagggtgtgatggtgttttccacactgcttctcctgtcacagatgatccggaagaaatggtggagccagcagtgaacgggaccaaaaatgtgataattgcggcggctgaggccaaagtccgacgagtggtgttcacgtcatcaattggcgctgtgtacatggatcccaataagggcccagatgttgtcattgatgagtcttgctggagtgatcttgaattctgcaagaacaccaagaattggtattgctatggaaaggctgtggcagaacaagctgcatgggatatggctaaggagaaaggggtggacctagtggtggttaacccagtgctggtgcttggaccattgttgcagcccactgtcaatgctagcatcactcacatcctcaagtacctcaccggctcagccaagacatatgctaactctgttcaagcttatgtgcatgttagggatgtggcactagcccacattttagtctttgagacgccttccgcctccggccgttacctttgctctgagagcgttctccaccgtggagaggtggtggaaatccttgcaaagttcttccctgagtaccccatccctaccaagtgctcagatgagaagaacccaagaaaacaaccttacaagttctcaaaccagaagctaagggatctgggtttcgaattcaccccagtaaagcagtgtctgtatgaaactgttaagagtttgcaggaaaagggtcaccttccaatcccaaaacaagctgcagaagagtctttgaaaattcaataa

SEQ ID NO: 2415 - protein, 338 aa, Populus balsamifera subsp. trichocarpa
  misc_feature (15)..(253): Pfam Name: Epimerase Pfam Description: NAD dependent epimerase/dehydratase fam
  misc_feature: Ceres Annot ID no. 1448084
  misc_feature: Bit score of 423.6 for HMM based on sequences of Figure 41
  misc_feature: Functional Homolog Of SEQ ID NO. 2323
MPVDASSLSGQGQTICVTGAGGFIASWMVKLLLDKGYTVRGTARNPADPKNSHLRGLEGAEERLTLCKADLLDYESLKEAIQGCDGVFHTASPVTDDPEEMVEPAVNGTKNVIIAAAEAKVRRVVFTSSIGAVYMDPNKGPDVVIDESCWSDLEFCKNTKNWYCYGKAVAEQAAWDMAKEKGVDLVVVNPVLVLGPLLQPTVNASITHILKYLTGSAKTYANSVQAYVHVRDVALAHILVFETPSASGRYLCSESVLHRGEVVEILAKFFPEYPIPTKCSDEKNPRKQPYKFSNQKLRDLGFEFTPVKQCLYETVKSLQEKGHLPIPKQAAEESLKIQ

SEQ ID NO: 2416 - DNA, 1140 bp, Sorghum bicolor
  misc_feature: Ceres Annot ID no. 8713261
  misc_feature: Encodes the peptide sequence at SEQ ID NO. 2417
atgaccgtcgtcgacgccgtctccactgatgccgccggcgccgccccagctgccgccgcggcgccggtggtggtggcgcagcccgggaacgggcagaccgtgtgcgtcaccggcgcggccgggtacatcgcctcgtggctcgtcaagatgctgctcgagaagggatacactgtcaagggcaccgtcaggaacccaggcatgcttgttaactatgacccgaagaacgcgcacctcaaggcgctggacggcgcggccgagcggctgatcctctgcaaggccgacctcctggactacgacgccatctgccgcgccgtgcagggctgccagggcgtcttccacaccgcctcccccgtcaccgacgatccggagcaaatggtggagccggcggtgcgcggcacggagtacgtgatcaacgcggcggcggaggccggcacggtgcggcgggtggtgttcacgtcctccatcggcgcggtgaccatggaccccagccgcgggcccgacgtcgtggtcgacgagtcgtgctggagcgacctcgagttctgcaagaaaaccaggaactggtactgctacggcaaggcggtggcggagcaggcggcgtgggacgcggcccggcagcgcggcgtggacctggtggtggtgaacccggtgctggtggtgggcccgctgctgcagccgacggtgaacgccagcatcgcgcacgtgctcaagtacctggacggctccgcgcgcaccttcgccaacgccgtgcaggcgtacgtggacgtccgcgacgtcgccgacgcgcacctccgcgtcttcgagagccccgccgcgtccggccgatacctctgcgccgagcgcgtcctccaccgcgaggacgtcgtccgcatcctcgccaagctcttccccgagtaccccgtccccaccaggtgctccgacgaggtgaacccgcggaagcagccgtacaagttctcgaaccagaagctccgggacctgggattggagttccggccggtgagccagtcgctctacgatacggtgaagaaccttcaggagaagggccacctgccggtgctcggagagcagacgacggaggccgacaaggaggaggccaacgccgccgccgaggtgcagcagggaggaatcgccatccgtgcgtga

SEQ ID NO: 2417 - protein, 379 aa, Sorghum bicolor
  misc_feature (34)..(278): Pfam Name: Epimerase Pfam Description: NAD dependent epimerase/dehydratase fam
  misc_feature: Ceres Annot ID no. 8713261
  misc_feature: Bit score of 395.9 for HMM based on sequences of Figure 41
  misc_feature: Functional Homolog Of SEQ ID NO. 2323
MTVVDAVSTDAAGAAPAAAAAPVVVAQPGNGQTVCVTGAAGYIASWLVKMLLEKGYTVKGTVRNPGMLVNYDPKNAHLKALDGAAERLILCKADLLDYDAICRAVQGCQGVFHTASPVTDDPEQMVEPAVRGTEYVINAAAEAGTVRRVVFTSSIGAVTMDPSRGPDVVVDESCWSDLEFCKKTRNWYCYGKAVAEQAAWDAARQRGVDLVVVNPVLVVGPLLQPTVNASIAHVLKYLDGSARTFANAVQAYVDVRDVADAHLRVFESPAASGRYLCAERVLHREDVVRILAKLFPEYPVPTRCSDEVNPRKQPYKFSNQKLRDLGLEFRPVSQSLYDTVKNLQEKGHLPVLGEQTTEADKEEANAAAEVQQGGIAIRA

SEQ ID NO: 2418 - protein, 344 aa, Lolium perenne
  misc_feature (18)..(257): Pfam Name: Epimerase Pfam Description: NAD dependent epimerase/dehydratase fam
  misc_feature: Public GI ID no. 9964087
  misc_feature: Bit score of 407.0 for HMM based on sequences of Figure 41
  misc_feature: Functional Homolog Of SEQ ID NO. 2323
MTVVNTVAQQLPGHGQTVCVTGAAGYIASWLVKLLLERGYTVKGTVRNPDDPKNAHLKALDGAVERLILCKADLLDYDAICAAAEGCHGVFHTASPVTDDPEQMVEPAVRGTEYVINAAADAGTVRRVVFTSSIGAVTMDPNRGPDVVVDESCWSDLEFCKKTKNWYCYGKAVAEQAAWEAARKRGIDLVVVNPVLVVGPLLQPTVNASAAHILKYLDGSAKKYANAVQSYVDVRDVADAHIRVFEAPEASGRYLCAERVLHRGDVVQILSKLFPEYPVPTRCSDEVNPRKQPYKMSNQKLQDLGLQFTPVNDSLYETVKSLQEKGHLLVPSKNIPEGLNGVTA

SEQ ID NO: 2419 - protein, 332 aa, Solanum lycopersicum
  misc_feature (9)..(247): Pfam Name: Epimerase Pfam Description: NAD dependent epimerase/dehydratase f
  misc_feature: Public GI ID no. 65306614
  misc_feature: Bit score of 403.7 for HMM based on sequences of Figure 41
  misc_feature: Functional Homolog Of SEQ ID NO. 2323
MPSESGKVVCVTGAGGFIASWLVKLLLEKGYTVRGTVRNPDDSKNGHLKELEGAKERLILLRADLLDYQSLREAIYGCDGVFHTASPVTDDPEQMVEPAVIGTKNVITAAAETKVRRVVFTSSIGTVYMDPNRAPDKVVDETCWSDLDYCKNTKNWYCYGKTVAEKTARDEAREKGVDLVVINPVLVLGPLLQPTVNASVLHILKYLTGSAKTYANSIQAYVHVKDVALAHILLYEAPSASGRYICAERVLHRGDVVEILAKFFPEYPIPTKCSDETRPRAKPYIFTNQKLKDLGLEFTPVKQCLYETVKSLQEKGHLPVPTQNDEPIKIHS

SEQ ID NO: 2420 - DNA, 1873 bp, Panicum virgatum
  misc_feature: Ceres Clone ID no. 1993306
  misc_feature: Encodes the peptide sequence at SEQ ID NO. 2421
gccccccaggcagggtgaagaggaagaaccagaagaaggcaagtggtggtggcggcgacggcggtgatgaggatgaggagtgaggatgaaccagtagccgttacctgatataatattatctagttgtcataaacatgttggtatcttgagctcttagctgtgtggcctgatgctcagccccttgtgctgactgggcatcacggatggttatcgttttatcttgcagtgttattagcctatacctagctgctatgttttgagatgtttattcaagttgcgtttcgacttctgttgtcatcaaagctgtacctgttttctctgcaaaaaaaaggaaggatcctaccaaacctaccaactcctcctcctcgaccgatcgcccgcgcaaaggggaaacctaaaaaaaaaactaactcgccattcgccaactagctagcttaactttctctccgcttcgggcgccaccgcgatcgtgcgaggtttcgtgaagacaccagagagtagtagcgggggtgttgaggaactgatctgatcgtcgatcgtgaagacgatgaccgtggtcgacgccgtgtcgtccgcgggcgccggcgacgccgtcgcgcccgccgccgacgccgcggggcagccgccggctgcggggaacgggcagacggtgtgcgtcaccggcgcggccgggtacatcgcgtcgtggctcgtcaagctgctgctcgagaaggggtacactgtcaagggcaccgtcaggaacccagatgacccgaagaacgcgcacctcaaggcgctggacggcgccgccgagcggctcttcctctgcaaggccgacctcctggacttcgacgccatctgccgcgccgtggagggctgccagggcgtcttccacaccgcctcccccgtcaccgacgaccccgagcaaatggtggagccggcggtgcgcggcacggagtacgtgatcagggcggcggcggaggccggcacggtgcggcgggtggtgttcacgtcctccatcggcgccgtcaccatggaccccaaccgcgggcccgacgtggtggtcgacgaatcctgctggagcgacctcgacttctgcaagaaaaccaggaactggtactgctacggcaaggcggtggcggagcaggcggcgtgggatgcggcgcggcagcgcggcgtggacctggtggtggtgaacccggtgctggtggtgggcccgctgctgcagccgacggtgaacgccagcatcgcgcacatcctcaagtacctggacggctccgcccgcaccttcgccaacgccgtgcaggcctacgtcgacgtccgcgacgtcgccgccgcgcacctcctcgtcttcgaggcccccgccgcctccggccgccacctctgcgccgaccgcgtcctccaccgcgaggacgtcgtccgcatcctcgccaagctcttccccgagtaccccgtccccaccaggtgctccgacgaggtgaacccgcggaagcaggcgtacaagttctcgaaccagaagctccgggacctggggctggagttccggccggtgagccagtcgctgtacgacacggtgaagagcctccaggagaagggccacctgccggtgctcgccgagcaggcgcccgagctggaggccgagaaggaggccgccgcccccgccgccgaggtgcagcagggcgggacgatcgccatccgtgcgtgaggtccaggcagatggcgccacgaatgaacagaatgcaagccatgttcatatgctgccccggccggtgcccctgatgtgtaacccaagtagtagtgtttgttgcctgtctgatgcccctaccaagacttgtaacgtcgtgctgctcgtccttgtgaactatagtgggtgaataaatatggttaattcccc

SEQ ID NO: 2421 - protein, 378 aa, Panicum virgatum
  misc_feature (35)..(275): Pfam Name: Epimerase Pfam Description: NAD dependent epimerase/dehydratase fam
  misc_feature: Ceres Clone ID no. 1993306
  misc_feature: Bit score of 410.4 for HMM based on sequences of Figure 41
  misc_feature: Functional Homolog Of SEQ ID NO. 2323
MTVVDAVSSAGAGDAVAPAADAAGQPPAAGNGQTVCVTGAAGYIASWLVKLLLEKGYTVKGTVRNPDDPKNAHLKALDGAAERLFLCKADLLDFDAICRAVEGCQGVFHTASPVTDDPEQMVEPAVRGTEYVIRAAAEAGTVRRVVFTSSIGAVTMDPNRGPDVVVDESCWSDLDFCKKTRNWYCYGKAVAEQAAWDAARQRGVDLVVVNPVLVVGPLLQPTVNASIAHILKYLDGSARTFANAVQAYVDVRDVAAAHLLVFEAPAASGRHLCADRVLHREDVVRILAKLFPEYPVPTRCSDEVNPRKQAYKFSNQKLRDLGLEFRPVSQSLYDTVKSLQEKGHLPVLAEQAPELEAEKEAAAPAAEVQQGGTIAIRA

SEQ ID NO: 2422 - protein, 371 aa, Zea mays
  misc_feature (31)..(270): Pfam Name: Epimerase Pfam Description: NAD dependent epimerase/dehydratase fam
  misc_feature: Public GI ID no. 3242328
  misc_feature: Bit score of 403.9 for HMM based on sequences of Figure 41
  misc_feature: Functional Homolog Of SEQ ID NO. 2323
MTVVDAVVSSTDAGAPAAAAAPVPAGNGQTVCVTGAAGYIASWLVKLLLEKGYTVKGTVRNPDDPKNAHLRALDGAAERLILCKADLLDYDAICRAVQGCQGVFHTASPVTDDPEQMVEPAVRGTEYVINAAAEAGTVRRVVFTSSIGAVTMDPKRGPDVVVDESCWSDLEFCEKTRNWYCYGKAVAEQAAWEAARRRGVDLVVVNPVLVVGPLLQATVNASIAHILKYLDGSARTFANAVQAYVDVRDVADAHLRVFESPRASGRHLCAERVLHREDVVRILAKLFPEYPVPARCSDEVNPRKQPYKFSNQKLRDLGLQFRPVSQSLYDTVKNLQEKGHLPVLGERTTTEAADKDAPAAEMQQGGIAIRA

SEQ ID NO: 2423 - protein, 338 aa, Populus balsamifera subsp. trichocarpa
  misc_feature (15)..(253): Pfam Name: Epimerase Pfam Description: NAD dependent epimerase/dehydratase fam
  misc_feature: Public GI ID no. 9998901
  misc_feature: Bit score of 425.0 for HMM based on sequences of Figure 41
  misc_feature: Functional Homolog Of SEQ ID NO. 2323
MPVDASSLSGQGQTICVTGAGGFIASWMVKLLLDKGYTVRGTARNPADPKNSHLRELEGAEERLTLCKADLLDYESLKEAIQGCDGVFHTASPVTDDPEEMVEPAVNGTKNVIIAAAEAKVRRVVFTSSIGAVYMDPNKGPDVVIDESCWSDLEFCKNTKNWYCYGKAVAEQAAWDMAKEKGVDLVVVNPVLVLGPLLQPTVNASITHILKYLTGSAKTYANSVQAYVHVRDVALAHILVFETPSASGRYLCSESVLHRGEVVEILAKFFPEYPIPTKCSDEKNPRKQPYKFSNQKLRDLGFEFTPVKQCLYETVKSLQEKGHLPIPKQAAEESLKIQ

SEQ ID NO: 2424 - protein, 371 aa, Zea mays
  misc_feature (31)..(270): Pfam Name: Epimerase Pfam Description: NAD dependent epimerase/dehydratase fam
  misc_feature: Public GI ID no. 194702744
  misc_feature: Bit score of 401.8 for HMM based on sequences of Figure 41
  misc_feature: Functional Homolog Of SEQ ID NO. 2323
MTVVDAVVSSTDAGAPAAAATAVPAGNGQTVCVTGAAGYIASWLVKLLLEKGYTVKGTVRNPDDPKNAHLKALDGAAERLILCKADLLDYDAICRAVQGCQGVFHTASPVTDDPEQMVEPAVRGTEYVINAAAEAGTVRRVVFTSSIGAVTMDPKRGPDVVVDESCWSDLEFCEKTRNWYCYGKAVAEQAAWETARRRGVDLVVVNPVLVVGPLLQATVNASIAHILKYLDGSARTFANAVQAYVDVRDVADAHLRVFESPRASGRHLCAERVLHREDVVRILAKLFPEYPVPARCSDEVNPRKQPYKFSNQKLRDLGLQFRPVSQSLYDTVKNLQEKGHLPVLGERTTTEAADKDAPTAEMQQGGIAIRA

SEQ ID NO: 2425 - protein, 336 aa, Eucalyptus gunnii
  misc_feature (13)..(251): Pfam Name: Epimerase Pfam Description: NAD dependent epimerase/dehydratase fam
  misc_feature: Public GI ID no. 2058311
  misc_feature: Bit score of 402.8 for HMM based on sequences of Figure 41
  misc_feature: Functional Homolog Of SEQ ID NO. 2323
MPVDALPGSGQTVCVTGAGGFIASWIVKLLLERGYTVRGTVRNPDDPKNGHLRELEGASERLTLYKGDLMDYGSLEEAIKGCDGVVHTASPVTDDPEQMVEPAVIGTKNVIVAAAEAKVRRVVFTSSIGAVTMDPNRGPDVVVDESCWSDLEFCKSTKNWYCYGKAVAEKAAWPEAKERGVDLVVINPVLVLGPLLQSTINASIIHILKYLTGSAKTYANSVQAYVHVKDVALAHVLVLETPSASGRYLCAESVLHRGDVVEILAKFFPEYNVPTKCSDEVNPRVKPYKFSNQKLRDLGLEFTPVKQCLYETVKSLQEKGHLPVPSPPEDSVRIQG

SEQ ID NO: 2426 - DNA, 1029 bp, Populus balsamifera subsp. trichocarpa
  misc_feature: Ceres Annot ID no. 1490808
  misc_feature: Encodes the peptide sequence at SEQ ID NO. 2427
atgcctgtcgatacttcatcacttccatgccaaggccaaactgtctgtgtcaccggggctggtggcttcattgcttcatggattgttaaacttcttctagagaaaggttactctgttaaaggaactgtgagaaacccagctgatcccaagaattcccatttgagggagcttgaaggagctcaagaaagattaactttatgcaaggctgatctccttgattatgagtctcttaaagaggctattcaagggtgtgatggagttttccatactgcttctcctgtcacagacgatccagagcaaatgctggagccagcagtgaatggaaccaagaatgtgatcatggcagcagctgaggccaaagtccgacgagtggttttcacgtcttcaattgggactgtgtacatggaccccaataggagccctgatgttgtcgttgatgaatcttgctggagtgatcttgagttctgcaagaacaccaagaattggtattgctatggaaagactgtggcggaacaggatgcatgggatgtggctaagaagaatggagttgacctagtggtggtgaacccagtgctggtgcttggaccattgttgcaacccactgtcaatgctagcatcgttcacatcctcaagtacctaaccggctcagccaagacatatgctaactctgttcaagcttatgtgcatgttaaggatgtggcactagcccacattttagtcttcgagacaccttccgcctccggccgttacatttgcgctgagagaatgctccaccgtggagaggtggtggaaatccttgcaaagttcttcccggagtatcccatccccaccaagtgttcagatgagaagaatccaagaaaacaaccctacaagttcacaaaccagaagatcaaggatctgggcatcgaattcaccccagtgaaacagtgcctgtatgaatctgttaagagcttgcaggaaaagggtcaccttccaatcccaaaacaagctgaagactctgtgaaaattcaacaagggctcatttattag

SEQ ID NO: 2427 - protein, 342 aa, Populus balsamifera subsp. trichocarpa
  misc_feature (15)..(253): Pfam Name: Epimerase Pfam Description: NAD dependent epimerase/dehydratase fam
  misc_feature: Ceres Annot ID no. 1490808
  misc_feature: Bit score of 427.8 for HMM based on sequences of Figure 41
  misc_feature: Functional Homolog Of SEQ ID NO. 2323
MPVDTSSLPCQGQTVCVTGAGGFIASWIVKLLLEKGYSVKGTVRNPADPKNSHLRELEGAQERLTLCKADLLDYESLKEAIQGCDGVFHTASPVTDDPEQMLEPAVNGTKNVIMAAAEAKVRRVVFTSSIGTVYMDPNRSPDVVVDESCWSDLEFCKNTKNWYCYGKTVAEQDAWDVAKKNGVDLVVVNPVLVLGPLLQPTVNASIVHILKYLTGSAKTYANSVQAYVHVKDVALAHILVFETPSASGRYICAERMLHRGEVVEILAKFFPEYPIPTKCSDEKNPRKQPYKFTNQKIKDLGIEFTPVKQCLYESVKSLQEKGHLPIPKQAEDSVKIQQGLIY

SEQ ID NO: 2428 - protein, 336 aa, Eucalyptus saligna
  misc_feature (13)..(251): Pfam Name: Epimerase Pfam Description: NAD dependent epimerase/dehydratase fam
  misc_feature: Public GI ID no. 10304406
  misc_feature: Bit score of 395.9 for HMM based on sequences of Figure 41
  misc_feature: Functional Homolog Of SEQ ID NO. 2323
MPVDALPGSGQTVCVTGAGGFIASWIVKLLLERGYTVRGTVRNPDDPKNGHLRDLEGASERLTLYKGDLMDYGSLEEAIKGCDGVVHTASPVTDDPEQMVEPAVIGTKNVIVAAAEAKVRRVVFTSSIGAVTMDPNRGPDVVVDESCWSDLEFCKSTKNWYCYGKAVAEKARCAEAKERGVDLVVINPVLVLGPLLQSTINASIIHILKYLTGSAKTYANSVQAYVHVKDVALAHVLVLETPSASGRYLCDESVLHRGDVVEILAKFFPEYNVPTKCSDEVNPRVKPYKFSNQKLKDLGLEFTPVKQCLYETVKSLQEKGHLPVPPPPEDSVRIQG

SEQ ID NO: 2429 - protein, 338 aa, Populus tomentosa
  misc_feature (15)..(253): Pfam Name: Epimerase Pfam Description: NAD dependent epimerase/dehydratase fam
  misc_feature: Public GI ID no. 190710713
  misc_feature: Bit score of 423.9 for HMM based on sequences of Figure 41
  misc_feature: Functional Homolog Of SEQ ID NO. 2323
MPVDASSLSGQGQTICVTGAGGFIASWMVKLLLDKGYTVRGTARNPADPKNSHLRELEGAQERLTLCKADLLDYESLKEAIQGCDGVFHTASPVTDDPEEMVEPAVNGTKNVIIAAAEAKVRRVVFTSSIGAVYMDPNKGPDVVIDESCWSDLEFCKNTKNWYCYGKAVAEQAAWDMAKEKGVDLVVVNPVLVLGPLLQPTVNASIVHILKYLTGSAKTYANSVQAYVHVRDVALAHILVFETPSASGRYLCSESVLHRGEVVEILAKFFPEYPIPTKCSDEKNPRKQPYKFSNQKLRDLGFEFTPVKQCLYETVKSLQERGHLPIPKQAAEESVKIQ

SEQ ID NO: 2430 - protein, 336 aa, Eucalyptus globulus
  misc_feature (13)..(251): Pfam Name: Epimerase Pfam Description: NAD dependent epimerase/dehydratase fam
  misc_feature: Public GI ID no. 50345920
  misc_feature: Bit score of 399.6 for HMM based on sequences of Figure 41
  misc_feature: Functional Homolog Of SEQ ID NO. 2323
MPVDALPGSGQTVCVTGAGGFIASWIVKLLLERGYTVRGTVRNPDDPKNGHLRELEGASERLTLYKGDLMDYGSLEEAIKGCDGVVHTASPVTDDPEQMVEPAVIGTKNVIVAAAEAKVRRVVFTSSIGAVTMDPNRGPDVVVDESCWSDLEFCKSTKNWYCYGKAVAEKAACAEAKERGVDLVVINPVLVLGPLLQSTINASIIHILKYLTGSAKTYANSVQAYVHVKDVALAHVLVLETPSASGRYLCAESVLHRGDVVEILAKFFPEYNVPTKCSDEVNPRVKPYKFSNQKLKDLGLEFTPVKQCLYETVKSLQEKGHLPVPPPPEDSVRIQG

SEQ ID NO: 2431 - DNA, 1296 bp, Panicum virgatum
  misc_feature: Ceres Clone ID no. 2022068
  misc_feature: Encodes the peptide sequence at SEQ ID NO. 2432
acgacacaaatcgaagagtggagaagagagagagagcagccacctctacctcggagcgcagcccccatcgctcctcacctggtgcgctgggctctacgcctctactggtgctcgctcgctggccggcgtcggagccagttcagctccagtcgattcggccgtgggagctgttgttgctgccgcagggcctccgctggggcgcggtgctgcgtgccggtactcccggcgctccggcaagggcctcatcctctgatctggcctgggcgtggtcgccaccaggagaggccgcgcactgggaagcgaagcacgcagccgccttgagttcgccggaggaatcggcgtgctaacggttttgcgggaggaatcggcgtgcgacgggataaggtaagcatggaggcggcggggaagacggtgtgcgtgaccggagcgggcggcttcgtggcgtcgtggcttgtgaagctcctcctgtcccggggccagtacatggtccgcggcactgtgcgcgaccctggtgctagcaagaatgctcatctcaaggcattggatgatgctggggaaaggttgcagcttctcaaagctgatttgctggactacaacaacgttgcatcagcggtttctggctgtgagggtgtcttccatgtagctagccctgttccctctggtcgatcctccaaccctgaggtggaggtcataggtcctgctgtcacaggtactgccaatgtgttaaaggcttgctatgaggcaaaagttggtcgagttgtggtggtgtcttctattgcagctgtgtccaataatcctaactggcccaagggcaaggcttttgatgaagatagctggtcagatgaggagtactgcaggaagaatgaggattggtacaacctttctaaaactctggcagaacgtgaggcctttgcttatgcagaaaaaacggggctggatgttgtagctatttgcccgtcattggtacttggacccttgatgcaatctacaataaatgcaagcagcaaaatcctccttaattatttcaaaggggatcgtgacaccgttgaaaataggctcagaaatattgtggatgttcgcgacgttactgatgctcttcttctggcatatgaaaaaccagaggcatctggacgatacatctgcagttcacatccaataaaagtttctgacatgataaacatattgaagaacttatatccaacttactcttatcccaagaacttttgtggaagtggaagaaaattttgtatacaattctgagaaacttcagaagctaggatggacttttaggcctat

SEQ ID NO: 2432 - protein, 289 aa, Panicum virgatum
  misc_feature (8)..(252): Pfam Name: Epimerase Pfam Description: NAD dependent epimerase/dehydratase fam
  misc_feature: Ceres Clone ID no. 2022068
  misc_feature: Bit score of 615.2 for HMM based on sequences of Figure 41
  misc_feature: Functional Homolog Of SEQ ID NO. 2323
MEAAGKTVCVTGAGGFVASWLVKLLLSRGQYMVRGTVRDPGASKNAHLKALDDAGERLQLLKADLLDYNNVASAVSGCEGVFHVASPVPSGRSSNPEVEVIGPAVTGTANVLKACYEAKVGRVVVVSSIAAVSNNPNWPKGKAFDEDSWSDEEYCRKNEDWYNLSKTLAEREAFAYAEKTGLDVVAICPSLVLGPLMQSTINASSKILLNYFKGDRDTVENRLRNIVDVRDVTDALLLAYEKPEASGRYICSSHPIKVSDMINILKNLYPTYSYPKNFCGSGRKFCIQF

SEQ ID NO: 2433 - DNA, 870 bp, Sorghum bicolor
  misc_feature: Ceres Annot ID no. 8743567
  misc_feature: Encodes the peptide sequence at SEQ ID NO. 2434
atgaggatatatcttgtttgtgctctaggtgctagcaagaatgctcatctcaaggcgctggaaggagctggggaaaggttgcagcttcttaaggctgatttgttggactacaacagtgttgcatcagcaattgctggctgtgagggtgtcttccatgtagctagccctgtcccttccggtcggtcctccaaccctgaggtggaggtcataggtcctgctttaacaggtacaaccaatgtgttaaaggcttgctatgaggcaaaagttaggcgagtcgtggtggtgtcttcatgtgcagctgtgtttgctaatcctaactggccaaagggtaaggtctttgatgaagactgctggtcagatgaggattactgcaggaagaatgaggattggtatttcctttccaaaacactggcggaacgtggggcttttgcttatgcagcaaaaacagggttggacgttgtaactatttgtccgtcatatgtatttggacccttgatgcagcctatagtaaattcgagcagtaaagtcatccttaattatttcaaaggaaatctcgagactgttgaaaatagactcagaaatatggtggatgttcgtgatgttgctgatgctcttcttctagcttacgaaaactcagaagcgtctggacgatacatcagcagttcacatccaataaaagtttctgatatgataaacatattgaagaccttatatccaacttaccattatcccaaaaattttgtggaagtggatgactactctgtattcagttctaagaaattgcagaagctaggctggaccttcaggcctatagaggaaatcctccgtgacactgttgaatcctacaaagcatttggcatcctaaattga

SEQ ID NO: 2434 - protein, 289 aa, Sorghum bicolor
  misc_feature (15)..(228): Pfam Name: Epimerase Pfam Description: NAD dependent epimerase/dehydratase family
  misc_feature: Ceres Annot ID no. 8743567
  misc_feature: Bit score of 588.9 for HMM based on sequences of Figure 41
  misc_feature: Functional Homolog Of SEQ ID NO. 2323
MRIYLVCALGASKNAHLKALEGAGERLQLLKADLLDYNSVASAIAGCEGVFHVASPVPSGRSSNPEVEVIGPALTGTTNVLKACYEAKVRRVVVVSSCAAVFANPNWPKGKVFDEDCWSDEDYCRKNEDWYFLSKTLAERGAFAYAAKTGLDVVTICPSYVFGPLMQPIVNSSSKVILNYFKGNLETVENRLRNMVDVRDVADALLLAYENSEASGRYISSSHPIKVSDMINILKTLYPTYHYPKNFVEVDDYSVFSSKKLQKLGWTFRPIEEILRDTVESYKAFGILN

SEQ ID NO: 2435 - protein, 283 aa, Zea mays
  misc_feature (13)..(257): Pfam Name: Epimerase Pfam Description: NAD dependent epimerase/dehydratase fam
  misc_feature: Public GI ID no. 212720841
  misc_feature: Bit score of 716.2 for HMM based on sequences of Figure 41
  misc_feature: Functional Homolog Of SEQ ID NO. 2323
MEGAAGIRTRPAVCVTGAGGFVASWLVERLLAGGRYMVHGTVRDPGDAKNAHLAAMDGAADRLRLFRAELLDYGSVAAAIAGCDGVFHVASPVPMTYPIGDPEVELLAPAVTGTKNVLKACSEAKVKRVVVVSSVAAVMVNPGWPQNEAMDEACWSDVEFCRTTQNWYCLSKTLAELEALDYAKRSGLDVVSVCPSLVIGPLLQSTVNASSSVIVDCLKGDREVKLKLRNFVDVRDVADALLLVYETPEASGRYICDANARQMSEVVALLKDWYPAYSHAATK

SEQ ID NO: 2436 - DNA, 2039 bp, Panicum virgatum
  misc_feature: Ceres Clone ID no. 1815770
  misc_feature: Encodes the peptide sequence at SEQ ID NO. 2437
ctctccccgctccaccccgcccccgcccggcgcgcctgtccccttggtcgcaaatggttctcgcgcgagtcctcacgctccctctgcccgccccgtcgtccacgcccaaccgccgcttcctcctcccgcctcgggcggcgcgtgtggcactggcacccgttcgggccgacgcctgccgggcggcgagcgcgatggcggctgtgccggctctggaccccgccgcggccgcggccgtgggcgtcggggaggagctgccggaggggtacgatcagatgatgcccaccgtggagccggcgcggcggcgtcgcgcggggttgttgctgcacccgacgtccctccggggcccgcacggcatcggcgacctcggcgacgaggcgctcgccttcctccactggctacgcgacgccggctgcacgctctggcaggttctgccacttgttcctccggggagaacatctggggaggatggatctccttattctggacaggatgccaactgtggtaatacccttttgatatctcttgaagagcttgtaaaagatggtcttttgatggaagatgaacttcctagtcccgtggatgtggagcatgttgaatttgataccgttgcaaatctgaaagaacctcttattgcaaaggcagcagagaggctcttactgggccaaggagacctcagaacgcaatatgactgcttcaagaaaaatccaaatatatcaggttggcttgaagatgcagcactttttgctgctattgacaaaagcattggtgcattctcttggtacgagtggcctgaacctctgaaaaatcgccatcttggagccttggaagatatatatcaaaaacagaaggacttcatagagacatttatggctcagcaattcttatttcaaaggcaatggcagcggattcgtaaatatgcacagaagttgggtatcagcataatgggtgacatgcctatatatgttggctaccatagtgcagatgtatgggcaaacaggaaatcatttttgctggacaagaacggtttccccacttttgttagtggtgttccacctgatgcatttagtgaaactggtcagctatggaacagtccgttgtacgactggaaagctatggaagcagatggcttttcatggtggataaagaggattaaacgagcccttgatttgtatgacgagttccgcattgaccattttcgggggcttgcgggtttttgggcagtcccatctgatgcaaaagtagcactagttggaagctggagggctggaccgaggaatgccttttttgatgcgctcttcaaagctgttggtagcataaatataatagcagaagacctgggggtgattactgaagatgtggttcagctaaggaaatcaattggggcccctgggatggcagttctccagtttgcttttggaggtggttctgataaccctcacttgctgcataaccatgaaatggaccaagttgtgtataccggaacacatgataacgatacagttcttggctggtggcaaaatttacccgaggaagagaagcaaattgtgattaagtatctaccggaagccaagaatactaacatctcatggacaatgattactgctgccctttcttctgttgcaaggacttccatggtaaccatgcaggatattctgggcctcgacagttctggtagaatgaacactccagctacccagaaaggaaactggagatggaggataccaagctctgttggcttcgacagccttagccctgaagcagcaaagctgaaggatttgcttgcgctgtacaatcgtctgtgaaggccgtgacattatgttctacggtcagaagctcctttcataaaatggcagccaaatgtggggctgctaagttctatgcgactaatacctgtccccgaataagcgtttcgtgttctggttggccggaagcttgcgtgcttgtacatgaaggtcttgctttgcaagttaaggcttgatgaatatgaagcactgtatgtgtattcacaatttaattaggcatttctttcttgaggttcc

SEQ ID NO: 2437 - protein, 582 aa, Panicum virgatum
  misc_feature (90)..(579): Pfam Name: Glyco_hydro_77 Pfam Description: 4-alpha-glucanotransferase
  misc_feature: Ceres Clone ID no. 1815770
  misc_feature: Bit score of 1388.0 for HMM based on sequences of Figure 39
  misc_feature: Functional Homolog Of SEQ ID NO. 2437
  misc_feature: in Figure 39
MVLARVLTLPLPAPSSTPNRRFLLPPRAARVALAPVRADACRAASAMAAVPALDPAAAAAVGVGEELPEGYDQMMPTVEPARRRRAGLLLHPTSLRGPHGIGDLGDEALAFLHWLRDAGCTLWQVLPLVPPGRTSGEDGSPYSGQDANCGNTLLISLEELVKDGLLMEDELPSPVDVEHVEFDTVANLKEPLIAKAAERLLLGQGDLRTQYDCFKKNPNISGWLEDAALFAAIDKSIGAFSWYEWPEPLKNRHLGALEDIYQKQKDFIETFMAQQFLFQRQWQRIRKYAQKLGISIMGDMPIYVGYHSADVWANRKSFLLDKNGFPTFVSGVPPDAFSETGQLWNSPLYDWKAMEADGFSWWIKRIKRALDLYDEFRIDHFRGLAGFWAVPSDAKVALVGSWRAGPRNAFFDALFKAVGSINIIAEDLGVITEDVVQLRKSIGAPGMAVLQFAFGGGSDNPHLLHNHEMDQVVYTGTHDNDTVLGWWQNLPEEEKQIVIKYLPEAKNTNISWTMITAALSSVARTSMVTMQDILGLDSSGRMNTPATQKGNWRWRIPSSVGFDSLSPEAAKLKDLLALYNRL

SEQ ID NO: 2438 - DNA, 1797 bp, Sorghum bicolor
  misc_feature: Ceres Annot ID no. 8656832
  misc_feature: Encodes the peptide sequence at SEQ ID NO. 2439
atggttctcgcgcgagtcctcacgctcccgctgcccgccccgtcgtccgcgccccaccgccgcttactcctgccgcctcaggcgtcgccggcgcctgcgcgtgtgcgcaccgtgcgggccgccgcctgccgtgcagcgaacgccatggcggcggtttctgtggacccgcccccggtcgctccgagccccgcagaggtcgcggccgtgggcgtcggggatgagctgccggaggggtacgatcagatgatgcccaccgtggagccgtcgcggcggcggcgcgcgggggtgctgctgcatccgacgtcgttgcggggaccgcacggcatcggcgacctcggggacgaggcgcttgccttcctgcattggctccgcgacgccggctgcacgctctggcaggttctaccacttgtccctccaggtaggacggctggggaggagggatctccttattctggacaggatgccaactgtggcaatacccttttgctatctcttgaggagcttgtaaaagatggtctattgatgtcagatgaacttcctgatcctgtggatacagagtatgttgaatttgacactgttgcaaatctgaaagaaccacttattgcaaaggcagcagagaggctcctactaagccatggagagctcagaacgcaatatgactgcttcaagaaaaatccaaatatatcaggttggcttgaagatgcagctctttttgctgctattgacaaaagcattggtgcattctcttggtacgagtggcctgaacctctgaaaaatcgccatcttggagccttggaagatatatatcaaaaacagaaggactttatagagacatttatggctcagcagttcttatttcaaaggcaatggcagcgggttcgtaaatatgcacaaaagctgggtatcagcatcatgggtgacatgcctatatatgttggctaccatagtgcagatgtttgggcgaacaggaaatcatttttgctggacaagaatggtttccccactttcgttagtggtgttccacctgatgcatttagcgaaacgggtcaactatggaacagtccattgtacgactggaaagctatggaagcagatggcttttcatggtggacaaagaggattaaacgtgcccttgatttgtatgatgagttccgtattgaccatttccggggtcttgcaggtttttgggcagtcccttctgatgcaaaagtagcactggttggaagctggagggtgagcattgaattgatgaacatggctggaccaaggaatagcttttttgacgcgctcttcaaagctgttggtagaataaatataatagcagaagacctgggggtaattactgaagatgttgttcagctaaggaaatccattggggcccctgggatggcagttctccagtttgcttttggaggtggttctgacaaccctcacttgccccataaccatgaaatggatcaagttgtgtacactggaacacatgataacgatacagttcttggctggtggcaaaatttgccagaggaagagaagaaaattgtgatcaagtatctaccagaagccgagaatactgacatatcatggacactgattacggctgccctctcttctgttgcgaggacttccatggtaaccatgcaggacattcttggcctcgacagttctgctcgaatgaatacgccagctacccagaaaggaaattggaggaggaggatgccaggctcagttggcttcgacagtctcagccctgaagcggcaaagctgaaggagctgcttgcgctgtacaatcggcagtga

SEQ ID NO: 2439 - protein, 598 aa, Sorghum bicolor
  misc_feature (98)..(595): Pfam Name: Glyco_hydro_77 Pfam Description: 4-alpha-glucanotransferase
  misc_feature: Ceres Annot ID no. 8656832
  misc_feature: Bit score of 1377.8 for HMM based on sequences of Figure 39
  misc_feature: Functional Homolog Of SEQ ID NO. 2437
  misc_feature: in Figure 39
MVLARVLTLPLPAPSSAPHRRLLLPPQASPAPARVRTVRAAACRAANAMAAVSVDPPPVAPSPAEVAAVGVGDELPEGYDQMMPTVEPSRRRRAGVLLHPTSLRGPHGIGDLGDEALAFLHWLRDAGCTLWQVLPLVPPGRTAGEEGSPYSGQDANCGNTLLLSLEELVKDGLLMSDELPDPVDTEYVEFDTVANLKEPLIAKAAERLLLSHGELRTQYDCFKKNPNISGWLEDAALFAAIDKSIGAFSWYEWPEPLKNRHLGALEDIYQKQKDFIETFMAQQFLFQRQWQRVRKYAQKLGISIMGDMPIYVGYHSADVWANRKSFLLDKNGFPTFVSGVPPDAFSETGQLWNSPLYDWKAMEADGFSWWTKRIKRALDLYDEFRIDHFRGLAGFWAVPSDAKVALVGSWRVSIELMNMAGPRNSFFDALFKAVGRINIIAEDLGVITEDVVQLRKSIGAPGMAVLQFAFGGGSDNPHLPHNHEMDQVVYTGTHDNDTVLGWWQNLPEEEKKIVIKYLPEAENTDISWTLITAALSSVARTSMVTMQDILGLDSSARMNTPATQKGNWRRRMPGSVGFDSLSPEAAKLKELLALYNRQ

SEQ ID NO: 2440 - protein, 586 aa, Oryza sativa subsp. japonica
  misc_feature (102)..(583): Pfam Name: Glyco_hydro_77 Pfam Description: 4-alpha-glucanotransferase
  misc_feature: Public GI ID no. 22093785
  misc_feature: Bit score of 1347.9 for HMM based on sequences of Figure 39
  misc_feature: Functional Homolog Of SEQ ID NO. 2437
  misc_feature: in Figure 39
MATLSLPLPHLTQAIPARARPRPRPLRGIPARLLSCRAAMAVAPDKEEAAAVALDKAVKVAVAAPDRAAVAAVGVGEELPEGYDQMMPAVEEARRRRAGVLLHPTSLRGPHGIGDLGDEAVAFLAWLRDAGCTLWQVLPLVPPGRKSGEDGSPYSGQDANCGNTLLISLEELVKDGLLMENELPDPLDMEYVEFDTVANLKEPLIAKSSILLNENSRYNIVSKKLGWLEDAALFAAIDRSIDALSWYEWPEPLKNRHLRALEDIYQKQKDFIEIFMAQQFLFQRQWQRIRKYAKKLGISIMGDMPIYVGYHSADVWANRKSFLLDKNGFPTFVSGVPPDAFSETGQLWNSPLYDWKAMEAGGFEWWIKRINRALDLYDEFRIDHFRGLAGFWAVPSESKVALVGSWRAGPRNAFFDALFKAVGRINIIAEDLGVITEDVVDLRKSIEAPGMAVLQFAFGGGSDNPHLPHNHEFDQVVYTGTHDNDTVIGWWQTLPEEEKQTVFKYLPEANRTEISWALITAALSSVARTSMVTMQDILGLDSSARMNTPATQKGNWRWRMPSSVSFDSLSPEAAKLKELLGLYNRL

SEQ ID NO: 2441 - protein, 578 aa, Aegilops tauschii
  misc_feature (86)..(575): Pfam Name: Glyco_hydro_77 Pfam Description: 4-alpha-glucanotransferase
  misc_feature: Public GI ID no. 71084353
  misc_feature: Bit score of 1378.0 for HMM based on sequences of Figure 39
  misc_feature: Functional Homolog Of SEQ ID NO. 2437
  misc_feature: in Figure 39
MALARTVPLPQLASASSLPRHRRCRLLLPAMSQARGPPARGIACRAATTTPAAVAAVGVGEDLPEGYEQMMPTVEASQRRRAGVLLHPTSLRGPHGIGDLGDQAIAFLDWLHGAGCTLWQVLPLVPPGRKSGEDGSPYSGQDANCGNTLLISLEELVKDGLLMEDELPDPLDMEYVEFDTVANLKEPLIAKAAERLLQSPGELRRQYDEFKKNPDVSGWLEDAALFAAIDNSINAVSWSEWPEPLKDRHPGALKDIYENQKDFIENFMAQQFLFEKQWKRVRSHAQKLGISIMGDMPIYVGYHSADVWANRKSFLLDKNGFPTFVSGVPPDAFSKTGQLWNSPLYDWKSMEADGFAWWVKRIKRALDLYDEFRIDHFRGLAGFWAVPSGSEVAMFGSWRAGPRNAFFDALFKAVGRINIIAEDLGVITEDVVELRKSIGAPGMAVLQFAFGGGPGNPHLPHNHELNQVVYTGTHDNDTAVGWWQSLPEEEKQTVFKYLPQVSNLDVSWALIATALSSVARTSMVTMQDILSLGSSARMNTPATQKGNWKWRIPSCVSFDSLSLEEAKLKELLTLYDRL

SEQ ID NO: 2442 - protein, 574 aa, Triticum aestivum
  misc_feature (82)..(571): Pfam Name: Glyco_hydro_77 Pfam Description: 4-alpha-glucanotransferase
  misc_feature: Public GI ID no. 71084351
  misc_feature: Bit score of 1373.2 for HMM based on sequences of Figure 39
  misc_feature: Functional Homolog Of SEQ ID NO. 2437
  misc_feature: in Figure 39
MALARTVPLPQLASASPLRGHRRCRLLLLPAMPQARGVACRAATTTPAAVASVGVGEDLPEGYEQMMPTVEASQRRRAGVLLHPTSLRGPHGIGDLGDEALAFLDWLHGAGCTLWQVLPLVPPGRKSGEDGSPYSGQDANCGSTLLISLEELVKDGLLMEDELPDPLDMEYVEFDTVANLKEPLIAKAAERLLQSPGELRRQYDEFKKNPDVSGWLEDAALFAAIDNSINAVSWSEWPDPLKDRHPGALKDIYENQKDFIENFMAQQFLFEKQWKRVRSHAQKLGISIMGDMPIYVGYHSADVWANRKSFLLDNNGFPTFVSGVPPDAFSKTGQLWNSPLYDWKSMEADGFAWWVKRIKRALDLYDEFRIDHFRGLAGFWAVPSGSEVAMFGSWRAGPRNAFFDALFKAVGRINIIAEDLGVITEDVVELRKSIGAPGMAVLQFAFGGGPGNPHLPHNHELNQVVYTGTHDNDTAVGWWQSLPEEEKQTVFKYLQQVSNSDVSWALIATALSSVARTSMVTMQDILSLGSSARMNTPATQKGNWKWRIPSCVSFDSLSLEEAKLKELLTLYGRL

SEQ ID NO: 2443 - protein, 585 aa, Vitis vinifera
  misc_feature (93)..(582): Pfam Name: Glyco_hydro_77 Pfam Description: 4-alpha-glucanotransferase
  misc_feature: Public GI ID no. 157345040
  misc_feature: Bit score of 1384.9 for HMM based on sequences of Figure 39
  misc_feature: Functional Homolog Of SEQ ID NO. 2437
  misc_feature: in Figure 39
MAMSMSMAMLSSHSLKASPLQNLSSKLFNVSSAVFASSRIKFQAKAPMNFNCLLKNDAVYEDLPAVGEDLPPDYEEWTPKKDPKDRRRAGILLHPTSFRGPHGIGDLGEETFCFLDWLHEAGCSVWQVLPLVPPGRKGNEDGSPYAGQDANCGNTLLISLEELVKDGLLMKEELPKPVDADRVDFSTVADIKDPLIAKAAERLILSEGELKNHFEDFRRDPEISNWLEDSAYFAAIDETLNTISWYDWPEPLKNRHLSALEEIYQSKRDFINIFIAQQFLFQRQWQKVRNYAQMKGIKIMGDMPIYVGYHSADVWANKKHFLLNKSGFPLLVSGVPPDAFSETGQLWGSPLYDWKAMERDRFSWWIRRIRRAQNIYDEFRIDHFRGFAGYWAVPSEAKFAMDGQWKMGPGKSLFDAIFRAVGKINIVAEDLGVITEDVIQLRKYIRAPGMAVLQFGFGSDADNPHLPHNHEQNEVVYTGTHDNDTTRGWWDILEQEEKSNVLKYVTVTGEDDISWALIQAALSSVAQTAIIPMQDVLGLGNSARMNIPATQSGNWGWRLPSSMSFDDLESEAKKLRDLLSIYGRL

SEQ ID NO: 2444 - DNA, 1731 bp, Arabidopsis thaliana
  misc_feature: Ceres Annot ID no. 575801
  misc_feature: Encodes the peptide sequence at SEQ ID NO. 2445
atgtcgattctacttaggccgtcgtcctctccttcactctgttcttctctcaagcttttccgattatcctctccggattctttaatcgacgcagctgtcctcaggaacaggacaaagccgtcgcagtcgtttcgaatggaggtcgtttcgagtaattccacgtgtctttctagtattagcgtcggtgaagattttccatcagaatatgagcagtggctaccggttccggatccagagagcaggagaagagctggcgttttgctacacccgacgtcgtttcgtggtcctcatggcattggtgatctcggagaagaagccttccggttcatcgattggcttcattctactggttgctccgtttggcaggttcttcctcttgttcctccagacgaaggaggatctccttatgcaggacaggatgcaaattgtgggaacacattgttgatttctctagatgagcttgtgaaagacggcttgttaatcaaggatgagctcccacaaccaattgatgctgactctgtgaactatcagactgccaacaagttaaagagtcccttgattacgaaggcagcaaagaggcttattgatggcaatggtgaactgaagagcaaactgctagatttccgtaacgacccctctatatcatgttggcttgaagatgctgcttattttgcagctattgacaatactttaaatgcatacagttggtttgagtggcctgaaccacttaaaaaccgtcatctttctgccttggaagctatatatgaaagccaaaaggagtttatagacttgttcattgctaagcaatttttgttccaaaggcagtggcagaaagttcgtgagtatgcacggcggcaaggagttgatataatgggagatatgcccatttatgtaggatatcacagtgcagacgtttgggcaaataagaaacatttcttactgaacaagaaaggctttcctcttcttgttagcggtgttcctcctgacttgttcagtgaaactggtcaactgtggggcagccctctttatgactggaaagcaatggagagtgaccaatattcttggtgggttaatcgaataagacgcgcacaggacttgtatgacgaatgcaggattgatcacttcagaggatttgcagggttttgggcggtcccttctgaagcgaaagttgccatggttggacgatggaaggtaggacctggaaagtcattatttgatgccatttccaaaggcgttgggaagatcaaaatcatagctgaagatttgggagttattactaaagatgtagttgagctgaggaaatctatcggagcacctggaatggccgtcctccaatttgcttttggaggaggcgccgataacccacatttacctcacaatcatgaagtaaaccaagttgtatactctggaactcatgacaacgacactattcgaggctggtgggacactctggaccaagaagaaaagtctaaggcaatgaaatacctgtcgatagctggagaagacgatatatcatggtcagtcatccaagctgcattctcttcaaccgctcaaaccgcaatcataccgatgcaagacattctaggacttggaagttctgccaggatgaacactccagccactgaggtggggaattggggttggaggattccaagttcaacgagctttgataatcttgaaactgaatctgacagactcagagatcttttgtcattgtacggacggctttga

SEQ ID NO: 2445 - protein, 576 aa, Arabidopsis thaliana
  misc_feature (88)..(573): Pfam Name: Glyco_hydro_77 Pfam Description: 4-alpha-glucanotransferase
  misc_feature: Ceres Annot ID no. 575801
  misc_feature: Bit score of 1361.1 for HMM based on sequences of Figure 39
  misc_feature: Functional Homolog Of SEQ ID NO. 2437
  misc_feature: in Figure 39
MSILLRPSSSPSLCSSLKLFRLSSPDSLIDAAVLRNRTKPSQSFRMEVVSSNSTCLSSISVGEDFPSEYEQWLPVPDPESRRRAGVLLHPTSFRGPHGIGDLGEEAFRFIDWLHSTGCSVWQVLPLVPPDEGGSPYAGQDANCGNTLLISLDELVKDGLLIKDELPQPIDADSVNYQTANKLKSPLITKAAKRLIDGNGELKSKLLDFRNDPSISCWLEDAAYFAAIDNTLNAYSWFEWPEPLKNRHLSALEAIYESQKEFIDLFIAKQFLFQRQWQKVREYARRQGVDIMGDMPIYVGYHSADVWANKKHFLLNKKGFPLLVSGVPPDLFSETGQLWGSPLYDWKAMESDQYSWWVNRIRRAQDLYDECRIDHFRGFAGFWAVPSEAKVAMVGRWKVGPGKSLFDAISKGVGKIKIIAEDLGVITKDVVELRKSIGAPGMAVLQFAFGGGADNPHLPHNHEVNQVVYSGTHDNDTIRGWWDTLDQEEKSKAMKYLSIAGEDDISWSVIQAAFSSTAQTAIIPMQDILGLGSSARMNTPATEVGNWGWRIPSSTSFDNLETESDRLRDLLSLYGRL

SEQ ID NO: 2446 - protein, 576 aa, Solanum tuberosum
  misc_feature (84)..(573): Pfam Name: Glyco_hydro_77 Pfam Description: 4-alpha-glucanotransferase
  misc_feature: Public GI ID no. 544184
  misc_feature: Bit score of 1383.9 for HMM based on sequences of Figure 39
  misc_feature: Functional Homolog Of SEQ ID NO. 2437
  misc_feature: in Figure 39
MAIHTCFSLIPSSFSSPKLPYPKNTTFQSPIPKLSRPTFMFDRKGSFQNGTAAVPAVGEDFPIDYADWLPKRDPNDRRRAGILLHPTSFPGPYGIGDLGPQAFKFLDWLHLAGCSLWQVLPLVPPGKRGNEDGSPYSGQDANCGNTLLISLEELVDDGLLKMEELPEPLPTDRVNYSTISEIKDPLITKAAKRLLSSEGELKDQLENFRRDPNISSWLEDAAYFAAIDNSVNTISWYDWPEPLKNRHLAALEEVYQSEKDFIDIFIAQQFLFQRQWKKVRDYARSKGISIMGDMPIYVGYHSADVWANKKQFLLNRKGFPLIVSGVPPDAFSETGQLWGSPLYDWKAMEKDGFSWWVRRIQRATDLFDEFRIDHFRGFAGFWAVPSEEKIAILGRWKVGPGKPLFDAILQAVGKINIIAEDLGVITEDVVQLRKSIEAPGMAVLQFAFGSDAENPHLPHNHEQNQVVYTGTHDNDTIRGWWDTLPQEEKSNVLKYLSNIEEEEISRGLIEGAVSSVARIAIIPMQDVLGLGSDSRMNIPATQFGNWSWRIPSSTSFDNLDAEAKKLRDILATYGRL

SEQ ID NO: 2447 - DNA, 1689 bp, Populus balsamifera subsp. trichocarpa
  misc_feature: Ceres Annot ID no. 1509727
  misc_feature: Encodes the peptide sequence at SEQ ID NO. 2448
atggcagtcctcaactcactctcacttcttttctctccaaaactcactcactcttcttcaattcctttccctctcttgacctcccaatccaaccctctatctttcaatctcacttccaaatccgtcgccctatccgccactccttctcacttttcagtcgcggttggcgaggacttgcctgtagattacggcgagtggtttcctaaacgtgatcctggtgatcgcaggagagctggcattttgcttcacccgacctcgtttagaggaccctacggtattggagaccttggtgacgaggcctttcggtttatcgattggcttcatgatgctggttgctctgtttggcaggttttacctcttgttccaccgggaaggaaggcgaatgaagaaggatcaccttactccggccaggatgcaaattgtggtaacacgcttttgatttcacttgaagatcttgtgaaagatggattattgacagaagatgagcttcctagaccaacagatgctgatcatgtggacttctctgttgttgctgacttaaaggatccgttgataactaaggaagttctagttttaaatttgatggaaaaggagcaagaattaggttggcttgaagatgcagcttattttgctgctattgacgattccttaaatacacttaattggtatgagtggcctgaacctttaaaaaatcgccatcttgcagccttggaggaagtataccagagtaaaaaggattttatagacatattcattgcacaacagttcttgttccaaaggcaatggaagaaagttcgcagctatgcacgggagaagggaattagtataatgggtgacatgcctatatatgtagggtatcacagcgctgatgtttgggcaaataagaaacattttttactgaacaggaatggttttcctcttctagttagtggtgtcccccctgatgccttcagtgaaactggacagttgtgggacagtcctttatatgactggaaagccatggagaaagatggatattcatggtggatacgtcgcatgaggcgggctcaagatctgtttgaagaattcagaatagatcattttagaggttttgcaggcttttgggctgttccttcagaagcaaaagttgcaatggtcggaaactggaaggcaggacctggaaaatccctatttgatgcaatctctagagctgttgggaagatcaatataatagcagaagatctgggaatcatcactgaagatgtagtgcaccttaggaaatccatcggtgctcctggaatggctgtccttcagtttggttttggaagtgatgcagctaaccctcatttgcctcataatcacgagcccaatcaagttgtgtacactggaactcatgataatgacacgattcgaggttggtgggatgttttgaaacaagaagagaaatcaaatgtccagaagtatcttttgattcatgaagaaaatgatatcccatgggaactcattcaagctgccctttcatcagtggcccaaactgcagtcatacctatgcaagatattcttggattggggaattctgccagaatgaatattccggctactcagtttggaaactggaggtggaggatacctagttccatgagctttgatcacttggaggatgaagcaacacgactcaaggatatactctcaacatatgggcggttgtag

SEQ ID NO: 2448 - protein, 562 aa, Populus balsamifera subsp. trichocarpa
  misc_feature (82)..(559): Pfam Name: Glyco_hydro_77 Pfam Description: 4-alpha-glucanotransferase
  misc_feature: Ceres Annot ID no. 1509727
  misc_feature: Bit score of 1351.9 for HMM based on sequences of Figure 39
  misc_feature: Functional Homolog Of SEQ ID NO. 2437
  misc_feature: in Figure 39
MAVLNSLSLLFSPKLTHSSSIPFPLLTSQSNPLSFNLTSKSVALSATPSHFSVAVGEDLPVDYGEWFPKRDPGDRRRAGILLHPTSFRGPYGIGDLGDEAFRFIDWLHDAGCSVWQVLPLVPPGRKANEEGSPYSGQDANCGNTLLISLEDLVKDGLLTEDELPRPTDADHVDFSVVADLKDPLITKEVLVLNLMEKEQELGWLEDAAYFAAIDDSLNTLNWYEWPEPLKNRHLAALEEVYQSKKDFIDIFIAQQFLFQRQWKKVRSYAREKGISIMGDMPIYVGYHSADVWANKKHFLLNRNGFPLLVSGVPPDAFSETGQLWDSPLYDWKAMEKDGYSWWIRRMRRAQDLFEEFRIDHFRGFAGFWAVPSEAKVAMVGNWKAGPGKSLFDAISRAVGKINIIAEDLGIITEDVVHLRKSIGAPGMAVLQFGFGSDAANPHLPHNHEPNQVVYTGTHDNDTIRGWWDVLKQEEKSNVQKYLLIHEENDIPWELIQAALSSVAQTAVIPMQDILGLGNSARMNIPATQFGNWRWRIPSSMSFDHLEDEATRLKDILSTYGRL

SEQ ID NO: 2449 - protein, 601 aa, Oryza sativa subsp. japonica
  misc_feature (102)..(598): Pfam Name: Glyco_hydro_77 Pfam Description: 4-alpha-glucanotransferase
  misc_feature: Public GI ID no. 115473487
  misc_feature: Bit score of 1284.4 for HMM based on sequences of Figure 39
  misc_feature: Functional Homolog Of SEQ ID NO. 2437
MATLSLPLPHLTQAIPARARPRPRPLRGIPARLLSCRAAMAVAPDKEEAAAVALDKAVKVAVAAPDRAAVAAVGVGEELPEGYDQMMPAVEEARRRRAGVLLHPTSLRGPHGIGDLGDEAVAFLAWLRDAGCTLWQVLPLVPPGRKSGEDGSPYSGQVKLYPANLAYCVAIIEWNLYGYTLQDANCGNTLLISLEELVKDGLLMENELPDPLDMEYVEFDTVANLKEPLIAKCLSRSFLPGWLEDAALFAAIDRSIDALSWYEWPEPLKNRHLRALEDIYQKQKDFIEIFMAQQFLFQRQWQRIRKYAKKLGISIMGDMPIYVGYHSADVWANRKSFLLDKNGFPTFVSGVPPDAFSETGQLWNSPLYDWKAMEAGGFEWWIKRINRALDLYDEFRIDHFRGLAGFWAVPSESKVALVGSWRAGPRNAFFDALFKAVGRINIIAEDLGVITEDVVDLRKSIEAPGMAVLQFAFGGGSDNPHLPHNHEFDQVVYTGTHDNDTVIGWWQTLPEEEKQTVFKYLPEANRTEISWALITAALSSVARTSMVTMQDILGLDSSARMNTPATQKGNWRWRMPSSVSFDSLSPEAAKLKELLGLYNRL

SEQ ID NO: 2450 - DNA, 1967 bp, Panicum virgatum
  misc_feature: Ceres Clone ID no. 1858312
  misc_feature: Encodes the peptide sequence at SEQ ID NO. 2451
ctccaccccgcgcgcctgtccccttggtcgcaaatggttctcgcgcgagtcctcacgctccctctgcccgccccgtcgtccccgccccaccgtcgcttcctcctcccgcctcgggcggcgcgtgtggcacccgttcgggccgccgcctgccgcgcggcgagcgcgatggcggcggtgccggctctggaccccgccgcggccgcggccgtgggcgtcggcgaggagctgccggaggggtacgatcagatgatgcccaccgtggagccggcgcggcggcggcgcgcgggggtgttgctgcacccgacgtcgctccggggcccgcacggcatcggcgacctcggcgacgaggcgctcgccttcctccactggctacgcgacgccggctgcacgctctggcaggttctgccacttgttcctccagggagaacatctggagaggatggatctccttattctggacaggatgccaactgtggtaatacccttttgatatctcttgaagagcttgtaaaagatggccttttgatggaagatgaacttcctagccccgtggatgtggagcatgttgaatttgctaccgttgcaaatctgaaagaacctcttattgcaaaggcagcagagaggctcttacttggccaaggagagctcagaacgcaatatgactgcttcaagaaaaatccgaatatatcaggttggcttgaagatgcagcactttttgctgctattgacaaaagcattggtgcattctcttggtacgagtggcctgaacctctgaaaaatcgccatcttggagccttggaagatatatatcaaaaacagaaggacttcatagagacatttatggctcagcaattcttatttcaaaggcagtggcagcggattcgtaaatatgcacagaagttgggtatcagcataatgggtgacatgcctatatatgttggctaccatagcgcagatgtatgggcaaacaggaaatcatttatgctggacaagaatggtttccccacttttgttagtggtgttccacctgatgcatttagcgaaactggtcagctatggaacagtccgttgtacgactggaaagctatggaagcagatggcttttcatggtggataaagaggattaaacgagcccttgatttgtatgacgagttccgtattgaccatttccgggggcttgtgggtttttgggcagtcccatctggtaagctgaatacatcagggcactacctccctgcatattaaatatttgtactgcaggtgaatttgttttatgggaacatctttccttcatctaacttagcattcgtgcataatgtagacgcaaaagtagcactagttggaagctggagggtgagcatcggcttgatggacgtggtattgcaattttcctttccagaaaatctttgctgctgatatgtgttttcctgctttctttggcagtaggctggaccgaggaacgccttttttgatgcgctcttcaaagctgttggtagcataaatataatagcagaagacctgggcgtgattactgaagatgtggttcagctaaggaaatcaattggggcccctgggatggcagttctccagtttgcttttggaggtggttctgacaaccctcacttgctgcataaccatgaaatggaccaagttgtgtacactggaacacacgataacgatacagttcttggctggtggcaaaatttacctgaggaagagaagcaaattgtgattaagtatctaccggaagccaagaatactgacatctcatggacactgattaccgctgccctttcttctgttgcaaggacttccatggtaaccatgcaggatattcttggcctcgacagttctggtagaatgaacactccagctacccagaaaggaaactggagatggaggataccgagctccgttggcttcgacagcctttgccctgaagcagcaaagctgaaggagttgctttc

SEQ ID NO: 2451 - protein, 414 aa, Panicum virgatum
  misc_feature (99)..(414): Pfam Name: Glyco_hydro_77 Pfam Description: 4-alpha-glucanotransferase
  misc_feature: Ceres Clone ID no. 1858312
  misc_feature: Bit score of 655.5 for HMM based on sequences of Figure 39
  misc_feature: Functional Homolog Of SEQ ID NO. 2437
LHPARLSPWSQMVLARVLTLPLPAPSSPPHRRFLLPPRAARVAPVRAAACRAASAMAAVPALDPAAAAAVGVGEELPEGYDQMMPTVEPARRRRAGVLLHPTSLRGPHGIGDLGDEALAFLHWLRDAGCTLWQVLPLVPPGRTSGEDGSPYSGQDANCGNTLLISLEELVKDGLLMEDELPSPVDVEHVEFATVANLKEPLIAKAAERLLLGQGELRTQYDCFKKNPNISGWLEDAALFAAIDKSIGAFSWYEWPEPLKNRHLGALEDIYQKQKDFIETFMAQQFLFQRQWQRIRKYAQKLGISIMGDMPIYVGYHSADVWANRKSFMLDKNGFPTFVSGVPPDAFSETGQLWNSPLYDWKAMEADGFSWWIKRIKRALDLYDEFRIDHFRGLVGFWAVPSGKLNTSGHYLPAY

SEQ ID NO: 2452 - protein, 524 aa, Solanum tuberosum
  misc_feature (32)..(521): Pfam Name: Glyco_hydro_77 Pfam Description: 4-alpha-glucanotransferase
  misc_feature: Public GI ID no. 99031627
  misc_feature: Bit score of 1304.9 for HMM based on sequences of Figure 39
  misc_feature: Functional Homolog Of SEQ ID NO. 2437
AVPAVGEDFPIDYADWLPKRDPNDRRRAGILLHPTSFPGPYGIGDLGPQAFKFLDWLHLAGCSLWQVLPLVPPGKRGNEDGSPYSGQDANCGNTLLISLEELVDDGLLKMEELPEPLPTDRVNYSTISEIKDPLITKAAKRLLSSEGELKDQLENFRRDPNISSWLEDAAYFAAIDNSVNTISWYDWPEPLKNRHLAALEEVYQSEKDFIDIFIAQQFLFQRQWKKVRDYARSKGISIMGDMPIYVGYHSADVWANKKQFLLNRKGFPLIVSGVPPDAFSETGQLWGSPLYDWKAMEKDGFSWWVRRIQRATDLFDEFRIDHFRGFAGFWAVPSEEKIAILGRWKVGPGKPLFDAILQAVGKINIIAEDLGVITEDVVQLRKSIEAPGMAVLQFAFGSDAENPHLPHNHEQNQVVYTGTHDNDTIRGWWDTLPQEEKSNVLKYLSNIEEEEISRGLIEGAVSSVARIAIIPMQDVLGLGSDSRMNIPATQFGNWSWRIPSSTSFDNLDAEAKKLRDILATYGRL

SEQ ID NO: 2453 - DNA, 1990 bp, Arabidopsis thaliana
  misc_feature: Ceres Clone ID no. 1190476
  misc_feature: Encodes the peptide sequence at SEQ ID NO. 2454
gattttgtcatctggtggattagagtggagtggagctttgaattggatgatcattatccatgtcgattctacttaggccgtcgtcctctccttcactctgttcttctctcaagcttttccgattatcctctccggattctttaatcgacgcagctgtcctcaggaacaggacaaagccgtcgcagtcgtttcgaatggaggtcgtttcgagtaattccacgtgtctttctagtattagcgtcggtgaagattttccagcagaatatgagcagtggctaccggttccggatccagagagcgggagaagagctggcgttttgctacacccgacgtcgtttcgtggtcctcatggcattggtgatctcggagaagaagccttccggttcatcgattggcttcattctactggttgctccgtttggcaggttcttcctcttgttcctccagacgaaggaggatctccttatgcaggacaggatgcaaattgtgggaacacattgttgatttctctagatgagcttgtgaaagacggcttgttaatcaaggatgagctcccacaaccaattgatgctgactctgtgaactatcagactgccaacaagttaaagagtcccttgattacgaaggcagcaaagaggcttattgatggcaatggtgaactgaagagcaaactgctagatttccgtaacgacccctctatatcatgttggcttgaagatgctgcttattttgcagctattgacaatactttaaatgcatacagttggtttgagtggcctgaaccacttaaaaaccgtcatctttctgccttggaagctatatatgaaagccaaaaggagtttatagacttgttcattgctaagcaatttttgttccaaaggcagtggcagaaagttcgtgagtatgcacggcggcaaggagttgatataatgggagatatgcccatttatgtaggatatcacagtgcagacgtttgggcaaataagaaacatttcttactgaacaagaaaggctttcctcttcttgttagcggtgttcctcctgacttgttcagtgaaactggtcaactgtggggcagccctctttatgactggaaagcaatggagagtgaccaatattcttggtgggttaatcgaataagacgcgcacaggacttgtatgacgaatgcaggattgatcacttcagaggatttgcagggttttgggcggtcccttctgaagcgaaagttgccatggttggacgatggaaggtaggacctggaaagtcattatttgatgccatttccaaaggcgttgggaagatcaaaatcatagctgaagatttgggagttattactaaagatgtagttgagctgaggaaatctatcggagcacctggaatggccgtcctccaatttgcttttggaggaggcgccgataacccacatttacctcacaatcatgaagtaaaccaagttgtatactctggaactcatgacaacgacactattcgaggctggtgggacactctggaccaagaagaaaagtctaaggcaatgaaatacctgtcgatagctggagaagacgatatatcatggtcagtcatccaagctgcattctcttcaaccgctcaaaccgcaatcataccgatgcaagacattctaggacttggaagttctgccaggatgaacactccagccactgaggtggggaattggggttggaggattccaagttcaacgagctttgataatcttgaaactgaatctgacagactcagagatcttttgtcattgtacggacggctttgaggaaaacatttgacgtggaaaagaagaagaatctttggttttcttatcttttttgtaactttgctaatggtaaaagcaataaagtaagcagaagacgaacgaagcatgttgttgaaatagtggatcgatgttgatatgggccatatatgatgatggcatgttcaatctcactgttacttaataaattttcttcattgatg

SEQ ID NO: 2454 - protein, 576 aa, Arabidopsis thaliana
  misc_feature (88)..(573): Pfam Name: Glyco_hydro_77 Pfam Description: 4-alpha-glucanotransferase
  misc_feature: Ceres Clone ID no. 1190476
  misc_feature: Bit score of 1355.4 for HMM based on sequences of Figure 39
  misc_feature: Functional Homolog Of SEQ ID NO. 2437
MSILLRPSSSPSLCSSLKLFRLSSPDSLIDAAVLRNRTKPSQSFRMEVVSSNSTCLSSISVGEDFPAEYEQWLPVPDPESGRRAGVLLHPTSFRGPHGIGDLGEEAFRFIDWLHSTGCSVWQVLPLVPPDEGGSPYAGQDANCGNTLLISLDELVKDGLLIKDELPQPIDADSVNYQTANKLKSPLITKAAKRLIDGNGELKSKLLDFRNDPSISCWLEDAAYFAAIDNTLNAYSWFEWPEPLKNRHLSALEAIYESQKEFIDLFIAKQFLFQRQWQKVREYARRQGVDIMGDMPIYVGYHSADVWANKKHFLLNKKGFPLLVSGVPPDLFSETGQLWGSPLYDWKAMESDQYSWWVNRIRRAQDLYDECRIDHFRGFAGFWAVPSEAKVAMVGRWKVGPGKSLFDAISKGVGKIKIIAEDLGVITKDVVELRKSIGAPGMAVLQFAFGGGADNPHLPHNHEVNQVVYSGTHDNDTIRGWWDTLDQEEKSKAMKYLSIAGEDDISWSVIQAAFSSTAQTAIIPMQDILGLGSSARMNTPATEVGNWGWRIPSSTSFDNLETESDRLRDLLSLYGRL

SEQ ID NO: 2455 - DNA, 1818 bp, Populus balsamifera subsp. trichocarpa
  misc_feature: Ceres Annot ID no. 1456535
  misc_feature: Encodes the peptide sequence at SEQ ID NO. 2456
atggcagtcctcaactcactctcacttcttttctctccaaaactcactcactcttcttcaattcctttccctctcttgacctcccaatccaaccctctatctttcaatctcacttccaaatccgtcgccctatccgccactccttctcacttttcagtcgcggttggcgaggacttgcctgtagattacggcgagtggtttcctaaacgtgatcctggtgatcgcaggagagctggcattttgcttcacccgacctcgtttagaggaccctacggtattggagaccttggtgacgaggcctttcggtttatcgattggcttcatgatgctggttgctctgtttggcaggttttacctcttgttccaccgggaaggaaggcgaatgaagaaggatcaccttactccggccaggatgcaaattgtggtaacacgcttttgatttcacttgaagatcttgtgaaagatggattattgacagaagatgagcttcctagaccaacagatgctgatcatgtggacttctctgttgttgctgacttaaaggatccgttgataactaaggaagttctagttttaaatttgatggaaaaggagcaagaattaggttggcttgaagatgcagcttattttgctgctattgacgattccttaaatacacttaattggtatgagtggcctgaacctttaaaaaatcgccatcttgcagccttggaggaagtataccagagtaaaaaggattttatagacatattcattgcacaacagttcttgttccaaaggcaatggaagaaagttcgcagctatgcacgggagaagggaattagtataatgggtgacatgcctatatatgtagggtatcacagcgctgatgtttgggcaaataagaaacattttttactgaacaggaatggttttcctcttctagttagtggtgtcccccctgatgccttcagtgaaactggacagttgtgggacagtcctttatatgactggaaagccatggagaaagatggatattcatggtggatacgtcgcatgaggcgggctcaagatctgtttgaagaattcagaatagatcattttagaggttttgcaggcttttgggctgttccttcagaagcaaaagttgcaatggtcggaaactggaaggcaggacctggaaaatccctatttgatgcaatctctagagctgttgggaagatcaatataatagcagaagatctgttctataccattaggacactgcatttcttgctgaagcaagattgtaggtttagatggattggtctttgctactgtcatcaactttttatgattttgggcattaaaaatgcaaggagttataatgttcacggaatcatcactgaagatgtagtgcaccttaggaaatccatcggtgctcctggaatggctgtccttcagtttggttttggaagtgatgcagctaaccctcatttgcctcataatcacgagcccaatcaagttgtgtacactggaactcatgataatgacacgattcgaggttggtgggatgttttgaaacaagaagagaaatcaaatgtccagaagtatcttttgattcatgaagaaaatgatatcccatgggaactcattcaagctgccctttcatcagtggcccaaactgcagtcatacctatgcaagatattcttggattggggaattctgccagaatgaatattccggctactcagtttggaaactggaggtggaggatacctagttccatgagctttgatcacttggaggatgaagcaacacgactcaaggatatactctcaacatatgggcggttgtag

SEQ ID NO: 2456 - protein, 605 aa, Populus balsamifera subsp. trichocarpa
  misc_feature (82)..(602): Pfam Name: Glyco_hydro_77 Pfam Description: 4-alpha-glucanotransferase
  misc_feature: Ceres Annot ID no. 1456535
  misc_feature: Bit score of 1293.2 for HMM based on sequences of Figure 39
  misc_feature: Functional Homolog Of SEQ ID NO. 2437
MAVLNSLSLLFSPKLTHSSSIPFPLLTSQSNPLSFNLTSKSVALSATPSHFSVAVGEDLPVDYGEWFPKRDPGDRRRAGILLHPTSFRGPYGIGDLGDEAFRFIDWLHDAGCSVWQVLPLVPPGRKANEEGSPYSGQDANCGNTLLISLEDLVKDGLLTEDELPRPTDADHVDFSVVADLKDPLITKEVLVLNLMEKEQELGWLEDAAYFAAIDDSLNTLNWYEWPEPLKNRHLAALEEVYQSKKDFIDIFIAQQFLFQRQWKKVRSYAREKGISIMGDMPIYVGYHSADVWANKKHFLLNRNGFPLLVSGVPPDAFSETGQLWDSPLYDWKAMEKDGYSWWIRRMRRAQDLFEEFRIDHFRGFAGFWAVPSEAKVAMVGNWKAGPGKSLFDAISRAVGKINIIAEDLFYTIRTLHFLLKQDCRFRWIGLCYCHQLFMILGIKNARSYNVHGIITEDVVHLRKSIGAPGMAVLQFGFGSDAANPHLPHNHEPNQVVYTGTHDNDTIRGWWDVLKQEEKSNVQKYLLIHEENDIPWELIQAALSSVAQTAVIPMQDILGLGNSARMNIPATQFGNWRWRIPSSMSFDHLEDEATRLKDILSTYGRL

SEQ ID NO: 2457 - protein, 666 aa, Physcomitrella patens subsp. patens
  misc_feature (119)..(609): Pfam Name: Glyco_hydro_77 Pfam Description: 4-alpha-glucanotransferase
  misc_feature: Public GI ID no. 168016526
  misc_feature: Bit score of 985.0 for HMM based on sequences of Figure 39
  misc_feature: Functional Homolog Of SEQ ID NO. 2437
MTTSVVCASRVYAVGTPSLKSSTWRWGERSLLPNKHNHALGSTSRVWVERVKRDYPRYFTASPAAVLSPERLDLSPKETDTNKLGSGTYDLKVGDDLPANYADDDPNRMKPERRCGVLLHPSSLPGPNGIGELGEETFAFLDWLASTGCTLWQVLPLVPPGRKGGEDGSPYAGVDANCGNTLLISLEELVKDGLLEEIDLPSPVPLGKVDFDAVARIKDPLIAKAARNLVSSRGAMREELDRFRTDLRISSWLEEAALFAAIDNVIDAKHWWDWPEDLRDRNAEALEAFRKEHHGFITQFVAEQFLFQRQWQAVHKHANALGIRIVGDMPIYVGGHSGDVWANREMFELDPSTGAPAMVSGVPPDAFSETGQLWGSPLYDWKAMAEDGYSWWANRMRRAFELYDEFRIDHFRGLAGYWAIDAAEDTAMHGKWQKGPGEEFFSAIRAAVGKVDIIAEDLGVITSDVVSLRKNINAPGMAVLQFAFGSDSMNPHLPHNHEVDQVVYSGTHDNDTVVGWWKKATTSEREHVLQYMGLKSDENIHWEFIKCALSSVALTTIIPMQDVLGLDDSARMNTPATQAGNWGWRIGEPGIFNELETEKRQLQLCLKLFNRYPRHLQEQERLKAEADAAKAEAPEAEADAAIAEVPEAEANANGSLSSLLESTPTA

SEQ ID NO: 2458 - protein, 592 aa, Physcomitrella patens subsp. patens
  misc_feature (36)..(527): Pfam Name: Glyco_hydro_77 Pfam Description: 4-alpha-glucanotransferase
  misc_feature: Public GI ID no. 168034311
  misc_feature: Bit score of 905.8 for HMM based on sequences of Figure 39
  misc_feature: Functional Homolog Of SEQ ID NO. 2437
MKKWKLGVGIGEDLPAKYQDDDPLKQAPRRRCGILLHPTSLPGPNGIGDFGKDTYRFLDWLKETGCTVWQVLPLVPPGTRGGEDGSPYAGSNANCGNTLLISLEELVKDGLLEKTDLPKPLPVKRMDSSKVAAIKNPLILKAAAKLVSKSSGKLKEELERFRKDPKISVWLEDAALFASIDQCTLAKTWWTWPTQLRDRDPNAMKTVRIKHKSDIDNFIAAQFLFHRQWQSVHKYANAAGIKILGDMPIYIGGHSADVWAHRALFELDPKTGVPMQVSGVPPDAFSATGQLWGSPLYNWKEMAKDRYAWWATRLRRAYELYDEFRIDHFRAFAGYWAIPATAQNAMGGKWKAGPGSAFFTAMREAVGKIDVIAEDLGIITGDVIALRKEIKAPGMAVLQFAFSDNAANPHLPHNHELDQVVYPGTHDNDTCVGWWKKASDAEKQVARAHLRFEGDADVHWEFIRGAVASVARTSIVSMQDVMGLDSASRMNIPATQAGNWGWRVGESDVFESLGEETSRLRELMCRYHRATLDAESTTSKGATRDKRSSLDALGRAIKNIIGDKLGNSGNNSNLECQGNNNGANLEKPKDKP

SEQ ID NO: 2459 - protein, 545 aa, Physcomitrella patens subsp. patens
  misc_feature (35)..(522): Pfam Name: Glyco_hydro_77 Pfam Description: 4-alpha-glucanotransferase
  misc_feature: Public GI ID no. 168001012
  misc_feature: Bit score of 917.0 for HMM based on sequences of Figure 39
  misc_feature: Functional Homolog Of SEQ ID NO. 2437
MAFSGLRGIGDELPPDYADHDPKDTRAQRRCGILLHPSSLPGEFGIGELGDEAFAFLDWLQSTGCTVWQVLPLGPPGRKGGEDGSPYAGADANCGNPLLLSLHELVKDGLLEISDLPAPLPFGKVDFEAVAKMKDPLIAKASINLVNSSDPLREDLDKFRTNPQISTWLETSALFAAIDDAIGAQYWWQWPEELRDRNTQALESAREKYHNFITQFIAVQFLFQRQWQAVHQYANSIGIRIIGDMPIYVGGHSADVWANRQMFELDPQTGAPAMVSGVPPDAFSETGQLWGSPLYNWKEMAKDRYSWWVKRMRRAFELFDEFRIDHFRGLGGYWAVDAASDTALNGKWLQGPGEDFFNAIRDAVGKLDIIAEDLGVLTPDVLALRKKIHAPGMAVLQFAFGGDADNSHLPHNHDVDLVIYTGTHDNDTVVGWWTKVGQAEGNHVRQYFKIESDKDVHWELIKGALSSVGLTAILPMQDLLGLGSEARMNTPATVSGNWAWRVGEVGFFSGLKAETTKLKEILRFYHRYPRHLIKKEKLAEAAQRE

SEQ ID NO: 2460 - protein, 585 aa, Chlamydomonas reinhardtii
  misc_feature (90)..(574): Pfam Name: Glyco_hydro_77 Pfam Description: 4-alpha-glucanotransferase
  misc_feature: Public GI ID no. 11095335
  misc_feature: Bit score of 747.2 for HMM based on sequences of Figure 39
  misc_feature: Functional Homolog Of SEQ ID NO. 2437
MIPLRAPQGVRYTQQIDRSQQVLPQLRSRAPQSVSHVAAGSRRAVSRRSVRAFAWGTPKTTGPAPGEVLGKDYDQKIPSYNKGRRAGILLHPTSLPGPYGIGDIGDEAKRFVDWLADHGMQCWQLLPLVPPDPMYYSPYSGTDANCGNPLVVSIEELIKDGLLEFSETPPRVPIADVDYPAVAAAKLPLLKRAAQRLLKEDRFTRLREEYLKYRKEHPWVEDSALFDVARNLPELSQLAWWQWPEPLRLRQKEALKEFRETNKDAIDEFVVIQYFFEKQWKAIRSYANGKGIKLIGDMPIYVGGHSADVWANRHLFELNEAGLPEQVSGVPPDAFSATGQLWGSPLYKWPAHKKEGFKWWTARMARTLELYDECRIDHFRGFAGYWSVDANETTAMNGNWRQGPGLELFTAMKKALGAVPILAEDLGVITTDVVALREAIGAPGMVVLQFAWGGGPGNVHLPHNHYENCFVYPGTHDNETAVGWFRGSANDTDKSYIKSYLRTDGGDIAWDFIRACMAAVPRTCVIMMQDVMRLDNTARMNTPGTAAGNWRWRMGDGNVWNSLKKEGEDLRKVAHDTNRLPKPKA

SEQ ID NO: 2461 - protein, 584 aa, Chlamydomonas reinhardtii
  misc_feature (89)..(573): Pfam Name: Glyco_hydro_77 Pfam Description: 4-alpha-glucanotransferase
  misc_feature: Public GI ID no. 159489864
  misc_feature: Bit score of 747.5 for HMM based on sequences of Figure 39
  misc_feature: Functional Homolog Of SEQ ID NO. 2437
MIPLRAPQGVRYTQQIDRSQQVLPQLRSRAPQSVSHVAGSRRAVSRRSVRAFAWGTPKTTGPAPGEVLGKDYDQKIPSYNKGRRAGILLHPTSLPGPYGIGDIGDEAKRFVDWLADHGMQCWQLLPLVPPDPMYYSPYSGTDANCGNPLVVSIEELIKDGLLEFSETPPRVPIADVDYPAVAAAKLPLLKRAAQRLLKEDRFTRLREEYLKYRKEHPWVEDSALFDVARNLPELSQLAWWQWPEPLRLRQKEALKEFRETNKDAIDEFVVIQYFFEKQWKAIRSYANGKGIKLIGDMPIYVGGHSADVWANRHLFELNEAGLPEQVSGVPPDAFSATGQLWGSPLYKWPAHKKEGFKWWTARMARTLELYDECRIDHFRGFAGYWSVDANETTAMNGNWRQGPGLELFTAMKKALGAVPILAEDLGVITTDVVALREAIGAPGMVVLQFAWGGGPGNVHLPHNHYENCFVYPGTHDNETAVGWFRGSANDTDKSYIKSYLRTDGGDIAWDFIRACMAAVPRTCVIMMQDVMRLDNTARMNTPGTAAGNWRWRMGDGNVWNSLKKEGEDLRKVAHDTNRLPKPKA

SEQ ID NO: 2462 - protein, 560 aa, Ostreococcus lucimarinus CCE9901
  misc_feature (29)..(526): Pfam Name: Glyco_hydro_77 Pfam Description: 4-alpha-glucanotransferase
  misc_feature: Public GI ID no. 145342068
  misc_feature: Bit score of 640.2 for HMM based on sequences of Figure 39
  misc_feature: Functional Homolog Of SEQ ID NO. 2437
MGPVGQPVPNGYGDYYPTPRDDRRAGVIMHPTSLPGAYGIGDAGPEARAFVDWMAKGKMSIWQVLPLVPPGRPIPGVREDYWSPYSGRDAHCGNTLVISLDDLVADGLLETKDLPKAYGGSENVDFGRVAATNEPLIAKAAEKLLAMASGSGLKGEYDAFCARADVKAWLDPAATFDAIDSTPELLGKYWWDWPAEYRDRDPGALAAIESEKASSIELFKATQFLFHVQWMRLKKYANDRGVSLVGDMPIYVGGHSADVWANQNLFLLGDDKRPSALAGVPPDAFSEDGQLWGNPLFDWGEHARTDYAWWAQRLKRTLELHDEVRIDHFRAFAAYWEVEAGAPTAKSGRWMVGPGVDMFNKLKPALGDAKIVAEDLGVITADVVDLRQECGFPGMVVLQFAWGGNGRNPHLLHNHYENSFCYPGTHDNETSQGWYAQQDEDTKRRLEAYAGIAYGDGAWGMIKAGMSSVSKACVFTMQDVLALGNEARMNTPGVADGNWSWRIGEPGVFATLDAEAHKLASLATVYDRVADPDAQSMRESCQSVAGGGRGGLFGLGFWIF

SEQ ID NO: 2463 - protein, 593 aa, Ostreococcus tauri
  misc_feature (63)..(559): Pfam Name: Glyco_hydro_77 Pfam Description: 4-alpha-glucanotransferase
  misc_feature: Public GI ID no. 116061732
  misc_feature: Bit score of 700.2 for HMM based on sequences of Figure 39
  misc_feature: Functional Homolog Of SEQ ID NO. 2437
AMFRTTTHRSLPAKRTERAASGRNSLAKRVRKVQATAVGSPVDADYGARFPPKRDDRRAGVIMHPTSLPGAYGVGDAGPEARAFVDWLQKARMRIWQVLPLVPPGRPIPGVREDYWSPYSGRDAHCGNTLMISLDDLVRDGLLRAEELPKAYGKTKVEFGAVAATNEPLIAKAAERLLAMPRGEGLRGEYDAFCAREDVRAWLDPAAVFDAIDTTPALIGKYWWDWPVEYRDRDPSALAAIERDRADSIELFKAVQFLFHLQWMRLKKYANERGVSLIGDMPIYVGGHSADVWANQNLFLLGEDKKPSALAGVPPDAFSEDGQLWGNPLFAWQEHSRTDYAWWAQRLKRTLELHDEVRIDHFRAFAAYWEVEAGAPTAKSGRWITGPGIEMFERLKPALGDAKIVAEDLGVITADVVALREACGFPGMVVLQFAWGGDGRNPHLPHNHYENSFCYPGTHDNETSQGWYMSQDEDTKRRLDAYAGVGYGDGAWGMIKAGMSSVSKACVFTMQDVLALGNEARMNTPGVADGNWAWRIGEPGVFATLDAEADKLASLATVYDRVAVVDDSSMRDACIAIAGKGRGVLFGLGVWFL

SEQ ID NO: 2464 - protein, 601 aa, Ostreococcus tauri
  misc_feature (71)..(567): Pfam Name: Glyco_hydro_77 Pfam Description: 4-alpha-glucanotransferase
  misc_feature: Public GI ID no. 46360132
  misc_feature: Bit score of 700.4 for HMM based on sequences of Figure 39
  misc_feature: Functional Homolog Of SEQ ID NO. 2437
MPGVSASAAMFRTTTHRSLPAKRTERAASGRNSLAKRVRKVQATAVGSPVDADYGARFPPKRDDRRAGVIMHPTSLPGAYGVGDAGPEARAFVDWLQKARMRIWQVLPLVPPGRPIPGVREDYWSPYSGRDAHCGNTLMISLDDLVRDGLLRAEELPKAYGKTKVEFGAVAATNEPLIAKAAERLLAMPRGEGLRGEYDAFCAREDVRAWLDPAAVFDAIDTTPALIGKYWWDWPVEYRDRDPSALAAIERDRADSIELFKAVQFLFHLQWMRLKKYANERGVSLIGDMPIYVGGHSADVWANQNLFLLGEDKKPSALAGVPPDAFSEDGQLWGNPLFAWQEHSRTDYAWWAQRLKRTLELHDEVRIDHFRAFAAYWEVEAGAPTAKSGRWITGPGIEMFERLKPALGDAKIVAEDLGVITADVVALREACGFPGMVVLQFAWGGDGRNPHLPHNHYENSFCYPGTHDNETSQGWYMSQDEDTKRRLDAYAGVGYGDGAWGMIKAGMSSVSKACVFTMQDVLALGNEARMNTPGVADGNWPWRIGEPGVFATLDAEADKLASLATVYDRVAVVDDSSRRDACIAIAGKARGVLFGLGVWFL

SEQ ID NO: 2465 - DNA, 2975 bp, Panicum virgatum
  misc_feature: Ceres Clone ID no. 1777248
  misc_feature: Encodes the peptide sequence at SEQ ID NO. 2466
gagtccagtctctgctcgcccctctccgcctccgccatggccgccgcctcgctccccccgccatcgcgatggccgccgccgcctctgcgattactccctctcgtactcctcggctgcctcgccgcgtcggccccactgcgggcggcggaggcggcgggggtgctgaggcaggtggtggccggtggtggggacggcgacggcggggccttcttcgagccgttcaacgtcacctacgaccaccgcgcggtgatcctcggcgggaagcgaaggatgctcgtctccgcggggctccactacccgcgcgccacgcccgagatgtggccgagcctgattgcaaagtgcaaggagggcggcgcggatgtgattgagacatatatcttttggaatgggcatgagccggccaaaggccagtattactttgaaggaaggtttgatattgtcaagtttgcgaagctggttgctgctgaaggtctatttctttttctgcgtatcggaccatatgcttgtgctgaatggaatttcggtggtttcccagtttggctgcgtgacatccctggaatagaattccgtactgacaatgaaccctacaaggctgaaatgcagagttttgtgacaaaaatcgtaaatatcatgaaagaggagaaactttattcatggcaaggtggtcccattatactacagcagattgaaaatgaatacggtaacattcaagaccgctatggtcaagcagggaagagatacatgctatgggcagctcagatggcacttgcacttgatactggtgttccttgggtaatgtgtaggcaaacagatgctcccgaacaaattcttgatacttgcaatgccttttactgcgatggatttaaaccaaattcctacaacaagccgacaatatggactgaggattgggacggatggtatgccgactggggggaaccattgcctcataggcctgctcaagacagtgcttttgctgtagctcgattttatcaacgtggtggaagcttgcaaaattattacatgtattttggtggaacaaattttgagcgaacagctggtggtccacgtcagataacaagctatgattatgatgcaccaattgatgaatatggtatcttaaggcaacctaagtgggggcatttgaaagatctacatgcagctattaaactctgtgaaccagctcttattgctgtagatggatcacctcaatatgtaaaactggggcccatgcaagaggctcatgtatattccagtggaaaaatccacacaaatggaagcatttcagaaaatggacagatttgctcagcttttctggctaacatcgatgaacataaatatgtttcagtctggatttttggaaagtcttatagcctaccaccatggtctgtgagcatactaccagattgtgaaaatgtggcttttaatacagctagggttggtacacagacttcggtttttactgtcgaatcagggtcccccagttattcaagtagacataagcctaggactctatcccttattggtggtccatatctctcaagtacttggtggacttctaaagagcctattggcaaatggggtgaaggaagctttgctgctcaggggatattagagcacttaaatgtgaccaaagacatttctgactacctgtcatatactatgagtgtaaacatttctgacgaggatgttacatattggaattccaaaggtgttcttccatcactaactatagatcaaattcgtgatgtagcacgtgtatttgtaaatgggaagcttgcaggtagtaagattggtcattgggtctcgctgaatcaaccagttcaattggttcaaggacctaatgagttgacattgttttcagagattgttggcttgcagaactatggtgctttcttggagaaggatggagctggatttagaggtcaagtaaaactcactggcttatctaatggggatatcgacttcactaattccctttggacatatcagattggtttgaaaggtgagttttcgaggatctattctcctgagaaccaaggatatgctaagtggagtagcatgcagaatgatgacacacagacacccttcacatggttcaagacaatgtttgatgcaccagaaggtaatgacccggtggccattggtcttgggagcatgggaaagggccaggcttgggtgaatggacatctcattggacgctactggtcgatagtagcaccagagtctgggtgcccatcctcgtgcaactatgcaggaacgtacggtgatagcaagtgccgatcgaactgtgggatggctacgcaaagctggtaccacataccacgcgaatggttacaagagtcaggcaatctattggtactcttggaggaaacagggggagacccttctcagatatcgctgcaggttcattacaccaaaacaatctgctcaaaaatatccgagacttattatcctcccctttcttcctggtctcgtgcttccaacagtcgtgccaccctgaatacagtagctccagagcttcacttacagtgtgatgaggggcatgtgatctcgaagattatatttgcgagctatggaaccccttcaggtggttgccagaacttctctgtcgggaattgccatgcatcgactactctggacttggttacagaggcctgtgtcggcaataacaaatgttccatcagtgtcaccaacgatgtatttggcgatccatgccgaaaggtcgtaaaagatttggcagttgaggctgagtgctccccgcccttggctaccgaagaacctcgagatgatatgtgatcaagataccgtaatttggtcctgaaagagctgtgtggaagggagcgtttctacagccttgcaggagcatctgagctgtgtgctagtgctaggggttcctgcatcgttgtattgtatgtaaagacaatcacctactcgggggactggaaagaaagaaagggaaagaacacgttgtttcc

SEQ ID NO: 2466 - protein, 919 aa, Panicum virgatum
  misc_feature (70)..(376): Pfam Name: Glyco_hydro_35 Pfam Description: Glycosyl hydrolases family 35
  misc_feature (830)..(906): Pfam Name: Gal_Lectin Pfam Description: Galactose binding lectin domain
  misc_feature: Ceres Clone ID no. 1777248
  misc_feature: Bit score of 2105.6 for HMM based on sequences of Figure 23
  misc_feature: Functional Homolog Of SEQ ID NO. 2466
  misc_feature: in Figure 23
MAAASLPPPSRWPPPPLRLLPLVLLGCLAASAPLRAAEAAGVLRQVVAGGGDGDGGAFFEPFNVTYDHRAVILGGKRRMLVSAGLHYPRATPEMWPSLIAKCKEGGADVIETYIFWNGHEPAKGQYYFEGRFDIVKFAKLVAAEGLFLFLRIGPYACAEWNFGGFPVWLRDIPGIEFRTDNEPYKAEMQSFVTKIVNIMKEEKLYSWQGGPIILQQIENEYGNIQDRYGQAGKRYMLWAAQMALALDTGVPWVMCRQTDAPEQILDTCNAFYCDGFKPNSYNKPTIWTEDWDGWYADWGEPLPHRPAQDSAFAVARFYQRGGSLQNYYMYFGGTNFERTAGGPRQITSYDYDAPIDEYGILRQPKWGHLKDLHAAIKLCEPALIAVDGSPQYVKLGPMQEAHVYSSGKIHTNGSISENGQICSAFLANIDEHKYVSVWIFGKSYSLPPWSVSILPDCENVAFNTARVGTQTSVFTVESGSPSYSSRHKPRTLSLIGGPYLSSTWWTSKEPIGKWGEGSFAAQGILEHLNVTKDISDYLSYTMSVNISDEDVTYWNSKGVLPSLTIDQIRDVARVFVNGKLAGSKIGHWVSLNQPVQLVQGPNELTLFSEIVGLQNYGAFLEKDGAGFRGQVKLTGLSNGDIDFTNSLWTYQIGLKGEFSRIYSPENQGYAKWSSMQNDDTQTPFTWFKTMFDAPEGNDPVAIGLGSMGKGQAWVNGHLIGRYWSIVAPESGCPSSCNYAGTYGDSKCRSNCGMATQSWYHIPREWLQESGNLLVLLEETGGDPSQISLQVHYTKTICSKISETYYPPLSSWSRASNSRATLNTVAPELHLQCDEGHVISKIIFASYGTPSGGCQNFSVGNCHASTTLDLVTEACVGNNKCSISVTNDVFGDPCRKVVKDLAVEAECSPPLATEEPRDDM

SEQ ID NO: 2467 - DNA, 2772 bp, Sorghum bicolor
  misc_feature: Ceres Annot ID no. 8715706
  misc_feature: Encodes the peptide sequence at SEQ ID NO. 2468
atggccgcatcgccctacccgacgccgacggggccaccgcctctcatgggactcctgggtatccttctcctcctcctcatcatcctcgtctccctctccccatcgattccactagcggaggcgggcgcggaggcggcaggggttctgaggcaagtggttggtggggacgacgacgacggcgggaacttcttcgagccgttcaacgtgacctacgaccaccgcgcgctcatccttggcgggaagcgcaggatgctcgtctccgcggggctccactacccgcgcgccacgcccgagatgtggccgagtttgattgcaaaggctaaggagggcggcgtggatgtaattgagacctatatcttttggaatgggcatgagcctgccaaaggccagtactactttgaaggaagatttgatattgtcaggtttgctaagctggttgctgcagaaggcctttttctgttccttcgtatcggcccatatgcttgtgctgaatggaatttcggtggtttcccagtttggctgcgtgacatccctgggatagaattccgtactgacaatgaaccctacaaggctgaaatgcagaattttgtgacaaaaatcgtagatatcatgaaagaggagaaactttattcttggcaaggtggtcccattatactacagcagattgaaaatgaatatggtaacattcaaggcaagtatggtcaagcagggaagagatacatgcaatgggcagctcagatggcacttgcacttgatactggtgttccttgggtcatgtgcaggcaaacagatgctccagaacaaattctcgatacgtgcaatgccttttattgcgatggtttcaaaccaaattcctacaacaagccaacaatatggactgaggattgggatggatggtatgccgactggggtgaagcgttgccacataggcctgctcaagatagtgcttttgctgttgctcgtttttatcaacgtggtggaagctttcaaaactattacatgtattttggtggaacaaattttgagcggacagctggtggtccacttcagataactagctatgattatgatgcaccaatcgatgaatacggtatcttaaggcaacctaagtgggggcatttgaaagacctacatgcagctattaaactgtgtgaaccagctcttactgcagtagatggctcacctcgttatataaaattagggcccatgcaagaggcacatgtatattcaagtgaaaatgtccacacaaatggaagcatttcaggaaatgcacagttttgctcagcttttcttgccaacattgatgaacataaatatgcttcagtttggatttttggaaaatcttatagtctaccaccatggtctgtgagcatactaccagactgtgaaactgtggcttttaatacagcgagggttggtacacaaacgtcgttttttaatgtcgaatctgggtcccccagttattcaagtagacataagcctagaattctatcccttggtggcccctatctctcaagtacttggtgggcttctaaagaacctgttggcatatggagtgaagacatctttgctgctcaggggatattagagcacttaaacgtgacaaaagacatatctgactacctttcatatactaccagggtgaacatttctgatgaggatgttttatattggaattcagaaggtttacttccatcactaaccatagatcaaattcgtgatgtagtgcgcatatttgtaaatgggaagcttgcaggtagtcaagttggtcactgggtctcactgaatcaaccacttcaattggttcaaggacttaatgagttgacattgttatcagagattgttggcttgcagaactatggtgctttcttggagaaggatggtgctggatttaggggtcaagtaaaactcactggcttgtcaaatggggatatcgaccttactaattctctttggacgtatcagattggtttgaaaggtgagttttcaaggatctattctcctgagaagcaaggatctgctgggtggagtagcatgcaaaatgatgacacactttcacccttcacatggttcaagactacgtttgatgctccagaaggtaatggccctgttgccattgatcttgggagcatgggaaagggccaggcttgggtgaatgggcatctcattgggcgctattggtcactagttgcaccagagtctgggtgtccgtcctcatgcaactatgcaggaaattacggtgatagcaagtgccgatcaaactgtggaattgctacacaaagctggtaccacataccacgcgaatggttgcaagagtcagacaatctattggtactcttcgaggaaacagggggagacccttctcagatatcgctggaggttcattacaccaaaacaatctgctcaaaaatatctgagacttactatcctcccctttctgcctggtctcgtgctgccaacggtcgtccctcagtaaatacagtagcaccagaacttcgcttgcagtgcgatgaggggcatgtgatctcgaagattacatttgcgagttatgggacccctacaggagattgccagaacttctctgtagggaattgtcatgcatcgactactctagacttggtggcagaggcctgcgaaggcaagaacagatgtgcgatcagtgttaccaatgatgtattcggcgacccatgccgaaaagtcgtcaaggatttggcagttgtggccgagtgctccccgccgtcagctaacaaagaacctcgagatgatatgtga

SEQ ID NO: 2468 - protein, 923 aa, Sorghum bicolor
  misc_feature (75)..(381): Pfam Name: Glyco_hydro_35 Pfam Description: Glycosyl hydrolases family 35
  misc_feature (834)..(910): Pfam Name: Gal_Lectin Pfam Description: Galactose binding lectin domain
  misc_feature: Ceres Annot ID no. 8715706
  misc_feature: Bit score of 2115.0 for HMM based on sequences of Figure 23
  misc_feature: Functional Homolog Of SEQ ID NO. 2466
  misc_feature: in Figure 23
MAASPYPTPTGPPPLMGLLGILLLLLIILVSLSPSIPLAEAGAEAAGVLRQVVGGDDDDGGNFFEPFNVTYDHRALILGGKRRMLVSAGLHYPRATPEMWPSLIAKAKEGGVDVIETYIFWNGHEPAKGQYYFEGRFDIVRFAKLVAAEGLFLFLRIGPYACAEWNFGGFPVWLRDIPGIEFRTDNEPYKAEMQNFVTKIVDIMKEEKLYSWQGGPIILQQIENEYGNIQGKYGQAGKRYMQWAAQMALALDTGVPWVMCRQTDAPEQILDTCNAFYCDGFKPNSYNKPTIWTEDWDGWYADWGEALPHRPAQDSAFAVARFYQRGGSFQNYYMYFGGTNFERTAGGPLQITSYDYDAPIDEYGILRQPKWGHLKDLHAAIKLCEPALTAVDGSPRYIKLGPMQEAHVYSSENVHTNGSISGNAQFCSAFLANIDEHKYASVWIFGKSYSLPPWSVSILPDCETVAFNTARVGTQTSFFNVESGSPSYSSRHKPRILSLGGPYLSSTWWASKEPVGIWSEDIFAAQGILEHLNVTKDISDYLSYTTRVNISDEDVLYWNSEGLLPSLTIDQIRDVVRIFVNGKLAGSQVGHWVSLNQPLQLVQGLNELTLLSEIVGLQNYGAFLEKDGAGFRGQVKLTGLSNGDIDLTNSLWTYQIGLKGEFSRIYSPEKQGSAGWSSMQNDDTLSPFTWFKTTFDAPEGNGPVAIDLGSMGKGQAWVNGHLIGRYWSLVAPESGCPSSCNYAGNYGDSKCRSNCGIATQSWYHIPREWLQESDNLLVLFEETGGDPSQISLEVHYTKTICSKISETYYPPLSAWSRAANGRPSVNTVAPELRLQCDEGHVISKITFASYGTPTGDCQNFSVGNCHASTTLDLVAEACEGKNRCAISVTNDVFGDPCRKVVKDLAVVAECSPPSANKEPRDDM

SEQ ID NO: 2469 - protein, 919 aa, Oryza sativa subsp. japonica
  misc_feature (70)..(376): Pfam Name: Glyco_hydro_35 Pfam Description: Glycosyl hydrolases family 35
  misc_feature (830)..(906): Pfam Name: Gal_Lectin Pfam Description: Galactose binding lectin domain
  misc_feature: Public GI ID no. 115488372
  misc_feature: Bit score of 2118.9 for HMM based on sequences of Figure 23
  misc_feature: Functional Homolog Of SEQ ID NO. 2466
  misc_feature: in Figure 23
MAASRGPPLLGFRALALALLLAILLLLGCSAAAAYAGAEGVLRQVVGRRGDDGGGGNFFEPFNVTYDHRAVLIGGKRRMLVSAGLHYPRATPEMWPSLIAKCKEGGADVIETYVFWNGHEPAKGQYYFEERFDLVKFAKLVAAEGLFLFLRIGPYACAEWNFGGFPVWLRDIPGIEFRTDNEPFKAEMQTFVTKIVTLMKEEKLYSWQGGPIILQQIENEYGNIQGNYGQAGKRYMQWAAQMAIGLDTGIPWVMCRQTDAPEEIIDTCNAFYCDGFKPNSYNKPTIWTEDWDGWYADWGGALPHRPAEDSAFAVARFYQRGGSLQNYYMYFGGTNFARTAGGPLQITSYDYDAPIDEYGILRQPKWGHLKDLHTAIKLCEPALIAVDGSPQYIKLGSMQEAHVYSTGEVHTNGSMAGNAQICSAFLANIDEHKYASVWIFGKSYSLPPWSVSILPDCENVAFNTARIGAQTSVFTVESGSPSRSSRHKPSILSLTSGGPYLSSTWWTSKETIGTWGGNNFAVQGILEHLNVTKDISDYLWYTTRVNISDADVAFWSSKGVLPSLTIDKIRDVARVFVNGKLAGSQVGHWVSLKQPIQLVEGLNELTLLSEIVGLQNYGAFLEKDGAGFRGQVTLTGLSDGDVDLTNSLWTYQVGLKGEFSMIYAPEKQGCAGWSRMQKDSVQPFTWYKTMFSTPKGTDPVAIDLGSMGKGQAWVNGHLIGRYWSLVAPESGCSSSCYYPGAYNERKCQSNCGMPTQNWYHIPREWLKESDNLLVLFEETGGDPSLISLEAHYAKTVCSRISENYYPPLSAWSHLSSGRASVNAATPELRLQCDDGHVISEITFASYGTPSGGCLNFSKGNCHASSTLDLVTEACVGNTKCAISVSNDVFGDPCRGVLKDLAVEAKCSPPSTTKEPRGEM

SEQ ID NO: 2470 - protein, 889 aa, Persea americana
  misc_feature (37)..(343): Pfam Name: Glyco_hydro_35 Pfam Description: Glycosyl hydrolases family 35
  misc_feature (801)..(878): Pfam Name: Gal_Lectin Pfam Description: Galactose binding lectin domain
  misc_feature: Public GI ID no. 114217393
  misc_feature: Bit score of 2156.9 for HMM based on sequences of Figure 23
  misc_feature: Functional Homolog Of SEQ ID NO. 2466
  misc_feature: in Figure 23
MLGFRRIMEFLLVVMTLQIAACTEFFKPFNVSYDHRALIIDGKRRMLISSGIHYPRATPEMWPDLIAKSKEGGADLIQTYAFWNGHEPIRGQYNFEGRYDIVKFIKLAGSAGLYFHLRIGPYVCAEWNFGGFPVWLRDIPGIEFRTDNAPYKDEMQRFVKKIVDLMRQEMLFSWQGGPIILLQIENEYGNIERLYGQRGKDYVKWAADMAIGLGAGVPWVMCRQTDAPENIIDACNAFYCDGFKPNSYRKPALWTEDWNGWYTSWGGRVPHRPVEDNAFAVARFFQRGGSYHNYYMFFGGTNFGRTSGGPFYVTSYDYDAPIDEYGLLSQPKWGHLKDLHSAIKLCEPALVAVDDAPQYIRLGPMQEAHVYRHSSYVEDQSSSTLGNGTLCSAFLANIDEHNSANVKFLGQVYSLPPWSVSILPDCKNVAFNTAKVASQISVKTVEFSSPFIENTTEPGYLLLHDGVHHISTNWMILKEPIGEWGGNNFTAEGILEHLNVTKDTSDYLWYIMRLHISDEDISFWEASEVSPKLIIDSMRDVVRIFVNGQLAGSHVGRWVRVEQPVDLVQGYNELAILSETVGLQNYGAFLEKDGAGFKGQIKLTGLKSGEYDLTNSLWVYQVGLRGEFMKIFSLEEHESADWVDLPNDSVPSAFTWYKTFFDAPQGKDPVSLYLGSMGKGQAWVNGHSIGRYWSLVAPVDGCQSCDYRGAYHESKCATNCGKPTQSWYHIPRSWLQPSKNLLVIFEETGGNPLEISVKLHSTSSICTKVSESHYPPLHLWSHKDIVNGKVSISNAVPEIHLQCDNGQRISSIMFASFGTPQGSCQRFSQGDCHAPNSFSVVSEACQGRNNCSIGVSNKVFGGDPCRGVVKTLAVEAKCMSFSEIDASWL

SEQ ID NO: 2471 - protein, 894 aa, Pyrus communis
  misc_feature (42)..(348): Pfam Name: Glyco_hydro_35 Pfam Description: Glycosyl hydrolases family 35
  misc_feature (806)..(883): Pfam Name: Gal_Lectin Pfam Description: Galactose binding lectin domain
  misc_feature: Public GI ID no. 84579373
  misc_feature: Bit score of 2196.8 for HMM based on sequences of Figure 23
  misc_feature: Functional Homolog Of SEQ ID NO. 2466
  misc_feature: in Figure 23
MVAQRGSPWGLRCLFLCLAVQFALEAAAEYFKPFNVSYDHRALIIDGKRRMLVSAGIHYPRATPEMWPDLIAKSKEGGVDVIQTYAFWSGHEPVRGQYNFEGRYDIVKFANLVGASGLYLHLRIGPYVCAEWNFGGFPVWLRDIPGIEFRTNNALFKEEMQRFVKKMVDLMQEEELLSWQGGPIIMLQIENEYGNIEGQFGQKGKEYIKWAAEMALGLGAGVPWVMCKQVDAPGSIIDACNGYYCDGYKPNSYNKPTMWTEDWDGWYASWGGRLPHRPVEDLAFAVARFYQRGGSFQNYYMYFGGTNFGRTSGGPFYITSYDYDAPIDEYGLLSEPKWGHLKDLHAAIKLCEPALVAADSPNYIKLGPKQEAHVYRMNSHTEGLNITSYGSQISCSAFLANIDEHKAASVTFLGQKYNLPPWSVSILPDCRNVVYNTAKVGAQTSIKTVEFDLPLYSGISSQQQFITKNDDLFITKSWMTVKEPVGVWSENNFTVQGILEHLNVTKDQSDYLWHITRIFVSEDDISFWEKNNISAAVSIDSMRDVLRVFVNGQLTGSVIGHWVKVEQPVKFLKGYNDLVLLTQTVGLQNYGAFLEKDGAGFRGQIKLTGFKNGDIDFSKLLWTYQVGLKGEFLKIYTIEENEKASWAELSPDDDPSTFIWYKTYFDSPAGTDPVALDLGSMGKGQAWVNGHHIGRYWTLVAPEDGCPEICDYRGAYDSDKCSFNCGKPTQTLYHVPRSWLQSSSNLLVILEETGGNPFDISIKLRSAGVLCAQVSESHYPPVQKWFNPDSVDEKITVNDLTPEMHLQCQDGFTISSIEFASYGTPQGSCQKFSMGNCHATNSSSIVSKSCLGKNSCSVEISNISFGGDPCRGVVKTLAVEARCRSSSDVGLSQF

SEQ ID NO: 2472 - protein, 909 aa, Glycine max
  misc_feature (53)..(359): Pfam Name: Glyco_hydro_35 Pfam Description: Glycosyl hydrolases family 35
  misc_feature (816)..(893): Pfam Name: Gal_Lectin Pfam Description: Galactose binding lectin domain
  misc_feature: Public GI ID no. 34148077
  misc_feature: Bit score of 2136.7 for HMM based on sequences of Figure 23
  misc_feature: Functional Homolog Of SEQ ID NO. 2466
  misc_feature: in Figure 23
MLRNSNSRGGFGSGMVVAVVCVCVCVVAMEYGVRVTEGEEYFKPFNVSYDHRALILNGKRRFLISAGIHYPRATPEMWPDLIAKSKEGGADVIETYVFWNGHEPVRGQYNFEGRYDLVKFVRLAASHGLYFFLRIGPYACAEWNFGGFPVWLRDIPGIEFRTNNAPFKEEMKRFVSKVVNLMREERLFSWQGGPIILLQIENEYGNIENSYGKGGKEYMKWAAKMALSLGAGVPWVMCRQQDAPYDIIDTCNAYYCDGFKPNSHNKPTMWTENWDGWYTQWGERLPHRPVEDLAFAVARFFQRGGSFQNYYMYFGGTNFGRTAGGPLQITSYDYDAPIDEYGLLREPKWGHLKDLHAALKLCEPALVATDSPTYIKLGPKQEAHVYQANVHLEGLNLSMFESSSICSAFLANIDEWKEATVTFRGQRYTIPPWSVSVLPDCRNTVFNTAKVRAQTSVKLVESYLPTVSNIFPAQQLRHQNDFYYISKSWMTTKEPLNIWSKSSFTVEGIWEHLNVTKDQSDYLWYSTRVYVSDSDILFWEENDVHPKLTIDGVRDILRVFINGQLIGNVVGHWIKVVQTLQFLPGYNDLTLLTQTVGLQNYGAFLEKDGAGIRGKIKITGFENGDIDLSKSLWTYQVGLQGEFLKFYSEENENSEWVELTPDAIPSTFTWYKTYFDVPGGIDPVALDFKSMGKGQAWVNGQHIGRYWTRVSPKSGCQQVCDYRGAYNSDKCSTNCGKPTQTLYHVPRSWLKATNNLLVILEETGGNPFEISVKLHSSRIICAQVSESNYPPLQKLVNADLIGEEVSANNMIPELHLHCQQGHTISSVAFASFGTPGGSCQNFSRGNCHAPSSMSIVSEACQGKRSCSIKISDSAFGVDPCPGVVKTLSVEARCTSPLSDDFFQEAVSSF

SEQ ID NO: 2473 - DNA, 2625 bp, Populus balsamifera subsp. trichocarpa
  misc_feature: Ceres Annot ID no. 1543402
  misc_feature: Encodes the peptide sequence at SEQ ID NO. 2474
atgatttcttcttcaagacttaaaatatccttctttcaatttctctctttttatctaattatccaattcaccctcatatcttccaactttttcgaaccgttcaatgttacttacgatcaccgtgctctcatcatcgacggccgccgccgcatactcaattccgccggaatccactatcctcgcgccactcccgagatgtggcctgatttgattgcaaaaagtaaggaaggtggagcagatgtggttcaaacttatgtattttggggcgggcatgagccagttaaaggacagtattactttgaagggagatatgatcttgtaaagtttgtgaagctagtgggtgaaagtggactctatcttcatcttcgcataggcccttatgtttgtgcagagtggaatttcgggggcttcccagtgtggttgcgagatgtccccggcgtagtctttagaacagataatgctccttttaaggaagagatgcagaagtttgttacaaagatagtagatctgatgagagaggaaatgctattatcttggcaaggtggtccaatcatcatgttccagattgaaaacgaatatgggaatattgagcactcatttggccagggagggaaggaatacatgaaatgggctgctggaatggctttagcacttgacgctggggttccatgggtgatgtgcaagcaaactgatgctccagaaaacattatagatgcatgcaatggatactattgtgatggttttaaaccaaattcccctaagaaaccaatattttggaccgaagattgggatggatggtatacaacttggggtggaagattgcctcacaggcctgttgaagaccttgcctttgctgttgcacgcttttttcaacgtggagggagtttccagaattattatatgtattttggtggaacaaacttcggccggacttctgggggtccattctatataactagttatgactatgatgctccaattgatgaatatggtttgttgagcgagcccaagtgggggcatttgaaagatttgcatgctgccataaagctttgtgaacctgctctagttgctgcagattcagctcagtatataaaactgggaccaaaacaagagtatggaagtcaaagcaagtgctctgcatttcttgctaatattgatgaacgtcaagcagctactgtgagattccttggtcaatcatttactttacctccatggtcagtgagtatattaccagactgcagaaatactgtcttcaacactgccaaggttgcagcacagactcatatcaagactgtggagtttgttttgcctctttcaaacagttctctacttccacaattcattgttcagaatgaagattctccacaatcaacatcctggctgattgccaaagagccaattactttgtggagtgaggagaattttactgtgaaaggcatattggagcatttgaatgtgacaaaggatgaatctgactatctgtggtatttcacaagaatatatgtttctgatgatgacattgcattttgggagaaaaataaagtcagccctgcagtttcaatagatagcatgcgtgatgtgttgcgtgtatttatcaatggccagcttacaggcagtgtggttggtcattgggtcaaggcggtccagccagttcagtttcagaaaggatacaatgagttagtgttgttgtctcagacagttggattgcagaattacggtgccttcttagaaagagatggagcaggctttaaaggtcaaattaagcttactggatttaaaaatggggatatagacctctcaaacttatcatggacttaccaggttgggcttaagggtgagttccttaaagtttacagcacaggcgacaatgaaaagtttgaatggtctgaattggcagttgatgctactccatccacatttacctggtataagacattcttcgatgcaccatccggggttgacccagttgctcttgatttgggaagcatgggaaagggccaggcatgggtcaatggtcaccacataggaagatactggacagtggtttctccaaaagatggatgcggaagttgtgattatcgtggagcctacagttctggaaagtgtagaacaaattgtggcaatcctactcaaacctggtaccatgtccctcgggcatggttagaggcatcaaataatctacttgtcgtgtttgaggaaacaggagggaatccatttgagatttcagttaagttacggtcagcaaaagtgatttgtgctcaagtctcagagtcccattatccacctctcaggaagtggtcccgggcagatttaactggtgggaatatatcacgcaatgatatgacaccagaaatgcacttgaagtgtcaagatgggcatataatgtcctcaatagaatttgctagctatggaactcctaacggtagctgccagaagttttctaggggcaactgccatgcctccaattcttcttctgtggtcactgaggcttgccaggggaaaaataagtgtgatattgcgatttcgaatgctgtatttggagacccatgccgcggggttatcaagacactggccgttgaggcaagatgcatctcatcatcaaatattggttactctcgctactga

SEQ ID NO: 2474 - protein, 874 aa, Populus balsamifera subsp. trichocarpa
  misc_feature (42)..(348): Pfam Name: Glyco_hydro_35 Pfam Description: Glycosyl hydrolases family 35
  misc_feature (787)..(863): Pfam Name: Gal_Lectin Pfam Description: Galactose binding lectin domain
  misc_feature: Ceres Annot ID no. 1543402
  misc_feature: Bit score of 2141.2 for HMM based on sequences of Figure 23
  misc_feature: Functional Homolog Of SEQ ID NO. 2466
  misc_feature: in Figure 23
MISSSRLKISFFQFLSFYLIIQFTLISSNFFEPFNVTYDHRALIIDGRRRILNSAGIHYPRATPEMWPDLIAKSKEGGADVVQTYVFWGGHEPVKGQYYFEGRYDLVKFVKLVGESGLYLHLRIGPYVCAEWNFGGFPVWLRDVPGVVFRTDNAPFKEEMQKFVTKIVDLMREEMLLSWQGGPIIMFQIENEYGNIEHSFGQGGKEYMKWAAGMALALDAGVPWVMCKQTDAPENIIDACNGYYCDGFKPNSPKKPIFWTEDWDGWYTTWGGRLPHRPVEDLAFAVARFFQRGGSFQNYYMYFGGTNFGRTSGGPFYITSYDYDAPIDEYGLLSEPKWGHLKDLHAAIKLCEPALVAADSAQYIKLGPKQEYGSQSKCSAFLANIDERQAATVRFLGQSFTLPPWSVSILPDCRNTVFNTAKVAAQTHIKTVEFVLPLSNSSLLPQFIVQNEDSPQSTSWLIAKEPITLWSEENFTVKGILEHLNVTKDESDYLWYFTRIYVSDDDIAFWEKNKVSPAVSIDSMRDVLRVFINGQLTGSVVGHWVKAVQPVQFQKGYNELVLLSQTVGLQNYGAFLERDGAGFKGQIKLTGFKNGDIDLSNLSWTYQVGLKGEFLKVYSTGDNEKFEWSELAVDATPSTFTWYKTFFDAPSGVDPVALDLGSMGKGQAWVNGHHIGRYWTVVSPKDGCGSCDYRGAYSSGKCRTNCGNPTQTWYHVPRAWLEASNNLLVVFEETGGNPFEISVKLRSAKVICAQVSESHYPPLRKWSRADLTGGNISRNDMTPEMHLKCQDGHIMSSIEFASYGTPNGSCQKFSRGNCHASNSSSVVTEACQGKNKCDIAISNAVFGDPCRGVIKTLAVEARCISSSNIGYSRY

SEQ ID NO: 2475 - protein, 887 aa, Arabidopsis thaliana
  misc_feature (44)..(350): Pfam Name: Glyco_hydro_35 Pfam Description: Glycosyl hydrolases family 35
  misc_feature (799)..(876): Pfam Name: Gal_Lectin Pfam Description: Galactose binding lectin domain
  misc_feature: Public GI ID no. 18403090
  misc_feature: Bit score of 2142.0 for HMM based on sequences of Figure 23
  misc_feature: Functional Homolog Of SEQ ID NO. 2466
  misc_feature: in Figure 23
MAESIRTFSLQWRILSLIIALLVYFPILSGSYFKPFNVSYDHRALIIAGKRRMLVSAGIHYPRATPEMWSDLIAKSKEGGADVVQTYVFWNGHEPVKGQYNFEGRYDLVKFVKLIGSSGLYLHLRIGPYVCAEWNFGGFPVWLRDIPGIEFRTDNEPFKKEMQKFVTKIVDLMREAKLFCWQGGPIIMLQIENEYGDVEKSYGQKGKDYVKWAASMALGLGAGVPWVMCKQTDAPENIIDACNGYYCDGFKPNSRTKPVLWTEDWDGWYTKWGGSLPHRPAEDLAFAVARFYQRGGSFQNYYMYFGGTNFGRTSGGPFYITSYDYDAPLDEYGLRSEPKWGHLKDLHAAIKLCEPALVAADAPQYRKLGSKQEAHIYHGDGETGGKVCAAFLANIDEHKSAHVKFNGQSYTLPPWSVSILPDCRHVAFNTAKVGAQTSVKTVESARPSLGSMSILQKVVRQDNVSYISKSWMALKEPIGIWGENNFTFQGLLEHLNVTKDRSDYLWHKTRISVSEDDISFWKKNGPNSTVSIDSMRDVLRVFVNKQLAGSIVGHWVKAVQPVRFIQGNNDLLLLTQTVGLQNYGAFLEKDGAGFRGKAKLTGFKNGDLDLSKSSWTYQVGLKGEADKIYTVEHNEKAEWSTLETDASPSIFMWYKTYFDPPAGTDPVVLNLESMGRGQAWVNGQHIGRYWNIISQKDGCDRTCDYRGAYNSDKCTTNCGKPTQTRYHVPRSWLKPSSNLLVLFEETGGNPFKISVKTVTAGILCGQVSESHYPPLRKWSTPDYINGTMSINSVAPEVHLHCEDGHVISSIEFASYGTPRGSCDGFSIGKCHASNSLSIVSEACKGRNSCFIEVSNTAFISDPCSGTLKTLAVMSRCSPSQNMSDLSF

SEQ ID NO: 2476 - protein, 892 aa, Solanum lycopersicum
  misc_feature (43)..(349): Pfam Name: Glyco_hydro_35 Pfam Description: Glycosyl hydrolases family 35
  misc_feature (804)..(880): Pfam Name: Gal_Lectin Pfam Description: Galactose binding lectin domain
  misc_feature: Public GI ID no. 7939617
  misc_feature: Bit score of 2123.7 for HMM based on sequences of Figure 23
  misc_feature: Functional Homolog Of SEQ ID NO. 2466
  misc_feature: in Figure 23
MVEAMSRRKTLNFPLILTVLTIHFVIVAGEYFKPFNVTYDNRALIIGGKRRMLISAGIHYPRATPEMWPTLIARSKEGGADVIETYTFWNGHEPTRGQYNFEGRYDIVKFAKLVGSHGLFLFIRIGPYACAEWNFGGFPIWLRDIPGIEFRTDNAPFKEEMERYVKKIVDLMISESLFSWQGGPIILLQIENEYGNVESSFGPKGKLYMKWAAEMAVGLGAGVPWVMCRQTDAPEYIIDTCNAYYCDGFTPNSEKKPKIWTENWNGWFADWGERLPYRPSEDIAFAIARFFQRGGSLQNYYMYFGGTNFGRTAGGPTQITSYDYDAPLDEYGLLRQPKWGHLKDLHAAIKLCEPALVAADSPQYIKLGPKQEAHVYRGTSNNIGQYMSLNEGICAAFIANIDEHESATVKFYGQEFTLPPWSVVFCQIAEIQLSTQLRWGHKLQSKQWAQILFQLGIILCFYKLSLKASSESFSQSWMTLKEPLGVWGDKNFTSKGILEHLNVTKDQSDYLWYLTRIYISDDDISFWEENDVSPTIDIDSMRDFVRIFVNGQLAGSVKGKWIKVVQPVKLVQGYNDILLLSETVGLQNYGAFLEKDGAGFKGQIKLTGCKSGDINLTTSLWTYQVGLRGEFLEVYDVNSTESAGWTEFPTGTTPSVFSWYKTKFDAPGGTDPVALDFSSMGKGQAWVNGHHVGRYWTLVAPNNGCGRTCDYRGAYHSDKCRTNCGEITQAWYHIPRSWLKTLNNVLVIFEETDKTPFDISISTRSTETICAQVSEKHYPPLHKWSHSEFDRKLSLMDKTPEMHLQCDEGHTISSIEFASYGSPNGSCQKFSQGKCHAANSLSVVSQACIGRTSCSIGISNGVFGDPCRHVVKSLAVQAKCSPPPDLSTSASS

SEQ ID NO: 2477 - protein, 713 aa, Oryza sativa subsp. japonica
  misc_feature (70)..(384): Pfam Name: Glyco_hydro_35 Pfam Description: Glycosyl hydrolases family 35
  misc_feature (578)..(713): Pfam Name: Gal_Lectin Pfam Description: Galactose binding lectin domain
  misc_feature: Public GI ID no. 108862584
  misc_feature: Bit score of 1293.8 for HMM based on sequences of Figure 23
  misc_feature: Functional Homolog Of SEQ ID NO. 2466
MAASRGPPLLGFRALALALLLAILLLLGCSAAAAYAGAEGVLRQVVGRRGDDGGGGNFFEPFNVTYDHRAVLIGGKRRMLVSAGLHYPRATPEMWPSLIAKCKEGGADVIETYVFWNGHEPAKGQYYFEERFDLVKFAKIDLVKFAKLVAAEGLFLFLRIGPYACAEWNFGGFPVWLRDIPGIEFRTDNEPFKAEMQTFVTKIVTLMKEEKLYSWQGGPIILQQIENEYGNIQGNYGQAGKRYMQWAAQMAIGLDTGIPWVMCRQTDAPEEIIDTCNAFYCDGFKPNSYNKPTIWTEDWDGWYADWGGALPHRPAEDSAFAVARFYQRGGSLQNYYMYFGGTNFARTAGGPLQITSYDYDAPIDEYGILRQPKWGHLKDLHTAIKLCEPALIAVDGSPQYIKLGSMQEAHVYSTGEVHTNGSMAGNAQICSAFLANIDEHKYASVWIFGKSYSLPPWSVSILPDCENVAFNTARIGAQTSVFTVESGSPSRSSRHKPSILSLTSGGPYLSSTWWTSKETIGTWGGNNFAVQGILEHLNVTKDISDYLWYTTRVNISDADVAFWSSKGVLPSLTIDKIRDVARVFVNGKLAGSQVGHWVSLKQPIQLVEGLNELTLLSEIVGLQNYGAFLEKDGAGFRGQVTLTGLSDGDVDLTNSLWTYQVGLKGEFSMIYAPEKQGCAGWSRMQKDSVQPFTWYKNICNQSVGDTIKFMHAY

SEQ ID NO: 2478 - protein, 903 aa, Pyrus pyrifolia
  misc_feature (42)..(348): Pfam Name: Glyco_hydro_35 Pfam Description: Glycosyl hydrolases family 35
  misc_feature (807)..(884): Pfam Name: Gal_Lectin Pfam Description: Galactose binding lectin domain
  misc_feature: Public GI ID no. 61162194
  misc_feature: Bit score of 2182.8 for HMM based on sequences of Figure 23
  misc_feature: Functional Homolog Of SEQ ID NO. 2466
MVAQRGSPWGLRCLFLCLAVQFALEAAAEYFKPFNVSYDHRALIIDGKRRMLVSAGIHYPRATPEMWPDLIAKSKEGGVDVIQTYAFWSGHEPVRGQYNFEGRYDIVKFANLVGASGLYLHLRIGPYVCAEWNFGGFPVWLRDIPGIEFRTNNALFKEEMQRFVKKMVDLMQEEELLSWQGGPIIMMQIENEYGNIEGQFGQKGKEYIKWAAEMALGLGAGVPWVMCKQVDAPGSIIDACNGYYCDGYKPNSYNKPTLWTEDWDGWYASWGGRLPHRPVEDLAFAVARFYQRGGSFQNYYMYFGGTNFGRTSGGPFYITSYDYDAPIDEYGLLSEPKWGHLKDLHAAIKLCEPALVAADSPNYIKLGPKQEAHVYRVNSHTEGLNITSYGSQISCSAFLANIDEHKAASVTFLGQKYNLPPWSVSILPDCRNVVYNTAKVGAQTSIKTVEFDLPLYSGISSQQQFITKNDDLFITKSWMTVKEPVGVWSENNFTVQGILEHLNVTKDQSDYLWHITRIFVSEDDISFWEKNNISAAVSIDSMRDVLRVFVNGQLTEGSVIGHWVKVEQPVKFLKGYNDLVLLTQTVGLQNYGAFLEKDGAGFRGQIKLTGFKNGDIDLSKLLWTYQVGLKGEFFKIYTIEENEKAGWAELSPDDDPSTFIWYKTYFDSPAGTDPVALDLGSMGKGQAWVNGHHIGRYWTLVAPEDGCPEICDYRGAYNSDKCSFNCGKPTQTLYHVPRSWLQSSSNLLVILEETGGNPFDISIKLRSAGVLCAQVSESHYPPVQKWFNPDSVDEKITVNDLTPEMHLQCQDGFTISSIEFASYGTPQGSCQKFSMGNCHATNSSSIVSKSCLGKNSCSVEISNNSFGGDPCRGIVKTLAVEARCRSSSDVGCLSSEPLTRSWG

SEQ ID NO: 2479 - DNA, 2943 bp, Arabidopsis thaliana
  misc_feature: Ceres Clone ID no. 1152402
  misc_feature: Encodes the peptide sequence at SEQ ID NO. 2480
acttcaatggcagagtcaattcgaactttttcgcttcaatggcggatactgtcactgatcatcgctttacttgtgtactttccgattgtgtcgggaaattactttaaaccgttcaatgtgagctacgaccaccgggctttaatcatcgccggcaagaggcgcatgcttgtctcagctggaattcactaccctcgagccactcctgagatgtggtctgatctcatcgcaaagagtaaagaaggtggagctgatgtgattcaaacttatgtgttttggaatgggcacgagcctgtaaagggtcagtataactttgaaggaagatatgaccttgtcaaatttgtgaagcttattggttcaagtggtctttatctccatctacgcataggtccttatgtttgtgctgagtggaactttggggggttcccagtgtggctgcgggatattcctggcattgagtttcgaacagataatgaaccttttaagaaagagatgcaaaagtttgtaacaaagattgtggatttgatgcgagaagcaaagctcttctgttggcaaggaggtcccataatcatgctgcagatcgagaatgaatatggggatgttgaaaaatcttacgggcagaagggaaaggattacgtcaaatgggcagctagcatggctctagggcttggtgctggagttccgtgggttatgtgcaaacaaacggacgctccagagaatattattgatgcatgcaatggatactattgtgatggttttaaaccaaattcgcggacgaagccaatactttggacagaggattgggatggatggtacacgaagtggggtggaagtttgcctcaccgacctgctgaagatcttgcatttgcagttgcacgattttatcagcgtggaggaagctttcaaaattattatatgtattttggtggaacaaactttggtcgaacttctggtggtcctttctatatcacaagctatgattatgatgctcctcttgatgaatatggtctgaggagcgagccaaaatgggggcatctaaaggatcttcatgctgccataaaactttgtgaacctgcccttgtcgcggcagatgcacctcagtatagaaaactgggatcaaatcaggaggcacatatttatcatggcgatggtgagactggaggaaaggtgtgcgctgcatttctcgcaaacattgatgagcataaatctgcacatgtgaagtttaatggccagtcatatactttaccaccttggtcagtgagtgtattgccagactgtcgacatgtggccttcaacactgccaaggtaggagcacaaacttctgttaaaacagtgaagtctgcaaggccatctttaggtagtatgtctatactgcaaaaagtcgtgaggcaagataatgtttcttatatctcaaaatcatggatggctctgaaagaacctattggcatatggggtgaaaacaatttcactttccaaggattattggagcatttgaatgttacaaaagaccggtctgattacctgtggcataagacaagaataagcgtatctgaagatgatatctcgttctggaagataaatggagctaacccaacagtgtcaattgatagcatgagggatgtgttgcgtgtgtttgttaacaaacaactctcaggcagtattgttggtcactgggtgaaggcagtgcagcctgtacgatttatacagggaaacaatgatttacttctgttgactcaaacagttggtttacagaattatggtgctttcttggagaaggatggagccggttttagaggcaaagctaagcttactggattcaagaatggagatttagacctgtcaaaatcgtcatggacgtatcaggtgggattgaagggcgaggctgataaaatatatactgttgaacacaatgaaaaagctgagtggagtactttggagaccgacgcttcaccttcgatctttatgtggtacaagacatactttgaccccccagccggaacagatcctgttgttcttgatctggaaagtatgggaaaggggcaagcttgggtcaatggacaccatattggaaggtattggaatatcatttcccaaaaggatggatgtgacagaacctgtgattatcgtggagcctacaattcagataagtgcacaacaaattgtggaaagcctacacaaaccaggtaccatataccgcgttcgtggttaaagccgtccagtaatctacttgtgctctttgaagagactgggggaaacccatttaagatatcggttaagacagttactgctgggattctgtgcggtcaagtcttggaatcgcattacccacctctgcggaaatggtccacaccagattacataaacggaacgactttgataaacagtgtggcaccagaagtgcatctgcattgtgaagatgggcatgtcatatcctccatagaatttgctagctatgggactccaagaggtagctgcgacgggttttctatcgggaaatgtcatgcatccaactcattatcaatcgtctctgaggcttgtaaaggacgcaacagctgcttcatcgaggtgtcaaatactgcttttatcagtgacccatgtagcggaactctaaagactttaacggttatggcacgatgttccccgtctcaaaacatgagtgacctcagtttttagacaccgggaagcggctcagaacgatgaacagctgtttctctaaaaaacaagagaccattgatattgattaaagaagaacatgtcccatcacaagctttctgtgacctttatatttcaaagtctgaactctgaacaattgtgtttgctcttgttcattggtgtatccaaactctacttggaaccaattaacagactcaaaaccatctctaaggtttctgcttgtacagtatgttgtttgaaatttgaatataagaaaatagtcgaagttgatgt

SEQ ID NO: 2480 - protein, 887 aa, Arabidopsis thaliana
  misc_feature (44)..(350): Pfam Name: Glyco_hydro_35 Pfam Description: Glycosyl hydrolases family 35
  misc_feature (799)..(876): Pfam Name: Gal_Lectin Pfam Description: Galactose binding lectin domain
  misc_feature: Ceres Clone ID no. 1152402
  misc_feature: Bit score of 2129.0 for HMM based on sequences of Figure 23
  misc_feature: Functional Homolog Of SEQ ID NO. 2466
MAESIRTFSLQWRILSLIIALLVYFPIVSGNYFKPFNVSYDHRALIIAGKRRMLVSAGIHYPRATPEMWSDLIAKSKEGGADVIQTYVFWNGHEPVKGQYNFEGRYDLVKFVKLIGSSGLYLHLRIGPYVCAEWNFGGFPVWLRDIPGIEFRTDNEPFKKEMQKFVTKIVDLMREAKLFCWQGGPIIMLQIENEYGDVEKSYGQKGKDYVKWAASMALGLGAGVPWVMCKQTDAPENIIDACNGYYCDGFKPNSRTKPILWTEDWDGWYTKWGGSLPHRPAEDLAFAVARFYQRGGSFQNYYMYFGGTNFGRTSGGPFYITSYDYDAPLDEYGLRSEPKWGHLKDLHAAIKLCEPALVAADAPQYRKLGSNQEAHIYHGDGETGGKVCAAFLANIDEHKSAHVKFNGQSYTLPPWSVSVLPDCRHVAFNTAKVGAQTSVKTVKSARPSLGSMSILQKVVRQDNVSYISKSWMALKEPIGIWGENNFTFQGLLEHLNVTKDRSDYLWHKTRISVSEDDISFWKINGANPTVSIDSMRDVLRVFVNKQLSGSIVGHWVKAVQPVRFIQGNNDLLLLTQTVGLQNYGAFLEKDGAGFRGKAKLTGFKNGDLDLSKSSWTYQVGLKGEADKIYTVEHNEKAEWSTLETDASPSIFMWYKTYFDPPAGTDPVVLDLESMGKGQAWVNGHHIGRYWNIISQKDGCDRTCDYRGAYNSDKCTTNCGKPTQTRYHIPRSWLKPSSNLLVLFEETGGNPFKISVKTVTAGILCGQVLESHYPPLRKWSTPDYINGTTLINSVAPEVHLHCEDGHVISSIEFASYGTPRGSCDGFSIGKCHASNSLSIVSEACKGRNSCFIEVSNTAFISDPCSGTLKTLTVMARCSPSQNMSDLSF

SEQ ID NO: 2481 - DNA, 3120 bp, Populus balsamifera subsp. trichocarpa
  misc_feature: Ceres Annot ID no. 1490015
  misc_feature: Encodes the peptide sequence at SEQ ID NO. 2482
atgatttcttcttcaagacttaaaatatccttctttcaatttctctctttttatctaattatccaattcaccctcatatcttccaactttttcgaaccgttcaatgttacttacgatcaccgtgctctcatcatcgacggccgccgccgcatactcaattccgccggaatccactatcctcgcgccactcccgagatgtggcctgatttgattgcaaaaagtaaggaaggtggagcagatgtggttcaaacttatgtattttggggcgggcatgagccagttaaaggacagtattactttgaagggagatatgatcttgtaaagtttgtgaagctagtgggtgaaagtggactctatcttcatcttcgcataggcccttatgtttgtgcagagtggaatttcgggggcttcccagtgtggttgcgagatgtccccggcgtagtctttagaacagataatgctccttttaaggaagagatgcagaagtttgttacaaagatagtagatctgatgagagaggaaatgctattatcttggcaaggtaccgtgagagaaacacgacatgaatgcgaggaaggagggattgttgggttgattgaaaacgaatatgggaatattgagcactcatttggccagggagggaaggaatacatgaaatgggctgctggaatggctttagcacttgacgctggggttccatgggtgatgtgcaagcaaactgatgctccagaaaacattatagatgcatgcaatggatactattgtgatggttttaaaccaaattcccctaagaaaccaatattttggaccgaagattgggatggatggtatacaacttggggtggaagattgcctcacaggcctgttgaagaccttgcctttgctgttgcacgcttttttcaacgtggagggagtttccagaattattatatggttaaaagattagaaatcattgtccccattgatgtgcacctgctgcatcttgataagtttcctgcttggctgcagtattttggtggaacaaacttcggccggacttctgggggtccattctatataactagttatgactatgatgctccaattgatgaatatggtttgttgagcgagcccaagtgggggcatttgaaagatttgcatgctgccataaagctttgtgaacctgctctagttgctgcagattcagctcagtatataaaactgggaccaaaacaagagaaaattggggagaaaaagtgtcctgattcttctggtattgtctcaattgcctttgcaattgatcaacaatcaaatgtagattgttgttctagatcaattgcaaagatgcataagaaataccaggtatcagcttcaccagcatcatcaccttcaccatttttagacctgatccaacagatccctgtgaaacaagcatcaccatttctaacactattcccgctagcacctgcccttgcacatgtgtacggtggaagtctaagcattcaaggcatgaatttctctcagtatggaagtcaaagcaagtgctctgcatttcttgctaatattgatgaacgtcaagcagctactgtgagattccttggtcaatcatttactttacctccatggtcagtgagtatattaccagactgcagaaatactgtcttcaacactgccaaggttgcagcacagactcatatcaagactgtggagtttgttttgcctctttcaaacagttctctacttccacaattcattgttcagaatgaagattctccacaatcaacatcctggctgattgccaaagagccaattactttgtggagtgaggagaattttactgtgaaaggcatattggagcatttgaatgtgacaaaggatgaatctgactatctgtggtatttcacaagagctatgcatttcatttgtccaatacagttactaatatatgtttctgatgatgacattgcattttgggagaaaaataaagtcagccctgcagtttcaatagatagcatgcgtgatgtgttgcgtgtatttatcaatggccagcttacaggcagtgtggttggtcattgggtcaaggcggtccagccagttcagtttcagaaaggatacaatgagttagtgttgttgtctcagacagttggattgcagaattacggtgccttcttagaaagagatggagcaggctttaaaggtcaaattaagcttactggatttaaaaatggggatatagacctctcaaacttatcatggacttaccagctatggcaacaaagtgcacgatgttttctctctcctaaaggtagaagactgagttgtttatttcttctaaaggttgggcttaagggtgagttccttaaagtttacagcacaggcgacaatgaaaagtttgaatggtctgaattggcagttgatgctactccatccacatttacctggtataagacattcttcgatgcaccatccggggttgacccagttgctcttgatttgggaagcatgggaaagggccaggcatgggtcaatggtcaccacataggaagatactggacagtggtttctccaaaagatggatgcggaagttgtgattatcgtggagcctacagttctggaaagtgtagaacaaattgtggcaatcctactcaaacctggtaccatgtccctcgggcatggttagaggcatcaaataatctacttgtcgtgtttgaggaaacaggagggaatccatttgagatttcagttaagttacggtcagcaaaagtgatttgtgctcaagtctcagagtcccattatccacctctcaggaagtggtcccgggcagatttaactggtgggaatatatcacgcaatgatatgacaccagaaatgcacttgaagtgtcaagatgggcatataatgtcctcaatagaatttgctagctatggaactcctaacggtagctgccagaagttttctaggggcaactgccatgcctccaattcttcttctgtggtcactgaggcttgccaggggaaaaataagtgtgatattgcgatttcgaatgctgtatttggagacccatgccgcggggttatcaagacactggccgttgaggcaagatgcatctcatcatcaaatattggttactctcgctactga

SEQ ID NO: 2482 - protein, 1039 aa, Populus balsamifera subsp. trichocarpa
  misc_feature (42)..(383): Pfam Name: Glyco_hydro_35 Pfam Description: Glycosyl hydrolases family 35
  misc_feature (952)..(1028): Pfam Name: Gal_Lectin Pfam Description: Galactose binding lectin domain
  misc_feature: Ceres Annot ID no. 1490015
  misc_feature: Bit score of 1950.6 for HMM based on sequences of Figure 23
  misc_feature: Functional Homolog Of SEQ ID NO. 2466
MISSSRLKISFFQFLSFYLIIQFTLISSNFFEPFNVTYDHRALIIDGRRRILNSAGIHYPRATPEMWPDLIAKSKEGGADVVQTYVFWGGHEPVKGQYYFEGRYDLVKFVKLVGESGLYLHLRIGPYVCAEWNFGGFPVWLRDVPGVVFRTDNAPFKEEMQKFVTKIVDLMREEMLLSWQGTVRETRHECEEGGIVGLIENEYGNIEHSFGQGGKEYMKWAAGMALALDAGVPWVMCKQTDAPENIIDACNGYYCDGFKPNSPKKPIFWTEDWDGWYTTWGGRLPHRPVEDLAFAVARFFQRGGSFQNYYMVKRLEIIVPIDVHLLHLDKFPAWLQYFGGTNFGRTSGGPFYITSYDYDAPIDEYGLLSEPKWGHLKDLHAAIKLCEPALVAADSAQYIKLGPKQEKIGEKKCPDSSGIVSIAFAIDQQSNVDCCSRSIAKMHKKYQVSASPASSPSPFLDLIQQIPVKQASPFLTLFPLAPALAHVYGGSLSIQGMNFSQYGSQSKCSAFLANIDERQAATVRFLGQSFTLPPWSVSILPDCRNTVFNTAKVAAQTHIKTVEFVLPLSNSSLLPQFIVQNEDSPQSTSWLIAKEPITLWSEENFTVKGILEHLNVTKDESDYLWYFTRAMHFICPIQLLIYVSDDDIAFWEKNKVSPAVSIDSMRDVLRVFINGQLTGSVVGHWVKAVQPVQFQKGYNELVLLSQTVGLQNYGAFLERDGAGFKGQIKLTGFKNGDIDLSNLSWTYQLWQQSARCFLSPKGRRLSCLFLLKVGLKGEFLKVYSTGDNEKFEWSELAVDATPSTFTWYKTFFDAPSGVDPVALDLGSMGKGQAWVNGHHIGRYWTVVSPKDGCGSCDYRGAYSSGKCRTNCGNPTQTWYHVPRAWLEASNNLLVVFEETGGNPFEISVKLRSAKVICAQVSESHYPPLRKWSRADLTGGNISRNDMTPEMHLKCQDGHIMSSIEFASYGTPNGSCQKFSRGNCHASNSSSVVTEACQGKNKCDIAISNAVFGDPCRGVIKTLAVEARCISSSNIGYSRY

SEQ ID NO: 2483 - protein, 916 aa, Physcomitrella patens subsp. patens
  misc_feature (38)..(344): Pfam Name: Glyco_hydro_35 Pfam Description: Glycosyl hydrolases family 35
  misc_feature (794)..(872): Pfam Name: Gal_Lectin Pfam Description: Galactose binding lectin domain
  misc_feature: Public GI ID no. 168045621
  misc_feature: Bit score of 1494.5 for HMM based on sequences of Figure 23
  misc_feature: Functional Homolog Of SEQ ID NO. 2466
MASLGYSLQLLFLLLSVTAFTTRACVRKPVNVTYDQRAVLIDGERRMLISAGIHYPRATPEMWPSIIQHAKDGGADVVQTYVFWNGHEPEQGQYNFEGRYDLVKFIKLVKQAGLYFHLRIGPYVCAEWNFGGFPYWLKEIPGIVFRTDNEPFKVAMQGFTSKIVNLMKENELFSWQGGPIIMAQIENEYGDIESQFGDGGKRYVQWAADMALSLDTRVPWIMCKQEDAPANIINTCNGFYCDGWKPNTALKPILWTEDWNGWFQNWGQAAPHRPVEDNAFAVARFFQRGGSFQNYYMYFGGTNFARTAGGPFMTTTYDYDAPIDEYGLIRQPKWGHLKDLHAAIKLCEPALTAVDTVPQSTWIGSNQEAHEYSANGHCAAFLANIDSENSVTVQFQGESYVLPAWSVSILPDCKNVAFNTAQIGAQTTVTRMRIAPSNSRGDIFLPSNTLVHDHISDGGVFANLKWQASAEPFGIRGSGTTVSNSLLEQLNITKDTSDYLWYSTSITITSEGVTSDVSGTEANLVLGTMRDAVHIFVNGKLAGSAMGWNIQVVQPITLKDGKNSIDLLSMTLGLQNYGAYLETWGAGIRGSVSVTGLPYGNLSLSTAEWSYQVGLRGEELKLFHNGTADGFSWDSSSFTNASYLTWYKTTFDAPGGTDPVALDLGSMGKGQAWINGHHLGRYFLMVAPQSGCETCDYRGAYNTNKCRTNCGEPSQRWQVIHFQMYHIPRAWLQATGNLLVLFEEIGGDISKVSVVTRSAHAVCAHINESQPPPIRTWRPHRSIDAFNNPAEMLLECAAGQHITKIKFASFGNPRGSCGHFQHGTCHANKSMEAVRKVCIGKQQCYIPVQRKFFGSIDPCPGVSKSLAVQVHCSPHKSPQASHEPVQPTYLDYQWQQPLGAYDNPSERKPSLLPESY

SEQ ID NO: 2484 - protein, 861 aa, Picea sitchensis
  misc_feature (37)..(343): Pfam Name: Glyco_hydro_35 Pfam Description: Glycosyl hydrolases family 35
  misc_feature (783)..(860): Pfam Name: Gal_Lectin Pfam Description: Galactose binding lectin domain
  misc_feature: Public GI ID no. 116787095
  misc_feature: Bit score of 1390.1 for HMM based on sequences of Figure 23
  misc_feature: Functional Homolog Of SEQ ID NO. 2466
MDLMRNLRLVLIYAFLFNGFYYWKHVSAANVTYDHRSLLIDGQRRVLISGSIHYPRSTPEMWPDIIQKAKDGGLDVIESYVFWNMHEPKQNEYYFEDRFDLVKFVKIVQQAGLLVHLRIGPYACAEWNYGGFPVWLHLIPGIHFRTDNEPFKNEMQRFTAKIVDMMKQEKLFASQGGPIILAQIENEYGNIDGPYGAAGKSYVKWAASMAVGLNTGVPWVMCQQADAPDPIINTCNGFYCDAFTPNSPNKPKMWTENWSGWFLSFGGRLPFRPTEDLAFSVARFFQRGGTFQNYYMYHGGTNFGRTTGGPFIATSYDYDAPIDEYGIVRQPKWGHLKELHKAIKLCEAALVNAESNYTSLGSGLEAHVYSPGSGTCAAFLANSNTQSDATVKFNGNSYHLPAWSVSILPDCKNVVFNTAKIGSQTTSVQMNPANLILAGSNSMKGTDSANAASWSWLHEQIGIGGSNTFSKPGLLEQINTTVDSSDYLWYTTSIQVDDNEPFLHNGTQPVLHVQSLGHALHVFINGEFAGRGAGSSSSSKIALQTPITLKSGKNNIDLLSITVGLQNYGSFFDTWGAGITGPVILQGFKDGEHDLSTQQWTYQIGLTGEQLGIYSGDTKASAQWVAGSDLPTKQPMIWYKTNFDAPSGNDPVALNLLGMGKGVAWVNGQSIGRYWPSYIASQSGCTDSCDYRGAYSSTKCQTNCGQPSQKLYHVPRSWIQPTGNVLVLFEELGGDPTQISFMTRSVGSLCAQVSETHLPPVDSWKSSATSGLEVNKPKAELQLHCPSSRHLIKSIKFASFGTSKGSCGSFTYGHCNTNSTMSIVEEACIGRESCSVEVSIEKFGDPCKGTVKNLAVEASCS

SEQ ID NO: 2485 - protein, 852 aa, Arabidopsis thaliana
  misc_feature (38)..(344): Pfam Name: Glyco_hydro_35 Pfam Description: Glycosyl hydrolases family 35
  misc_feature (774)..(851): Pfam Name: Gal_Lectin Pfam Description: Galactose binding lectin domain
  misc_feature: Public GI ID no. 6686888
  misc_feature: Bit score of 1367.7 for HMM based on sequences of Figure 23
  misc_feature: Functional Homolog Of SEQ ID NO. 2466
MEIAAKMVKVRKMEMILLLILVIVVAATAANVTYDHRALVIDGKRKVLISGSIHYPRSTPEMWPELIQKSKDGGLDVIETYVFWSGHEPEKNKYNFEGRYDLVKFVKLAAKAGLYVHLRIGPYVCAEWNYGGFPVWLHFVPGIKFRTDNEPFKEEMQRFTTKIVDLMKQEKLYASQGGPIILSQIENEYGNIDSAYGAAAKSYIKWSASMALSLDTGVPWNMCQQTDAPDPMINTCNGFYCDQFTPNSNNKPKMWTENWSGWFLGFGDPSPYRPVEDLAFAVARFYQRGGTFQNYYMYHGGTNFDRTSGGPLISTSYDYDAPIDEYGLLRQPKWGHLRDLHKAIKLCEDALIATDPTITSLGSNLEAAVYKTESGSCAAFLANVDTKSDATVTFNGKSYNLPAWSVSILPDCKNVAFNTAKINSATESTAFARQSLKPDGGSSAELGSQWSYIKEPIGISKADAFLKPGLLEQINTTADKSDYLWYSLRTDIKGDETFLDEGSKAVLHIESLGQVVYAFINGKLAGSGHGKQKISLDIPINLVTGTNTIDLLSVTVGLANYGAFFDLMGAGITGPVTLKSAKGGSSIDLASQQWTYQVGLKGEDTGLATVDSSEWVSKSPLPTKQPLIWYKTTFDAPSGSEPVAIDFTGTGKGIAWVNGQSIGRYWPTSIAGNGGCTESCDYRGSYRANKCLKNCGKPSQTLYHVPRSWLKPSGNILVLFEEMGGDPTQISFATKQTGSNLCLTVSQSHPPPVDTWTSDSKISNRNRTRPVLSLKCPISTQVIFSIKFASFGTPKGTCGSFTQGHCNSSRSLSLVQKACIGLRSCNVEVSTRVFGEPCRGVVKSLAVEASCS

SEQ ID NO: 2486 - protein, 851 aa, Raphanus sativus
  misc_feature (39)..(345): Pfam Name: Glyco_hydro_35 Pfam Description: Glycosyl hydrolases family 35
  misc_feature (773)..(850): Pfam Name: Gal_Lectin Pfam Description: Galactose binding lectin domain
  misc_feature: Public GI ID no. 56201401
  misc_feature: Bit score of 1358.0 for HMM based on sequences of Figure 23
  misc_feature: Functional Homolog Of SEQ ID NO. 2466
MVSTAKMVRGKKMEIVSLLVLVMMTAAATAASVTYDHRALVIDGKRKILISGSIHYPRSTPEMWPDLIQKSKDGGLDVIETYVFWNGHEPEKNKYNFEGRYDLVKFVKLAAKAGLYVHLRIGPYACAEWNYGGFPVWLHFVPGIKFRTDNEPFKAEMQRFTAKIVDLMKQEKLYASQGGPIILSQIENEYGNIDSSYGAAGKSYMKWSASMALSLDTGVPWNMCQQGDAPDPIINTCNGFYCDQFTPNSNNKPKMWTENWSGWFLGFGEPSPYRPVEDLAFAVARFFQRGGTFQNYYMYHGGTNFERTSGGPLISTSYDYDAPIDEYGLLRQPKWGHLRDLHKAIKLCEDALIATDPKITSLGSNLEAAVYKTSTGSCAAFLANIGTKSDATVTFNGKSYRLPAWSVSILPDCKNVAFNTAKINSATESTAFARQSLKPNADSSAELGSQWSYIKEPVGISKADAFVKPGLLEQINTTADKSDYLWYSLRMDIKGDETFLDEGSKAVLHVQSIGQLVYAFINGKLAGSGNGKQKISLDIPINLVTGKNTIDLLSVTVGLANYGPFFDLTGAGITGPVSLKSAKTGSSTDLSSQQWTYQVGLKGEDKGLGSGDSSEWVSNSPLPTSQPLIWYKTTFDAPSGSDPVAIDFTGTGKGIAWVNGQSIGRYWPTSIARTDGCVGSCDYRGSYRSNKCLKNCGKPSQTLYHVPRSWIKPSGNTLVLLEEMGGDPTKISFATKQTGSNLCLTVSQSHPAPVDTWISDSKFSNRTSPVLSLKCPVSTQVISSIRFASFGTPTGTCGSFSYGHCSSARSLSVVQKACVGSRSCKVEVSTRVFGEPCRGVVKSLAVEASCA

SEQ ID NO: 2487 - protein, 839 aa, Arabidopsis thaliana
  misc_feature (32)..(338): Pfam Name: Glyco_hydro_35 Pfam Description: Glycosyl hydrolases family 35
  misc_feature (761)..(838): Pfam Name: Gal_Lectin Pfam Description: Galactose binding lectin domain
  misc_feature: Public GI ID no. 4510395
  misc_feature: Bit score of 1353.9 for HMM based on sequences of Figure 23
  misc_feature: Functional Homolog Of SEQ ID NO. 2466
MVKVRKMEMILLLILVIVVAATAANVTYDHRALVIDGKRKVLISGSIHYPRSTPEMWPELIQKSKDGGLDVIETYVFWSGHEPEKNKYNFEGRYDLVKFVKLAAKAGLYVHLRIGPYVCAEWNYGGFPVWLHFVPGIKFRTDNEPFKEEMQRFTTKIVDLMKQEKLYASQGGPIILSQIENEYGNIDSAYGAAAKSYIKWSASMALSLDTGVPWNMCQQTDAPDPMINTCNGFYCDQFTPNSNNKPKMWTENWSGWFLGFGDPSPYRPVEDLAFAVARFYQRGGTFQNYYMYHGGTNFDRTSGGPLISTSYDYDAPIDEYGLLRQPKWGHLRDLHKAIKLCEDALIATDPTITSLGSNLEAAVYKTESGSCAAFLANVDTKSDATVTFNGKSYNLPAWSVSILPDCKNVAFNTAKVKFNSISKTPDGGSSAELGSQWSYIKEPIGISKADAFLKPGLLEQINTTADKSDYLWYSLRTDIKGDETFLDEGSKAVLHIESLGQVVYAFINGKLAGSGHGKQKISLDIPINLVTGTNTIDLLSVTVGLANYGAFFDLVGAGITGPVTLKSAKGGSSIDLASQQWTYQVGLKGEDTGLATVDSSEWVSKSPLPTKQPLIWYKTTFDAPSGSEPVAIDFTGTGKGIAWVNGQSIGRYWPTSIAGNGGCTESCDYRGSYRANKCLKNCGKPSQTLYHVPRSWLKPSGNILVLFEEMGGDPTQISFATKQTGSNLCLTVSQSHPPPVDTWTSDSKISNRNRTRPVLSLKCPISTQVIFSIKFASFGTPKGTCGSFTQGHCNSSRSLSLVQKACIGLRSCNVEVSTRVFGEPCRGVVKSLAVEASCS

SEQ ID NO: 2488 - protein, 956 aa, Oryza sativa subsp. japonica
  misc_feature (137)..(443): Pfam Name: Glyco_hydro_35 Pfam Description: Glycosyl hydrolases family 35
  misc_feature (878)..(955): Pfam Name: Gal_Lectin Pfam Description: Galactose binding lectin domain
  misc_feature: Public GI ID no. 115451981
  misc_feature: Bit score of 1338.7 for HMM based on sequences of Figure 23
  misc_feature: Functional Homolog Of SEQ ID NO. 2466
MHHHPHPRERDTAAFAPAAPLASLVAAAECVPFISVPPRHSNQQLLFFFFFFFFFFFFFSFASPTEQLCSSFLLLLLVIVRTSAGDNRTTPNGAAAAVMAAATVGVLLRLLLLPVVVVVSLLVGASRAANVTYDHRAVVIDGVRRVLVSGSIHYPRSTPDMWPGLIQKSKDGGLDVIETYVFWDIHEAVRGQYDFEGRKDLVRFVKAVADAGLYVHLRIGPYVCAEWNYGGFPVWLHFVPGIKFRTDNEAFKAEMQRFTEKVVDTMKGAGLYASQGGPIILSQIENEYGNIDSAYGAAGKAYMRWAAGMAVSLDTGVPWVMCQQSDAPDPLINTCNGFYCDQFTPNSKSKPKMWTENWSGWFLSFGGAVPYRPAEDLAFAVARFYQRGGTFQNYYMYHGGTNFGRSTGGPFIATSYDYDAPIDEYGMVRQPKWGHLRDVHKAIKLCEPALIAAEPSYSSLGQNTEATVYQTADNSICAAFLANVDAQSDKTVKFNGNTYKLPAWSVSILPDCKNVVLNTAQINSQVTTSEMRSLGSSIQDTDDSLITPELATAGWSYAIEPVGITKENALTKPGLMEQINTTADASDFLWYSTSIVVKGDEPYLNGSQSNLLVNSLGHVLQIYINGKLAGSAKGSASSSLISLQTPVTLVPGKNKIDLLSTTVGLSNYGAFFDLVGAGVTGPVKLSGPNGALNLSSTDWTYQIGLRGEDLHLYNPSEASPEWVSDNAYPTNQPLIWYKTKFTAPAGDDPVAIDFTGMGKGEAWVNGQSIGRYWPTNLAPQSGCVNSCNYRGAYSSNKCLKKCGQPSQTLYHVPRSFLQPGSNDLVLFEQFGGDPSMISFTTRQTSSICAHVSEMHPAQIDSWISPQQTSQTQGPALRLECPREGQVISNIKFASFGTPSGTCGNYNHGECSSSQALAVVQEACVGMTNCSVPVSSNNFGDPCSGVTKSLVVEAACS

SEQ ID NO: 2489 - protein, 861 aa, Oryza sativa subsp. indica
  misc_feature (39)..(348): Pfam Name: Glyco_hydro_35 Pfam Description: Glycosyl hydrolases family 35
  misc_feature (783)..(860): Pfam Name: Gal_Lectin Pfam Description: Galactose binding lectin domain
  misc_feature: Public GI ID no. 125543160
  misc_feature: Bit score of 1331.8 for HMM based on sequences of Figure 23
  misc_feature: Functional Homolog Of SEQ ID NO. 2466
MAAATVGVLLRLLLLPVVVVVSLLVGASRAANVTYDHRAVVIDGVRRVLVSGSIHYPRSTPDMWPGLIQKSKDGGLDVIETYVFWDIHEPVRGQAQQYDFEGRKDLVRFVKAVADAGLYVHLRIGPYVCAEWNYGGFPVWLHFVPGIKFRTDNEAFKAEMQRFTEKVVDTMKGAGLYASQGGPIILSQIENEYGNIDSAYGAAGKAYMRWAAGMAVSLDTGVPWVMCQQSDAPDPLINTCNGFYCDQFTPNSKSKPKMWTENWSGWFLSFGGAVPYRPAEDLAFAVARFYQRGGTFQNYYMYHGGTNFGRSTGGPFIATSYDYDAPIDEYGMVRQPKWGHLRDVHKAIKLCEPALIAAEPSYSSLGQNTEATVYQTADNSICAAFLANVDAQSDKAVKFNGNTYKLPAWSVSILPDCKNVVLNTAQINSQVTTSEMRSLGSSIQDTDDSLITPELATAGWSYAIEPVGITKENALTKPGLMEQINTTADASDFLWYSTSIVVKGDEPYLNGSQSNLLVNSLGHVLQVYINGKLAGSAKGSASSSLISLQTPVTLVPGKNKIDLLSTTVGLSNYGAFFDLIGAGVTGPVKLSGPNGALNLSSTDWTYQIGLRGEDLHLYNPSEASPEWVSDNAYPTNQPLIWYKTKFTAPAGDDPVAIDFTGMGKGEAWVNGQSIGRYWPTNLAPQSGCVNSCNYRGAYSSNKCLKKCGQPSQTLYHVPRSFLQPGSNDLVLFEQFGGDPSMISFTTRQTSSICAHVSEMHPAQIDSWISPQQTSQTPGPALRLECPREGQVISNIKFASFGTPSGTCGNYNHGECSSSQALAVVQEACVGMTNCSVPVSSNNFGDPCSGVTKSLVVEAACS

SEQ ID NO: 2490 - protein, 840 aa, Fragaria x ananassa
  misc_feature (36)..(342): Pfam Name: Glyco_hydro_35 Pfam Description: Glycosyl hydrolases family 35
  misc_feature (762)..(839): Pfam Name: Gal_Lectin Pfam Description: Galactose binding lectin domain
  misc_feature: Public GI ID no. 14970841
  misc_feature: Bit score of 1336.7 for HMM based on sequences of Figure 23
  misc_feature: Functional Homolog Of SEQ ID NO. 2466
MAVAMRGVEFKLVVLLVVGVLATASYCTTVSYDHRALVIDGKRRVLVSGSIHYPRSTPEMWPDLIQKSKDGGLDVIETYVFWNLHEPVRGQYNFEGRNDLVGFVKAVAEAGLYVHLRIGPYVCAEWNYGGFPLWLHFIPGIKLRTDNEPYKAEMHRFTAKIVEMMKNEKLYASQGGPIILSQIENEYGNIDKAYGPAAKTYINWAANMAVSLDTGVPWVMCQQADAPSSVINTCNGFYCDQFSPNSNSTPKIWTENWSGWFLSFGGAVPQRPVEDLAFAVARFYQRGGTFQNYYMYHGGTNFGRSSGGPFIATSYDYDAPLDEYGLLRQPKWGHLKDVHKAIKLCEPAMVATDPTISSLGQNIEAAVYKTGSVCSAFLANVDTKSDATVTFNGNSYQLPAWSVSILPDCKNVVINTAKINTATMVPSFTRQSISADVEPTEAVGSGWSWINEPVGISKGDAFTRVGLLEQINTTADKSDYLWYSTSIDVKGGYKADLHVQSLGHALHAFVNGKLAGSGTGNSGNAKVSVEIPVEFASGKNTIDLLSLTVGLQNYGAFFDLVGAGITGPVQLKGSANGTTIDLSSQQWTYQIGLKGEDEDLPSGSSQWISQPTLPKNQPLTWYKTQFDAPGGSNPVALDFTGMGKGEAWVNGQSIGRYWPTNVAPKTGCTDCNYRGAYSADKCRKNCGMPSQKLYHVPRSWMKSSGNTLVLFEEVGGDPTQLSFATRQVESLCSHVSESHPSPVDMWSSDSKAGSKSRPRLSLECPFPNQVISSIKFASYGRPSGTCGSFSHGSCRSSRALSIVQKACVGSKSCSIEVSTHTFGDPCKGLAKSLAVEASCK

SEQ ID NO: 2491 - protein, 861 aa, Oryza sativa subsp. japonica
  misc_feature (39)..(348): Pfam Name: Glyco_hydro_35 Pfam Description: Glycosyl hydrolases family 35
  misc_feature (783)..(860): Pfam Name: Gal_Lectin Pfam Description: Galactose binding lectin domain
  misc_feature: Public GI ID no. 125583741
  misc_feature: Bit score of 1329.5 for HMM based on sequences of Figure 23
  misc_feature: Functional Homolog Of SEQ ID NO. 2466
MAAATVGVLLRLLLLPVVVVVSLLVGASRAANVTYDHRAVVIDGVRRVLVSGSIHYPRSTPDMWPGLIQKSKDGGLDVIETYVFWDIHEAVRGQAQQYDFEGRKDLVRFVKAVADAGLYVHLRIGPYVCAEWNYGGFPVWLHFVPGIKFRTDNEAFKAEMQRFTEKVVDTMKGAGLYASQGGPIILSQIENEYGNIDSAYGAAGKAYMRWAAGMAVSLDTGVPWVMCQQSDAPDPLINTCNGFYCDQFTPNSKSKPKMWTENWSGWFLSFGGAVPYRPAEDLAFAVARFYQRGGTFQNYYMYHGGTNFGRSTGGPFIATSYDYDAPIDEYGMVRQPKWGHLRDVHKAIKLCEPALIAAEPSYSSLGQNTEATVYQTADNSICAAFLANVDAQSDKTVKFNGNTYKLPAWSVSILPDCKNVVLNTAQINSQVTTSEMRSLGSSIQDTDDSLITPELATAGWSYAIEPVGITKENALTKPGLMEQINTTADASDFLWYSTSIVVKGDEPYLNGSQSNLLVNSLGHVLQIYINGKLAGSAKGSASSSLISLQTPVTLVPGKNKIDLLSTTVGLSNYGAFFDLVGAGVTGPVKLSGPNGALNLSSTDWTYQIGLRGEDLHLYNPSEASPEWVSDNAYPTNQPLIWYKTKFTAPAGDDPVAIDFTGMGKGEAWVNGQSIGRYWPTNLAPQSGCVNSCNYRGAYSSNKCLKKCGQPSQTLYHVPRSFLQPGSNDLVLFEQFGGDPSMISFTTRQTSSICAHVSEMHPAQIDSWISPQQTSQTQGPALRLECPREGQVISNIKFASFGTPSGTCGNYNHGECSSSQALAVVQEACVGMTNCSVPVSSNNFGDPCSGVTKSLVVEAACS

SEQ ID NO: 2492 - DNA, 2604 bp, Sorghum bicolor
  misc_feature: Ceres Annot ID no. 8642086
  misc_feature: Encodes the peptide sequence at SEQ ID NO. 2493
atggcggccaccgcgcggcttcttcctgccttcgccgatgctgctgcggcggcggcggcgctgctggtggtggtgctctgcctcgcgggcggcgcgcgggcgaccaacgtgacgtacgaccaccgcgcgctggtcatcgacggcgtgcggcgcgtgctcgtctccggctccatccactacccacggagcacgcccgacatgtggccggggatcatccagaaggccaaggacggcggcctggacgtcatcgagacctacgtcttctgggacatccacgagcccgtcaggggacaggcacgtttaccgacatggcagtacgacttcgagggccgcaaggacctggccgcgttcgtcaagaccgtcgccgacgccggcctctacgtgcacctccgcatcggtccctacgtctgcgccgagtggaactacggaggcttcccgctgtggctgcacttcatccccggcatcaagttccgcaccgacaacgagcctttcaagacggagatgcagcgcttcaccgccaaggtggtggacaccatgaagggggcggggctgtacgcgtcgcagggcgggcccatcatcctgtcccagatcgaaaacgagtacggcaacatcgactcggcgtacggggcggccgggaaggcgtacatgcggtgggcggccggcatggccatctcgctcgacaccggcgtgccctgggtcatgtgccagcagaccgacgcgccggacccactcatcaacacctgcaacggcttctactgcgaccagttcacgcccaactccgccgccaagcccaagatgtggaccgagaactggagcggctggttcctctcattcggcggcgccgtcccctaccgccccgtcgaggacctggccttcgccgtcgccaggttctaccagcgcggcggcaccttccagaactactacatgtatcatggagggaccaacctcgaccgcagctcagggggacccttcatcgctacgagctacgactacgatgcccccatcgacgagtacggactagtcagggaaccaaagtggggccacttaagggatgtgcacaaagccatcaagctctgcgaaccagcgctcatagcaactgatccatcatacacttctctaggtcaaaatgctgaggcagcggtatacaagactggttcagtttgcgcagcattccttgccaacatagatggtcaatctgataaaaccgtcaccttcaatgggagaatgtacaggctccctgcgtggtctgtcagcatccttcctgactgcaagaatgtggtgcttaacacagcacagatcaattctcaagtgacgagttcagaaatgagatacttggaatcgagcaacatggcatcagatggctcattcatcacgccagaactggcagtatctggctggagctatgccatagagcctgtaggtattacaaaggacaatgcactaacaaaggctggactgatggagcagataaacaccacagcagatgccagtgatttcctctggtactcaacaagcatcacagttaaaggtgatgaaccctatctaaatggcagccagtccaatctggttgtcaactcacttggacatgttcttcaggtctacatcaatggtaaaattgcaggaagcgcacaaggtagtgcgagcagctcactcatctcatggcagaaaccaattgaacttgtacctgggaagaacaaaatagatcttctaagtgcaacagttgggctgtcgaattatggtgcattcttcgacctggtaggtgctggaattactgggccagtaaagctgagtggaacaaatggtgcactcgatctgtcttctgcagaatggacataccagattggactcagaggagaagatctgcacctatatgatccttcagaagcctcaccagaatgggtctcagccaatgcttatccaatcaatcaaccactgatttggtacaagaccaagttcacgcctcctgctggtgatgatcctgttgcaattgacttcacgggaatgggtaaaggcgaagcatgggtgaacggacagagcattggtcgatactggccaacaaatctggctccacagagtggctgtgtcaactcgtgcaactacagaggaagctacaattcaaacaaatgcctgaagaagtgtggccagccatcacagactttgtaccatgttccccgttcgtttcttcaaccaggcagcaatgatatagtccttttcgagcaatttggtggtgacccaagcaagatatcctttgtgataaggcagacaggaagtgtgtgcgcacaagtatcagaggaacatccagcccaaattgatagttggaattcttctcaacagacaatgcaaagatatggacctgaacttcgcctggaatgcccaaaagatggccaggtcatcagcagcatcaagtttgcaagctttgggacaccgagcggcacgtgtggaagctacagccacggcgaatgcagcagcactcaggctctctcagttgttcaggaggcttgcattggagtgagcagctgcagcgtgccagtgtcgtcgaattactttggaaatccatgcacaggggtcacaaaaagccttgcggttgaagctgcatgttcgtga

SEQ ID NO: 2493 - protein, 867 aa, Sorghum bicolor
  misc_feature (43)..(356): Pfam Name: Glyco_hydro_35 Pfam Description: Glycosyl hydrolases family 35
  misc_feature (789)..(866): Pfam Name: Gal_Lectin Pfam Description: Galactose binding lectin domain
  misc_feature: Ceres Annot ID no. 8642086
  misc_feature: Bit score of 1321.9 for HMM based on sequences of Figure 23
  misc_feature: Functional Homolog Of SEQ ID NO. 2466
MAATARLLPAFADAAAAAAALLVVVLCLAGGARATNVTYDHRALVIDGVRRVLVSGSIHYPRSTPDMWPGIIQKAKDGGLDVIETYVFWDIHEPVRGQARLPTWQYDFEGRKDLAAFVKTVADAGLYVHLRIGPYVCAEWNYGGFPLWLHFIPGIKFRTDNEPFKTEMQRFTAKVVDTMKGAGLYASQGGPIILSQIENEYGNIDSAYGAAGKAYMRWAAGMAISLDTGVPWVMCQQTDAPDPLINTCNGFYCDQFTPNSAAKPKMWTENWSGWFLSFGGAVPYRPVEDLAFAVARFYQRGGTFQNYYMYHGGTNLDRSSGGPFIATSYDYDAPIDEYGLVREPKWGHLRDVHKAIKLCEPALIATDPSYTSLGQNAEAAVYKTGSVCAAFLANIDGQSDKTVTFNGRMYRLPAWSVSILPDCKNVVLNTAQINSQVTSSEMRYLESSNMASDGSFITPELAVSGWSYAIEPVGITKDNALTKAGLMEQINTTADASDFLWYSTSITVKGDEPYLNGSQSNLVVNSLGHVLQVYINGKIAGSAQGSASSSLISWQKPIELVPGKNKIDLLSATVGLSNYGAFFDLVGAGITGPVKLSGTNGALDLSSAEWTYQIGLRGEDLHLYDPSEASPEWVSANAYPINQPLIWYKTKFTPPAGDDPVAIDFTGMGKGEAWVNGQSIGRYWPTNLAPQSGCVNSCNYRGSYNSNKCLKKCGQPSQTLYHVPRSFLQPGSNDIVLFEQFGGDPSKISFVIRQTGSVCAQVSEEHPAQIDSWNSSQQTMQRYGPELRLECPKDGQVISSIKFASFGTPSGTCGSYSHGECSSTQALSVVQEACIGVSSCSVPVSSNYFGNPCTGVTKSLAVEAACS

SEQ ID NO: 2494 - protein, 846 aa, Vitis vinifera
  misc_feature (32)..(338): Pfam Name: Glyco_hydro_35 Pfam Description: Glycosyl hydrolases family 35
  misc_feature (768)..(845): Pfam Name: Gal_Lectin Pfam Description: Galactose binding lectin domain
  misc_feature: Public GI ID no. 157337481
  misc_feature: Bit score of 1315.4 for HMM based on sequences of Figure 23
  misc_feature: Functional Homolog Of SEQ ID NO. 2466
MRGVGFVFVLVSLLGAIATTSFASTVTYDHRALVIDGKRRVLISGSIHYPRSTPDMWPDLIQKSKDGGLDVIETYVFWNLHEPVRRQYDFKGRNDLVKFVKTVAEAGLYVHLRIGPYVCAEWNYGGFPLWLHFIPGIQFRTDNGPFKEEMQIFTAKIVDMMKKENLYASQGGPIILSQIENEYGNIDSAYGSAAKSYIQWAASMATSLDTGVPWVMCQQADAPDPMINTCNGFYCDQFTPNSVKKPKMWTENWTGWFLSFGGAVPYRPVEDIAFAVARFFQLGGTFQNYYMYHGGTNFGRTTGGPFIATSYDYDAPIDEYGLLRQPKWGHLKDLHKAIKLCEAALIATDPTITSLGTNLEASVYKTGTGSCAAFLANVRTNSDATVNFSGNSYHLPAWSVSILPDCKNVALNTAQINSMAVMPRFMQQSLKNDIDSSDGFQSGWSWVDEPVGISKNNAFTKLGLLEQINITADKSDYLWYSLSTEIQGDEPFLEDGSQTVLHVESLGHALHAFINGKLAGSGTGNSGNAKVTVDIPVTLIHGKNTIDLLSLTVGLQNYGAFYDKQGAGITGPIKLKGLANGTTVDLSSQQWTYQVGLQGEELGLPSGSSSKWVAGSTLPKKQPLIWYKTTFDAPAGNDPVALDFMGMGKGEAWVNGQSIGRYWPAYVSSNGGCTSSCNYRGPYSSNKCLKNCGKPSQQLYHVPRSWLQPSGNTLVLFEEIGGDPTQISFATKQVESLCSRVSEYHPLPVDMWGSDLTTGRKSSPMLSLECPFPNQVISSIKFASFGTPRGTCGSFSHSKCSSRTALSIVQEACIGSKSCSIGVSIDTFGDPCSGIAKSLAVEASCT

SEQ ID NO: 2495 - protein, 842 aa, Pyrus pyrifolia
  misc_feature (28)..(335): Pfam Name: Glyco_hydro_35 Pfam Description: Glycosyl hydrolases family 35
  misc_feature (764)..(841): Pfam Name: Gal_Lectin Pfam Description: Galactose binding lectin domain
  misc_feature: Public GI ID no. 61162203
  misc_feature: Bit score of 1301.0 for HMM based on sequences of Figure 23
  misc_feature: Functional Homolog Of SEQ ID NO. 2466
MRILVVVLVLGVLATASYCAKVTYDHRALVIDGKRRVLVSGSIHYPRSTPEMWPDLIQKSKDGGLDVIETYVFWNLHEAVRGQYDFGGRKDLVKFVKTVAEAGLYVHLRIGPYVCAEWNYGGFPLWLHFIPGIQLRTDNEPFKAEMQRFTAKIVDMMKKEKLYASQGGPIILSQIENEYGNIDRAYGAAAQTYIKWAADMAVSLDTGVPWVMCQQDDAPPSVISTCNGFYCDQWTPRLPEKRPKMWTENWSGWFLSFGGAVPQRPVEDLAFAVARFFQRGGTFQNYYMYHGGTNFGRSTGGPFIATSYDYDAPIDEYGLLRQPKWGHLKDVHKAIKLCEEAMVATDPKYSSFGPNVEATVYKTGSACAAFLANSDTKSDATVTFNGNSYHLPAWSVSILPDCKNVVLNTAKINSAAMIPSFMHHSVLDDIDSSEALGSGWSWINEPVGISKKDAFTRVGLLEQINTTADKSDYLWYSLSIDVTSSDTFLQDGSQTILHVESLGHALHAFINGKPAGRGIITANNGKISVDIPVTFASGKNTIDLLSLTIGLQNYGAFFDKSGAGITGPVQLKGLKNGTTTDLSSQRWTYQIGLQGEDSGFSSGSSSQWISQPTLPKKQPLTWYKATFNAPDGSNPVALDFTGMGKGEAWVNGQSIGRYWPTNNAPTSGCPDSCNFRGPYDSNKCRKNCGKPSQELYHVPRSWLKPSGNTLVLFEEIGGDPTQISFATRQIESLCSHVSESHPSPVDTWSSDSKAGRKLGPVLSLECPFPNQVISSIKFASYGKPQGTCGSFSHGQCKSTSALSIVQKACVGSKSCSIEVSVKTFGDPCKGVAKSLAVEASCR

SEQ ID NO: 2496 - protein, 836 aa, Physcomitrella patens subsp. patens
  misc_feature (34)..(338): Pfam Name: Glyco_hydro_35 Pfam Description: Glycosyl hydrolases family 35
  misc_feature (758)..(835): Pfam Name: Gal_Lectin Pfam Description: Galactose binding lectin domain
  misc_feature: Public GI ID no. 168008096
  misc_feature: Bit score of 1248.7 for HMM based on sequences of Figure 23
  misc_feature: Functional Homolog Of SEQ ID NO. 2466
MVVSRFSLCLCLVLEVLLQNHLSVAVTVSYDHRALKLDGQRRMLVSGSIHYPRSTPLMWPGLIAKAKEGGLDVIQTYVFWNGHEPTRGVYNYAGRYNLPKFIRLVYEAGMYVNLRIGPYVCAEWNSGGFPAWLRFIPGIEFRTDNEPFKNETQRFVNHLVRKLKREKLFAWQGGPIIMAQIENEYGNIDASYGEAGQRYLNWIANMAVATNTSVPWIMCQQPEAPQLVINTCNGFYCDGWRPNSEDKPAFWTENWTGWFQSWGGGAPTRPVQDIAFSVARFFEKGGSFMNYYMYHGGTNFERTGVESVTTSYDYDAPIDEYDVRQPKWGHLKDLHAALKLCEPALVEVDTVPTGISLGPNQEAHVYQSSSGTCAAFLASWDTNDSLVTFQGQPYDLPAWSVSILPDCKSVVFNTAKVGAQSVIMTMQGAVPVTNWVSYHEPLGPWGSVFSTNGLLEQIATTKDTTDYLWYMTNVQVAESDVRNISAQATLVMSSLRDAAHTFVNGFYTGTSHQQFMHARQPISLRPGSNNITVLSMTMGLQGYGPFLENEKAGIQYGVRIEDLPSGTIELGGSTWTYQVGLQGESKQLFEVNGSLTAEWNTISEVSDQNFLFWIKTRFDMPAGNGSIALDLSSMGKGVVWVNGVNLGRYWSSFTAQRDGCDASCDYRGSYTQSKCLTKCNQPSQNWYHIPRQWLLPKNNFIVLFEEKGGNPKDISIATRMPQQICSHISQSHPFPFSLTSWTKRDNLTSTLLRAPLTLECAEGQQISRICFASYGTPSGDCEGFVLSSCHANTSYDVLTKACVGRQKCSVPIVSSIFGDDPCPGLSKSLAATAECS

SEQ ID NO: 2497 - protein, 838 aa, Solanum lycopersicum
  misc_feature (33)..(339): Pfam Name: Glyco_hydro_35 Pfam Description: Glycosyl hydrolases family 35
  misc_feature (760)..(837): Pfam Name: Gal_Lectin Pfam Description: Galactose binding lectin domain
  misc_feature: Public GI ID no. 7939619
  misc_feature: Bit score of 1222.8 for HMM based on sequences of Figure 23
  misc_feature: Functional Homolog Of SEQ ID NO. 2466
MGCTLILMLNVLLVLLGSWVFSGTASVSYDHRAIIVNGQRRILISGSVHYPRSTPEMWPGIIQKAKEGGVDVIQTYVFWNGHEPQQGKYYFEGRYDLVKFIKLVHQAGLYVHLRVGPYACAEWNFGGFPVWLKYVPGISFRTDNGPFKAAMQKFTAKIVNMMKAERLYETQGGPIILSQIENEYGPMEWELGAPGKSYAQWAAKMAVGLDTGVPWVMCKQDDAPDPIINACNGFYCDYFSPNKAYKPKIWTEAWTAWFTGFGNPVPYRPAEDLAFSVAKFIQKGGSFINYYMYHGGTNFGRTAGGPFIATSYDYDAPLDEYGLLRQPKWGHLKDLHRAIKLCEPALVSGDPAVTALGHQQEAHVFRSKAGSCAAFLANYDQHSFATVSFANRHYNLPPWSISILPDCKNTVFNTARIGAQSAQMKMTPVSRGLPWQSFNEETSSYEDSSFTVVGLLEQINTTRDVSDYLWYSTDVKIDSREKFLRGGKWPWLTIMSAGHALHVFVNGQLAGTAYGSLEKPKLTFSKAVNLRAGVNKISLLSIAVGLPNIGPHFETWNAGVLGPVSLTGLDEGKRDLTWQKWSYKVGLKGEALSLHSLSGSSSVEWVEGSLVAQRQPLTWYKSTFNAPAGNDPLALDLNTMGKGQVWINGQSLGRYWPGYKASGNCGACNYAGWFNEKKCLSNCGEASQRWYHVPRSWLYPTGNLLVLFEEWGGEPHGISLVKREVASVCADINEWQPQLVNWQMQASGKVDKPLRPKAHLSCASGQKITSIKFASFGTPQGVCGSFREGSCHAFHSYDAFERYCIGQNSCSVPVTPEIFGGDPCPHVMKKLSVEVICS

SEQ ID NO: 2498 - protein, 842 aa, Petunia x hybrida
  misc_feature (37)..(343): Pfam Name: Glyco_hydro_35 Pfam Description: Glycosyl hydrolases family 35
  misc_feature (764)..(841): Pfam Name: Gal_Lectin Pfam Description: Galactose binding lectin domain
  misc_feature: Public GI ID no. 183238710
  misc_feature: Bit score of 1234.9 for HMM based on sequences of Figure 23
  misc_feature: Functional Homolog Of SEQ ID NO. 2466
MMVINMVSRLVMWNVLLVLLSSCVFSGLASVSYDHKAIIVNGQRRILISGSIHYPRSTPEMWPDLIQKAKEGGVDVIQTYVFWNGHEPEQGKYYFEERYDLVKFIKLVHQAGLYVNLRVGPYACAEWNFGGFPVWLKYVPGISFRTDNEPFKAAMQKFTTKIVNMMKAERLYESQGGPIILSQIENEYGPLEVRFGEQGKSYAEWAAKMALDLGTGVPWLMCKQDDAPDPVINTCNGFYCDYFYPNKAYKPKIWTEAWTAWFTEFGSPVPYRPVEDLAFGVANFIQTGGSFINYYMYHGGTNFGRTAGGPFVATSYDYDAPLDEFGLLRQPKWGHLKDLHRAIKLCEPALVSGDPTVTALGNYQKAHVFRSTSGACAAFLANNDPNSFATVAFGNKHYNLPPWSISILPDCKHTVYNTARVGAQSALMKMTPANEGYSWQSYNDQTAFYDDNAFTVVGLLEQLNTTRDVSDYLWYMTDVKIDPSEGFLRSGNWPWLTVSSAGDALHVFVNGQLAGTVYGSLKKQKITFSKAVNLRAGVNKISLLSIAVGLPNIGPHFETWNTGVLGPVSLSGLDEGKRDLTWQKWSYKVGLKGEALNLHSLSGSSSVEWVEGSLVAQRQPLTWYKTTFNAPAGNEPLALDMNSMGKGQVWINGQSIGRYWPGYKASGTCDACNYAGPFNEKKCLSNCGDASQRWYHVPRSWLHPTGNLLVVFEEWGGDPNGISLVKRELASVCADINEWQPQLVNWQLQASGKVDKPLRPKAHLSCTSGQKITSIKFASFGTPQGVCGSFSEGSCHAHHSYDAFEKYCIGQESCTVPVTPEIFGGDPCPSVMKKLSVEAVCS

SEQ ID NO: 2499 - protein, 852 aa, Solanum lycopersicum
  misc_feature (39)..(347): Pfam Name: Glyco_hydro_35 Pfam Description: Glycosyl hydrolases family 35
  misc_feature (774)..(851): Pfam Name: Gal_Lectin Pfam Description: Galactose binding lectin domain
  misc_feature: Public GI ID no. 7939623
  misc_feature: Bit score of 1286.9 for HMM based on sequences of Figure 23
  misc_feature: Functional Homolog Of SEQ ID NO. 2466
MERRSGYCLSVIMLVFGVVFLHCLVMTSFAANVTYDHRALVVDGRRRVLISGSIHYPRSTPDMWPDLIQKSKDGGLDVIETYVFWNLHEPVRNQYDFEGRKDLINFVKLVERAGLFVHIRIGPYVCAEWNYGGFPLWLHFIPGIEFRTDNEPFKAEMKRFTAKIVDMIKQENLYASQGGPVILSQIENEYGNGDIESRYGPRAKPYVNWAASMATSLNTGVPWVMCQQPDAPPSVINTCNGFYCDQFKQNSDKTPKMWTENWTGWFLSFGGPVPYRPVEDIAFAVARFFQRGGTFQNYYMYHGGTNFGRTSGGPFIATSYDYDAPLDEYGLINQPKWGHLKDLHKAIKLCEAAMVATEPNVTSLGSNIEVSVYKTDSQCAAFLANTATQSDAAVSFNGNSYHLPPWSVSILPDCKNVAFSTAKINSASTISTFVTRSSEADASGGSLSGWTSVNEPVGISNENAFTRMGLLEQINTTADKSDYLWYSLSVNIKNDEPFLQDGSATVLHVKTLGHVLHAYINGRLSGSGKGNSRHSNFTIEVPVTLVPGENKIDLLSATVGLQNYGAFFDLKGAGITGPVQLKGFKNGSTTDLSSKQWTYQVGLKGEDLGLSNGGSTLWKSQTALPTNQPLIWYKASFDAPAGDTPLSMDFTGMGKGEAWVNGQSIGRFWPAYIAPNDGCTDPCNYRGGYNAEKCLKNCGKPSQLLYHVPRSWLKSSGNVLVLFEEMGGDPTKLSFATREIQSVCSRTSDAHPLPIDMWASEDDARKKSGPTLSLECPHPNQVISSIKFASFGTPQGTCGSFIHGRCSSSNALSIVKKACIGSKSCSLGVSINAFGDPCKGVAKSLAVEASCT

SEQ ID NO: 2500 - protein, 849 aa, Persea americana
  misc_feature (45)..(351): Pfam Name: Glyco_hydro_35 Pfam Description: Glycosyl hydrolases family 35
  misc_feature (771)..(848): Pfam Name: Gal_Lectin Pfam Description: Galactose binding lectin domain
  misc_feature: Public GI ID no. 114217395
  misc_feature: Bit score of 1260.9 for HMM based on sequences of Figure 23
  misc_feature: Functional Homolog Of SEQ ID NO. 2466
MGLILEITTSSSNSNRSLLSLITISLLLLTYLSPATCSVSYDHKAIIINGQRRILISGSIHYPRSTPEMWPDLIQKAKDGGLDVIQTYVFWNGHEPSPGEYYFEGRYDLVKFIKLVKEAGLYVHLRIGPYACAEWNFGGFPVWLKYIPGISFRTDNEPFKTAMAGFTKKIVDMMKEEELFETQGGPIILSQIENEYGPVEWEIGAPGQAYTKWAANMAVGLGTGVPWVMCKQDDAPDPIINTCNDHYCDWFSPNKNYKPTMWTEAWTSWFTAFGGPVPYRPAEDMAFAIAKFIQRGGSFINYYMYHGGTNFGRTAGGPFVATSYDYDAPIDEYGLIRQPKWGHLKDLHKAIKMCEAALVSGDPIVTSLGSSQESHVFKSESGDCAAFLANYDEKSFAKVAFQGMHYNLPPWSISILPDCVNTVFNTARVGAQTSSMTMTSVNPDGFSWETYNEETASYDDASITMEGLLEQINVTRDVTDYLWYTTDITIDPNEGFLKNGEYPVLTVMSAGHALHIFINGELSGTVYGSVDNPKLTYTGSVKLLAGNNKISVLSIAVGLPNIGAHFETWNTGVLGPVVLNGLNEGRRDLSWQNWSYKIGLKGEALQLHSLTGSSSVEWSSLIAQKQPLTWYKTTFNAPEGNGPFALDMSMMGKGQIWINGQSIGRYWPAYKAYGNCGECSYTGRYNEKKCLANCGEASQRWYHVPSSWLYPTANLLVVFEEWGGDPTGISLVRRTTGSACAFISEWHPTLRKWHIKDYGRAERPRRPKAHLSCADGQKISSIKFASFGTPQGVCGNFTEGSCHAHKSYDIFEKNCVGQQWCSVTISPDVFGGDPCPNVMKNLAVEAICQ

SEQ ID NO: 2501 - DNA, 2523 bp, Populus balsamifera subsp. trichocarpa
  misc_feature: Ceres Annot ID no. 1515371
  misc_feature: Encodes the peptide sequence at SEQ ID NO. 2502
atgagaggaagggatcagattcttcagctgctgctcctgtatgtgtttttgtctgtgcttctaacattagcaacgacgtcctatggagtcaatgtgacttacgatcatagggccttgttgattgatggaaaacgcagagtcttggtctccggttccattcattatcctcgcagtacagtcgagatgtgggctgaccttatacaaaaatctaaagatggagggttggacgttattgagacttatgttttctggaatgcacacgagcctgttcaaaaccagtataattttgaaggaagatatgatctggtgaaatttatcaagttagtgggagaagctggactttatgctcatcttcggattggtcctgggtttcctctttggttgcattttgtaccgggaatcaagtttcgaactgataacgagccattcaaggctgagatgcagcggtttacggccaagattgtggacatgatgaagcaggagaagctttatgcatctcaaggagggcccatcattttatcgcagattgaaaatgagtacggaaacattgattcatcctatggacctgctgctaaaagctatatcaattgggcagcaagcatggctgtgtctctggatactggagttccctgggttatgtgccagcaagcagatgctcctgatcccattataaacacctgcaatggattctactgtgaccagttcacccccaattctaaaaacaaacccaagatgtggactgagaattggagtggatggttcctttcctttggcggtgctgttccctatagacctgttgaagaccttgcatttgctgtggcacggttttaccagctaggggggacttttcaaaactattatatgtaccatggtgggactaactttggccggagtactggtggaccttttatttctacaagttatgattacgatgctcctcttgatgaatacggacttacaagacaacctaagtggggtcatctgaaggatttgcataagtccataaagctttgtgaagaagcattggtggcgactgatccagtaacttcatctctaggtcaaaacttggaggctactgtttataaaaccggaactgggctatgctctgcttttctagccaattttggcacatctgacaaaactgtaaatttcaatggcaattcgtataacttgcctggttggtctgtgagcatcttaccagactgcaagaatgtagctcttaatacagcaaagattaactctatgacagtgattccaaactttgtacatcaatctctaattggagatgcggattctgctgatacactcggctctagctggagttggatatatgaaccagtaggtatctcaaagaatgatgcattcgtgaaacctggactattggagcagataaatactacagctgataaaagtgactacttatggtactcactgagtactgttatcaaagataatgagccttttcttgaagatggatctcaaactgttcttcatgtggagtctcttggccacgcccttcatgcttttgttaatggaaagcttgcaggtagtggaacaggaaatgctggcaatgctaaggttgcagtggagattcctgtcacactcttacctgggaagaacactatcgatctccttagtttgactgcaggacttcagaactatggagctttttttgagttagagggtgcagggattactggtccagtaaaactggaaggcctgaaaaatggcactactgttgacctttcttcattgcagtggacatatcagattggacttaaaggtgaagaattaggcctgtctagtggaaattctcaatgggttacacaacctgccttgcccacgaagcagcctttgatctggtacaagaccagtttcaatgcccctgctggaaatgacccaattgcaattgatttctcggggatggggaagggtgaggcatgggtgaatggacaaagcattggacgttattggcccaccaaggtgtctccaactagtggttgctccaactgcaattacagaggatcttacagttcaagcaaatgtctcaagaactgtgcaaagccttctcagacattataccatgtgccccgttcatgggtggaatcaagtggcaacactcttgtgttgtttgaggaaattggaggggatccaactcagatagctttcgctacaaaacagagcgcaagtttgtgctcacacgtgtcagagtctcacccattacccgtagatatgtggagctcaaattcagaagcagaaagaaaagcagggccagtactatcattggagtgcccctttcctaatcaggtcatttcttcaatcaaatttgcaagctttggaaccccccgaggaacttgtgggagtttcagtcacggccagtgcaaaagcactagggccctttctattgtacagaaggcttgcatcggatcaaagagttgcagcattggagcatcagccagtacatttggtgacccatgcaggggagtagcaaagagtttagcagttgaagcttcctgcgcataa

SEQ ID NO: 2502 - protein, 840 aa, Populus balsamifera subsp. trichocarpa
  misc_feature (38)..(335): Pfam Name: Glyco_hydro_35 Pfam Description: Glycosyl hydrolases family 35
  misc_feature (762)..(839): Pfam Name: Gal_Lectin Pfam Description: Galactose binding lectin domain
  misc_feature: Ceres Annot ID no. 1515371
  misc_feature: Bit score of 1284.3 for HMM based on sequences of Figure 23
  misc_feature: Functional Homolog Of SEQ ID NO. 2466
MRGRDQILQLLLLYVFLSVLLTLATTSYGVNVTYDHRALLIDGKRRVLVSGSIHYPRSTVEMWADLIQKSKDGGLDVIETYVFWNAHEPVQNQYNFEGRYDLVKFIKLVGEAGLYAHLRIGPGFPLWLHFVPGIKFRTDNEPFKAEMQRFTAKIVDMMKQEKLYASQGGPIILSQIENEYGNIDSSYGPAAKSYINWAASMAVSLDTGVPWVMCQQADAPDPIINTCNGFYCDQFTPNSKNKPKMWTENWSGWFLSFGGAVPYRPVEDLAFAVARFYQLGGTFQNYYMYHGGTNFGRSTGGPFISTSYDYDAPLDEYGLTRQPKWGHLKDLHKSIKLCEEALVATDPVTSSLGQNLEATVYKTGTGLCSAFLANFGTSDKTVNFNGNSYNLPGWSVSILPDCKNVALNTAKINSMTVIPNFVHQSLIGDADSADTLGSSWSWIYEPVGISKNDAFVKPGLLEQINTTADKSDYLWYSLSTVIKDNEPFLEDGSQTVLHVESLGHALHAFVNGKLAGSGTGNAGNAKVAVEIPVTLLPGKNTIDLLSLTAGLQNYGAFFELEGAGITGPVKLEGLKNGTTVDLSSLQWTYQIGLKGEELGLSSGNSQWVTQPALPTKQPLIWYKTSFNAPAGNDPIAIDFSGMGKGEAWVNGQSIGRYWPTKVSPTSGCSNCNYRGSYSSSKCLKNCAKPSQTLYHVPRSWVESSGNTLVLFEEIGGDPTQIAFATKQSASLCSHVSESHPLPVDMWSSNSEAERKAGPVLSLECPFPNQVISSIKFASFGTPRGTCGSFSHGQCKSTRALSIVQKACIGSKSCSIGASASTFGDPCRGVAKSLAVEASCA

SEQ ID NO: 2503 - protein, 841 aa, Prunus persica
  misc_feature (34)..(340): Pfam Name: Glyco_hydro_35 Pfam Description: Glycosyl hydrolases family 35
  misc_feature (763)..(840): Pfam Name: Gal_Lectin Pfam Description: Galactose binding lectin domain
  misc_feature: Public GI ID no. 157313304
  misc_feature: Bit score of 1242.3 for HMM based on sequences of Figure 23
  misc_feature: Functional Homolog Of SEQ ID NO. 2466
MGLRLVMWNVLVLLVVLCSWVGSAKASVSYDSKAIVINGQRRILISGSIHYPRSSPEMWPDLIQKAKEGGLDVIQTYVFWNGHEPSPGKYYFEDNYDLVKFIKLIQQAGLYVHLRIGPYVCAEWNFGGFPVWLKYIPGIQFRTDNGPFKAQMQRFTTKIVNMMKAERLFQSQGGPIILSQIENEYGPMEYELGAPGKVYTDWAAHMALGLGTGVPWVMCKQDDAPDPIINACNGFYCDYFSPNKAYKPKMWTEAWTGWYTEFGGAVPSRPAEDLAFSVARFIQKGGSFINYYMYHGGTNFGRTAGGPFIATSYDYDAPLDEYGLLRQPKWGHLKDLHRAIKLCEPALVSADPTVTPLGTYQEAHVFKSKSGACAAFLANYNPRSFAKVAFGNMHYNLPPWSISILPDCKNTVYNTARVGAQSAQMKMPRVPLHGAFSWQAYNDETATYADTSFTTAGLLEQINTTRDSSDYLWYLTDVKIDPNEEFLRSGKYPVLTILSAGHALRVFINGQLAGTSYGSLEFPKLTFSQGVNLRAGINQIALLSIAVGLPNVGPHFETWNAGVLGPVILNGLNEGRRDLSWQKWSYKVGLKGEALSLHSLSGSSSVEWIQGSLVTRRQPLTWYKTTFNAPAGNSPLALDMGSMGKGQVWINGRSIGRYWPAYKASGSCGACNYAGSYHEKKCLSNCGEASQRWYHVPRTWLNPTGNLLVVLEEWGGDPNGIFLVRREIDSICADIYEWQPNLMSWQMQASGKVKKPVRPKAHLSCGPGQKISSIKFASFGTPEGGCGSFREGSCHAHNSYDAFQRSCIGQNSCSVTVAPENFGGDPCPNVMKKLSVEAICS

SEQ ID NO: 2504 - DNA, 2568 bp, Populus balsamifera subsp. trichocarpa
  misc_feature: Ceres Annot ID no. 1462072
  misc_feature: Encodes the peptide sequence at SEQ ID NO. 2505
atgagaggaagggatcagattcttcagctgctgctcctgtatgtgtttttgtctgtgcttctaacattagcaacgacgtcctatggagtcaatgtgacttacgatcatagggccttgttgattgatggaaaacgcagagtcttggtctccggttccattcattatcctcgcagtacagtcgagatgtgggctgaccttatacaaaaatctaaagatggagggttggacgttattgagacttatgttttctggaatgcacacgagcctgttcaaaaccagtataattttgaaggaagatatgatctggtgaaatttatcaagttagtgggagaagctggactttatgctcatcttcggattggtcctgggtttcctctttggttgcattttgtaccgggaatcaagtttcgaactgataacgagccattcaaggctgagatgcagcggtttacggccaagattgtggacatgatgaagcaggagaagctttatgcatctcaaggagggcccatcattttatcgcagattgaaaatgagtacggaaacattgattcatcctatggacctgctgctaaaagctatatcaattgggcagcaagcatggctgtgtctctggatactggagttccctgggttatgtgccagcaagcagatgctcctgatcccattataaacacctgcaatggattctactgtgaccagttcacccccaattctaaaaacaaacccaagatgtggactgagaattggagtggatggttcctttcctttggcggtgctgttccctatagacctgttgaagaccttgcatttgctgtggcacggttttaccagctaggggggacttttcaaaactattatatgtaccatggtgggactaactttggccggagtactggtggaccttttatttctacaagttatgattacgatgctcctcttgatgaatacggacttacaagacaacctaagtggggtcatctgaaggatttgcataagtccataaagctttgtgaagaagcattggtggcgactgatccagtaacttcatctctaggtcaaaacttggaggctactgtttataaaaccggaactgggctatgctctgcttttctagccaattttggcacatctgacaaaactgtaaatttcaatggcaattcgtataacttgcctggttggtctgtgagcatcttaccagactgcaagaatgtagctcttaatacagcaaagtatgtcttaccagactgcaagaatgtagctcttaataccgcaaagattaactctatgacagtgattccaaactttgtacatcaatctctaattggagatgcggattctgctgatacactcggctctagctggagttggatatatgaaccagtaggtatctcaaagaatgatgcattcgtgaaacctggactattggagcagataaatactacagctgataaaagtgactacttatggtactcactgagtactgttatcaaagataatgagccttttcttgaagatggatctcaaactgttcttcatgtggagtctcttggccacgcccttcatgcttttgttaatggaaagcttgcaggtagtggaacaggaaatgctggcaatgctaaggttgcagtggagattcctgtcacactcttacctgggaagaacactatcgatctccttagtttgactgcaggacttcagaactatggagctttttttgagttagagggtgcagggattactggtccagtaaaactggaaggcctgaaaaatggcactactgttgacctttcttcattgcagtggacatatcagattggacttaaaggtgaagaattaggcctgtctagtggaaattctcaatgggttacacaacctgccttgcccacgaagcagcctttgatctggtacaagaccagtttcaatgcccctgctggaaatgacccaattgcaattgatttctcggggatggggaagggtgaggcatgggtgaatggacaaagcattggacgttattggcccaccaaggtgtctccaactagtggttgctccaactgcaattacagaggatcttacagttcaagcaaatgtctcaagaactgtgcaaagccttctcagacattataccatgtgccccgttcatgggtggaatcaagtggcaacactcttgtgttgtttgaggaaattggaggggatccaactcagatagctttcgctacaaaacagagcgcaagtttgtgctcacacgtgtcagagtctcacccattacccgtagatatgtggagctcaaattcagaagcagaaagaaaagcagggccagtactatcattggagtgcccctttcctaatcaggtcatttcttcaatcaaatttgcaagctttggaaccccccgaggaacttgtgggagtttcagtcacggccagtgcaaaagcactagggccctttctattgtacagaaggcttgcatcggatcaaagagttgcagcattggagcatcagccagtacatttggtgacccatgcaggggagtagcaaagagtttagcagttgaagcttcctgcgcataa

SEQ ID NO: 2505 - protein, 855 aa, Populus balsamifera subsp. trichocarpa
  misc_feature (38)..(335): Pfam Name: Glyco_hydro_35 Pfam Description: Glycosyl hydrolases family 35
  misc_feature (777)..(854): Pfam Name: Gal_Lectin Pfam Description: Galactose binding lectin domain
  misc_feature: Ceres Annot ID no. 1462072
  misc_feature: Bit score of 1291.1 for HMM based on sequences of Figure 23
  misc_feature: Functional Homolog Of SEQ ID NO. 2466
MRGRDQILQLLLLYVFLSVLLTLATTSYGVNVTYDHRALLIDGKRRVLVSGSIHYPRSTVEMWADLIQKSKDGGLDVIETYVFWNAHEPVQNQYNFEGRYDLVKFIKLVGEAGLYAHLRIGPGFPLWLHFVPGIKFRTDNEPFKAEMQRFTAKIVDMMKQEKLYASQGGPIILSQIENEYGNIDSSYGPAAKSYINWAASMAVSLDTGVPWVMCQQADAPDPIINTCNGFYCDQFTPNSKNKPKMWTENWSGWFLSFGGAVPYRPVEDLAFAVARFYQLGGTFQNYYMYHGGTNFGRSTGGPFISTSYDYDAPLDEYGLTRQPKWGHLKDLHKSIKLCEEALVATDPVTSSLGQNLEATVYKTGTGLCSAFLANFGTSDKTVNFNGNSYNLPGWSVSILPDCKNVALNTAKYVLPDCKNVALNTAKINSMTVIPNFVHQSLIGDADSADTLGSSWSWIYEPVGISKNDAFVKPGLLEQINTTADKSDYLWYSLSTVIKDNEPFLEDGSQTVLHVESLGHALHAFVNGKLAGSGTGNAGNAKVAVEIPVTLLPGKNTIDLLSLTAGLQNYGAFFELEGAGITGPVKLEGLKNGTTVDLSSLQWTYQIGLKGEELGLSSGNSQWVTQPALPTKQPLIWYKTSFNAPAGNDPIAIDFSGMGKGEAWVNGQSIGRYWPTKVSPTSGCSNCNYRGSYSSSKCLKNCAKPSQTLYHVPRSWVESSGNTLVLFEEIGGDPTQIAFATKQSASLCSHVSESHPLPVDMWSSNSEAERKAGPVLSLECPFPNQVISSIKFASFGTPRGTCGSFSHGQCKSTRALSIVQKACIGSKSCSIGASASTFGDPCRGVAKSLAVEASCA

SEQ ID NO: 2506 - protein, 835 aa, Solanum lycopersicum
  misc_feature (30)..(336): Pfam Name: Glyco_hydro_35 Pfam Description: Glycosyl hydrolases family 35
  misc_feature (757)..(834): Pfam Name: Gal_Lectin Pfam Description: Galactose binding lectin domain
  misc_feature: Public GI ID no. 1352077
  misc_feature: Bit score of 1211.5 for HMM based on sequences of Figure 23
  misc_feature: Functional Homolog Of SEQ ID NO. 2466
MGFWMAMLLMLLLCLWVSCGIASVSYDHKAIIVNGQRKILISGSIHYPRSTPEMWPDLIQKAKEGGVDVIQTYVFWNGHEPEEGKYYFEERYDLVKFIKVVQEAGLYVHLRIGPYACAEWNFGGFPVWLKYVPGISFRTNNEPFKAAMQKFTTKIVDMMKAEKLYETQGGPIILSQIENEYGPMEWELGEPGKVYSEWAAKMAVDLGTGVPWIMCKQDDVPDPIINTCNGFYCDYFTPNKANKPKMWTEAWTAWFTEFGGPVPYRPAEDMAFAVARFIQTGGSFINYYMYHGGTNFGRTSGGPFIATSYDYDAPLDEFGSLRQPKWGHLKDLHRAIKLCEPALVSVDPTVTSLGNYQEARVFKSESGACAAFLANYNQHSFAKVAFGNMHYNLPPWSISILPDCKNTVYNTARVGAQSAQMKMTPVSRGFSWESFNEDAASHEDDTFTVVGLLEQINITRDVSDYLWYMTDIEIDPTEGFLNSGNWPWLTVFSAGHALHVFVNGQLAGTVYGSLENPKLTFSNGINLRAGVNKISLLSIAVGLPNVGPHFETWNAGVLGPVSLNGLNEGTRDLTWQKWFYKVGLKGEALSLHSLSGSPSVEWVEGSLVAQKQPLSWYKTTFNAPDGNEPLALDMNTMGKGQVWINGQSLGRHWPAYKSSGSCSVCNYTGWFDEKKCLTNCGEGSQRWYHVPRSWLYPTGNLLVVFEEWGGDPYGITLVKREIGSVCADIYEWQPQLLNWQRLVSGKFDRPLRPKAHLKCAPGQKISSIKFASFGTPEGVCGNFQQGSCHAPRSYDAFKKNCVGKESCSVQVTPENFGGDPCRNVLKKLSVEAICS

SEQ ID NO: 2507 - protein, 796 aa, Oryza sativa subsp. japonica
  misc_feature (1)..(283): Pfam Name: Glyco_hydro_35 Pfam Description: Glycosyl hydrolases family 35
  misc_feature (718)..(795): Pfam Name: Gal_Lectin Pfam Description: Galactose binding lectin domain
  misc_feature: Public GI ID no. 108707233
  misc_feature: Bit score of 1176.5 for HMM based on sequences of Figure 23
  misc_feature: Functional Homolog Of SEQ ID NO. 2466
MWPGLIQKSKDGGLDVIETYVFWDIHEAVRGQYDFEGRKDLVRFVKAVADAGLYVHLRIGPYVCAEWNYGGFPVWLHFVPGIKFRTDNEAFKAEMQRFTEKVVDTMKGAGLYASQGGPIILSQIENEYGNIDSAYGAAGKAYMRWAAGMAVSLDTGVPWVMCQQSDAPDPLINTCNGFYCDQFTPNSKSKPKMWTENWSGWFLSFGGAVPYRPAEDLAFAVARFYQRGGTFQNYYMYHGGTNFGRSTGGPFIATSYDYDAPIDEYGMVRQPKWGHLRDVHKAIKLCEPALIAAEPSYSSLGQNTEATVYQTADNSICAAFLANVDAQSDKTVKFNGNTYKLPAWSVSILPDCKNVVLNTAQINSQVTTSEMRSLGSSIQDTDDSLITPELATAGWSYAIEPVGITKENALTKPGLMEQINTTADASDFLWYSTSIVVKGDEPYLNGSQSNLLVNSLGHVLQIYINGKLAGSAKGSASSSLISLQTPVTLVPGKNKIDLLSTTVGLSNYGAFFDLVGAGVTGPVKLSGPNGALNLSSTDWTYQIGLRGEDLHLYNPSEASPEWVSDNAYPTNQPLIWYKTKFTAPAGDDPVAIDFTGMGKGEAWVNGQSIGRYWPTNLAPQSGCVNSCNYRGAYSSNKCLKKCGQPSQTLYHVPRSFLQPGSNDLVLFEQFGGDPSMISFTTRQTSSICAHVSEMHPAQIDSWISPQQTSQTQGPALRLECPREGQVISNIKFASFGTPSGTCGNYNHGECSSSQALAVVQEACVGMTNCSVPVSSNNFGDPCSGVTKSLVVEAACS

SEQ ID NO: 2508 - DNA, 3069 bp, Panicum virgatum
  misc_feature: Ceres Clone ID no. 1860044
  misc_feature: Encodes the peptide sequence at SEQ ID NO. 2509
aaccatcgcgcccctcctccatttccaggcagcagccgagcgagcgatctcttccccatcgcctcatcttgctttgttccatcggcgggagcagccgcgttcccggacgccgggtgggcaggaaccgccggccccggacacggaaaagcagggctccctgaccaaccgccgcggaccgtctccatttttaaccgcgccgcggcgggcaccaccgccgtctccaccgcaccggaacgcgccgcgcgggaaataacaaggccggaaagcgatcagatcggccgcggcgagggcgcgggggcaccgcgagcgacctgccgcgcccgcgctccgtcccgcggcagccgggtcgaccgtcgtccggaccgcgatgaggggaggtttccttttcgtttcttttcctctccttcgcgtgccgcccccaccaccgagcgactcctccacccctgtggccagtggtgacctccgcccccgcgctcactccacctccagcctccagctgctgctactctactaatactgaatacccgggcggtgcgggctctgcctttagctaccacaccgaacgcgccgcgtcccggaggaggaggaggcggtgctctttgtctcttctaccttcctcctttcctcctcccgcggcgggcggcggcggcggcggcaatggcggccaccgcgctgctcctttccgcggcggcggcggtgctgctatgcctcgcgggcggctcgcgggcgaccaacgtgacgtacgaccaccgcgcgctggtcatcgacggcgtgcgccgagtgctcgtctcgggatccatccactacccgcggagcacccccgacatgtggccggggctgatccagaaggccaaggacggcggcctggacgtcatcgagacctacgtcttctgggacatccacgagcccgtccggggacagtacgacttcgagggccgcaaggacctggccgcgttcgtcaaggccgtcgccgacgccggcctctacgtgcacctccgcatcgggccctacgtctgcgccgagtggaactacgggggcttcccgctgtggctgcacttcatccccggcgtcaagttccgcaccgacaacgagcccttcaaggcggagatgcagcgcttcaccgccaaggtggtggacaccatgaagggggcgggcctctacgcgtcccagggcgggcccatcatcctgtcacagatcgagaacgagtacggcaacatcgactcggcgtacggggcggccgggaaggcgtacatgcggtgggcggccgggatggccgtctcgctcgacaccggcgtgccctgggtcatgtgccagcaggccgacgcgccggaccccctcatcaacacctgcaacggcttctactgcgacgggttcacgcccaactccgcggccaagcccaagatgtggaccgagaactggagcggctggttcctctccttcggcggcgccgtcccctaccgccccgccgaggacctcgccttcgccgtcgcgcgcttctaccagcgcggcggcaccttccagaactactacatgtaccatggcgggaccaacctggatcgcagcgcagggggacccttcatcgccacgagctacgactacgatgcacccatcgacgagtacggactagtcaggcagccgaagtggggccacttgagggatgtgcacaaggccataaagctctgcgagccagcgctcatagcaactgatccatcatacatttctctaggtcaaaacgctgaggcagctgtatacaaggccggttcagtttgcgccgcgttccttgctaacatagatggtcaatccgacaaaactgtcacattcaatggcaagatgtacaagctccctgcgtggtccgtcagcatccttcctgactgcaagaatgtggtgctgaacacggctcagatcaactctcaagtgacaagttcagaaatgaggtacttggagtcgagtactgtagcatcagatggctctttcaccacgccagaactcgcagtatctggctggagctatgccatagaacctgttggtatcacaaaggataatgcattgacaaaagctggactgatggagcagataaacaccacagcagatgccagtgacttcctctggtactcaacaagcattactgttaaaggtgatgaaccttatctaaatggcagccaatccaatctgcttgtaagctcacttgggcatgttcttcaggtctacgtgaatggtaaaattgcaggaagcgctcaaggtagtgctagcagctcactcatctcctggcagaaatcaattacacttgtacctgggaagaacaaaatagatcttctgagtgcaacagttgggctgtcgaattatggtgcattctttgacctggtaggtgctggaattactgggccagtaaagctgagtggaccaaatggtgcactcgatctgtcttctgcacaatggacataccagattggactcagaggtgaagatttgcacctgtatgatccctcagaggcctcaccagaatgggtctcatccaatgcttatccaatcaaccaaccactaatttggtacaagacaaaattcacagcccctgcaggtgatgatcctgttgccattgacttcacaggattggggaaaggtgaagcctgggtgaacgggcaaagcattggtcgatactggccaacaaatatagctccacagagcggctgtgttaactcgtgcaactatagaggatcctacacttcgagcaaatgcctcaagaagtgtgggcagccatcacagactttgtaccatgttccccgttcgtttctccaaccaggcagcaatgatatagtccttttcgagcagttcggtggtgacccaagcaagatatcctttgtgacaaggcagacaggaagtttatgcgcacaagtgtcagaagcgcatccagcccaaattgatagctggatttcttctcaacagaagatgcagagatctggacctgcacttcgcctggaatgcccgaaagaaggtcaggtcatcagcagcatcaagtttgcaagctttgggacaccaagcggcacatgcgggagctacagccatagcgaatgc

SEQ ID NO: 2509 - protein, 804 aa, Panicum virgatum
  misc_feature (33)..(339): Pfam Name: Glyco_hydro_35 Pfam Description: Glycosyl hydrolases family 35
  misc_feature (772)..(804): Pfam Name: Gal_Lectin Pfam Description: Galactose binding lectin domain
  misc_feature: Ceres Clone ID no. 1860044
  misc_feature: Bit score of 1186.5 for HMM based on sequences of Figure 23
  misc_feature: Functional Homolog Of SEQ ID NO. 2466
MAATALLLSAAAAVLLCLAGGSRATNVTYDHRALVIDGVRRVLVSGSIHYPRSTPDMWPGLIQKAKDGGLDVIETYVFWDIHEPVRGQYDFEGRKDLAAFVKAVADAGLYVHLRIGPYVCAEWNYGGFPLWLHFIPGVKFRTDNEPFKAEMQRFTAKVVDTMKGAGLYASQGGPIILSQIENEYGNIDSAYGAAGKAYMRWAAGMAVSLDTGVPWVMCQQADAPDPLINTCNGFYCDGFTPNSAAKPKMWTENWSGWFLSFGGAVPYRPAEDLAFAVARFYQRGGTFQNYYMYHGGTNLDRSAGGPFIATSYDYDAPIDEYGLVRQPKWGHLRDVHKAIKLCEPALIATDPSYISLGQNAEAAVYKAGSVCAAFLANIDGQSDKTVTFNGKMYKLPAWSVSILPDCKNVVLNTAQINSQVTSSEMRYLESSTVASDGSFTTPELAVSGWSYAIEPVGITKDNALTKAGLMEQINTTADASDFLWYSTSITVKGDEPYLNGSQSNLLVSSLGHVLQVYVNGKIAGSAQGSASSSLISWQKSITLVPGKNKIDLLSATVGLSNYGAFFDLVGAGITGPVKLSGPNGALDLSSAQWTYQIGLRGEDLHLYDPSEASPEWVSSNAYPINQPLIWYKTKFTAPAGDDPVAIDFTGLGKGEAWVNGQSIGRYWPTNIAPQSGCVNSCNYRGSYTSSKCLKKCGQPSQTLYHVPRSFLQPGSNDIVLFEQFGGDPSKISFVTRQTGSLCAQVSEAHPAQIDSWISSQQKMQRSGPALRLECPKEGQVISSIKFASFGTPSGTCGSYSHSEC

SEQ ID NO: 2510 - protein, 847 aa, Arabidopsis thaliana
  misc_feature (40)..(346): Pfam Name: Glyco_hydro_35 Pfam Description: Glycosyl hydrolases family 35
  misc_feature (769)..(846): Pfam Name: Gal_Lectin Pfam Description: Galactose binding lectin domain
  misc_feature: Public GI ID no. 15231354
  misc_feature: Bit score of 1220.5 for HMM based on sequences of Figure 23
  misc_feature: Functional Homolog Of SEQ ID NO. 2466
MGSKPNAMKNVVAMAAVSALFLLGFLVCSVSGSVSYDSRAITINGKRRILISGSIHYPRSTPEMWPDLIRKAKEGGLDVIQTYVFWNGHEPSPGKYYFEGNYDLVKFVKLVQQSGLYLHLRIGPYVCAEWNFGGFPVWLKYIPGISFRTDNGPFKAQMQRFTTKIVNMMKAERLFESQGGPIILSQIENEYGPMEYELGAPGRSYTNWAAKMAVGLGTGVPWVMCKQDDAPDPIINACNGFYCDYFSPNKAYKPKMWTEAWTGWFTKFGGPVPYRPAEDMAFSVARFIQKGGSFINYYMYHGGTNFGRTAGGPFIATSYDYDAPLDEYGLERQPKWGHLKDLHRAIKLCEPALVSGEPTRMPLGNYQEAHVYKSKSGACSAFLANYNPKSYAKVSFGNNHYNLPPWSISILPDCKNTVYNTARVGAQTSRMKMVRVPVHGGLSWQAYNEDPSTYIDESFTMVGLVEQINTTRDTSDYLWYMTDVKVDANEGFLRNGDLPTLTVLSAGHAMHVFINGQLSGSAYGSLDSPKLTFRKGVNLRAGFNKIAILSIAVGLPNVGPHFETWNAGVLGPVSLNGLNGGRRDLSWQKWTYKVGLKGESLSLHSLSGSSSVEWAEGAFVAQKQPLTWYKTTFSAPAGDSPLAVDMGSMGKGQIWINGQSLGRHWPAYKAVGSCSECSYTGTFREDKCLRNCGEASQRWYHVPRSWLKPSGNLLVVFEEWGGDPNGITLVRREVDSVCADIYEWQSTLVNYQLHASGKVNKPLHPKAHLQCGPGQKITTVKFASFGTPEGTCGSYRQGSCHAHHSYDAFNKLCVGQNWCSVTVAPEMFGGDPCPNVMKKLAVEAVCA

SEQ ID NO: 2511 - protein, 847 aa, Arabidopsis thaliana
  misc_feature (40)..(346): Pfam Name: Glyco_hydro_35 Pfam Description: Glycosyl hydrolases family 35
  misc_feature (769)..(846): Pfam Name: Gal_Lectin Pfam Description: Galactose binding lectin domain
  misc_feature: Public GI ID no. 20260596
  misc_feature: Bit score of 1218.5 for HMM based on sequences of Figure 23
  misc_feature: Functional Homolog Of SEQ ID NO. 2466
MGSKPNAMKNVVAMAAVSALFLLGFLVCSVSGSVSYDSRAITINGKRRILISGSIHYPRSTPEMWPDLIRKAKEGGLDVIQTYVFWNGHEPSPGKYYFEGNYDLVKFVKLVQQSGLYLHLRIGPYVCAEWNFGGFPVWLKYIPGISFRTDNGPFKAQMQRFTTKIVNMMKAERLFESQGGPIILSQIENEYGPMEYELGAPGRSYTNWAAKMAVGLGTGVPWVMCKQDDAPDPIINACNGFYCDYFSPNKAYKPKMWTEAWTGWFTKFGGPVPYRPAEDMAFSVARFIQKGGSFINYYMYHGGTNFGRTAGGPFIATSYDYDAPLDEYGLERQPKWGHLKDLHRAIKLCEPALVSGEPTRMPLGNYQEAHVYKSKSGACSAFLANYNPKSYAKVSFGNNHYNLPPWSISILPDCKNTVYNTARVGAQTSRMKMVRVPVHGGLSWQAYNEDPSTYIDESFTMVGLVEQINTTRDTSDYLWYMTDVKVDANEGFLRNGDLPTLTVLSAGHAMHLFINGQLSGSAYGSLDSPKLTFRKGVNLRAGFNKIAILSIAVGLPNVGPHFETWNAGVLGPVSLNGLNGGRRDLSWQKWTYKVGLKGESLSLHSLSGSSSVEWAEGAFVAQKQPLTWYKTTFSAPAGDSPLAVDMGSMGKGQIWINGQSLGRHWPAYKAVGSCSECSYTGTFREDKCLRNCGEASQRWYHVPRSWLKPSGNLLVVFEEWGGDPNGITLVRREVDSVCADIYEWQSTLVNYQLHASGKVNKPLHPKAHLQCGPGQKITTVKFASFGTPEGTCGSYRQGSCHAHHSYDAFNKLCVGQNWCSVTVAPEMFGGDPCPNVMKKLAVEAVCA

SEQ ID NO: 2512 - protein, 843 aa, Fragaria x ananassa
  misc_feature (36)..(342): Pfam Name: Glyco_hydro_35 Pfam Description: Glycosyl hydrolases family 35
  misc_feature (765)..(842): Pfam Name: Gal_Lectin Pfam Description: Galactose binding lectin domain
  misc_feature: Public GI ID no. 14970839
  misc_feature: Bit score of 1220.1 for HMM based on sequences of Figure 23
  misc_feature: Functional Homolog Of SEQ ID NO. 2466
MGLRLVMWNVVVAAALVVLCSCFASVRASVSYDSKAIVINGQRRILISGSIHYPRSTPEMWPDLIQRAKDGGLDVIQTYVFWNGHEPSPGKYYFEDNYDLVKFIKLVQQAGLYVHLRIGPYVCAEWNFGGFPVWLKYVPGIQFRTDNGPFKDQMQRFTTKIVNMMKAERLFESHGGPIILSQIENEYGPMEYEIGAPGKAYTDWAAQMAVGLGTGVPWVMCKQDDAPDPVINACNGFYCDYFSPNKAYKPKMWTEAWTGWFTEFGGAVPYRPAEDLAFSVAKFLQKGGAFINYYMYHGGTNFGRTAGGPFIATSYDYDAPLDEYGLLRQPKWGHLKDLHRAIKLCEPALVSSDPTVTPLGTYQEAHVFKSNSGACAAFLANYNRKSFAKVAFGNMHYNLPPWSISILPDCKNTVYNTARIGAQTARMKMPRVPIHGGFSWQAYNDETATYSDTSFTTAGLLEQINITRDATDYLWYMTDVKIDPSEDFLRSGNYPVLTVLSAGHALRVFINGQLAGTAYGSLETPKLTFKQGVNLRAGINQIALLSIAVGLPNVGPHFETWNAGILGPVILNGLNEGRRDLSWQKWSYKIGLKGEALSLHSLTGSSSVEWTEGSFVAQRQPLTWYKTTFNRPAGNSPLALDMGSMGKGQVWINDRSIGRYWPAYKASGTCGECNYAGTFSEKKCLSNCGEASQRWYHVPRSWLNPTGNLLVVLEEWGGDPNGIFLVRREVDSVCADIYEWQPNLMSWQMQVSGRVNKPLRPKAHLSCGPGQKISSIKFASFGTPEGVCGSFREGGCHAHKSYNAFERSCIGQNSCSVTVSPENFGGDPCPNVMKKLSVEAICS

SEQ ID NO: 2513 - protein, 847 aa, Vitis vinifera
  misc_feature (42)..(348): Pfam Name: Glyco_hydro_35 Pfam Description: Glycosyl hydrolases family 35
  misc_feature (769)..(846): Pfam Name: Gal_Lectin Pfam Description: Galactose binding lectin domain
  misc_feature: Public GI ID no. 157340015
  misc_feature: Bit score of 1225.7 for HMM based on sequences of Figure 23
  misc_feature: Functional Homolog Of SEQ ID NO. 2466
MGSKLGMWEGLRAKTVSFLVVVVVLSSLVCWVTASVSYDRRAIVINGQRRILISGSIHYPRSSPEMWPDLIQKAKEGGLDVIQTYVFWNGHEPSQGKYYFEGRYDLVRFIKLVKQAGLYVNLRIGPYVCAEWNFGGFPVWLKYVQGINFRTNNEPFKWHMQRFTKKIVDMMKSEGLFESQGGPIILSQIENEYGPMEYEIGAPGRAYTEWAAKMAVGLGTGVPWVMCKQDDAPDPIINTCNGFYCDYFSPNKAYKPKMWTEAWTGWFTEFGGAVPHRPAEDLAFSVARFIQKGGSFINYYMYHGGTNFGRTAGGPFIATSYDYDAPLDEFGLLRQPKWGHLKDLHRAIKLCEPALISGDPTVTSLGNYEEAHVFHSKSGACAAFLANYNPRSYAKVSFRNMHYNLPPWSISILPDCKNTVYNTARLGAQSATMKMTPVSGRFGWQSYNEETASYDDSSFAAVGLLEQINTTRDVSDYLWYSTDVKIGYNEGFLKSGRYPVLTVLSAGHALHVFINGRLSGTAYGSLENPKLTFSQGVKLRAGVNTIALLSIAVGLPNVGPHFETWNAGVLGPVSLNGLNEGRRDLSWQKWSYKVGLKGEALSLHSLSGSSSVEWVEGSLMARGQPLTWYKTTFNAPGGNTPLALDMGSMGKGQIWINGQNVGRYWPAYKATGGCGDCNYAGTYSEKKCLSNCGEPSQRWYHVPHSWLSPTGNLLVVFEESGGNPAGISLVEREIESVCADIYEWQPTLMNYEMQASGKVNKPLRPKAHLWCAPGQKISSIKFASFGTPEGVCGSYREGSCHAHKSYDAFERSCIGMNSCSVTVAPEIFGGDPCPSVMKKLSVEAICS

SEQ ID NO: 2514 - protein, 846 aa, Populus x generosa
  misc_feature (39)..(345): Pfam Name: Glyco_hydro_35 Pfam Description: Glycosyl hydrolases family 35
  misc_feature (768)..(845): Pfam Name: Gal_Lectin Pfam Description: Galactose binding lectin domain
  misc_feature: Public GI ID no. 118488890
  misc_feature: Bit score of 1220.4 for HMM based on sequences of Figure 23
  misc_feature: Functional Homolog Of SEQ ID NO. 2466
MALKKTSMCNSSNALLVLLFLVSSLACSVTASVSYDSKAITINGQRRILISGSIHYPRSSPEMWPDLIQKAKEGGLDVIQTYVFWNGHEPSPGKYYFEGNYDLVKFVKLAKEAGLYVHLRIGPYICAEWNFGGFPVWLKYIPGINFRTDNGPFKAQMQKFTTKIVNMMKAERLFETQGGPIILSQIENEYGPMEYEIGSPGKAYTKWAAEMAVGLRTGVPWVMCKQDDAPDPIINTCNGFYCDYFSPNKAYKPKMWTEAWTGWFTQFGGPVPHRPAEDMAFSVARFIQKGGSFINYYMYHGGTNFGRTAGGPFIATSYDYDAPLDEYGLLRQPKWGHLKDLHRAIKLCEPALVSGDATVIPLGNYQEAHVFNYKAGGCAAFLANYHQRSFAKVSFRNMHYNLPPWSISILPDCKNTVYNTARVGAQSARMKMTPVPMHGGFSWQAYNEEPSASGDSTFTMVGLLEQINTTRDVSDYLWYMTDVHIDPSEGFLRSGKYPVLGVLSAGHALHVFINGQLSGTAYGSLDFPKLTFTQGVKLRAGVNKISLLSIAVGLPNVGPHFETWNAGILGPVTLNGLNEGRRDLSWQKWSYKIGLHGEALGLHSISGSSSVEWAEGSLVAQRQPLSWYKTTFNAPAGNSPLALDMGSMGKGQIWINGQHVGRHWPAYKASGTCGDCSYIGTYNEKKCSTNCGEASQRWYHVPQSWLKPTGNLLVVFEEWGGDPNGISLVRRDVDSVCADIYEWQPTLMNYQMQASGKVNKPLRPKAHLSCGPGQKIRSIKFASFGTPEGVCGSYRQGSCHAFHSYDAFNNLCVGQNSCSVTVAPEMFGGDPCLNVMKKLAVEAICS

SEQ ID NO: 2515 - DNA, 2541 bp, Populus balsamifera subsp. trichocarpa
  misc_feature: Ceres Annot ID no. 1540596
  misc_feature: Encodes the peptide sequence at SEQ ID NO. 2516
atggctttgaagaagacatcaatgtgcaatagcagtaatgcgttgctggttttattgtttttggtgagttctttggcctgttctgtcactgcctctgtgtcttatgactctaaggccatcaccattaatggccaaagaaggattcttatttctggatccattcactacccaagaagttcccctgagatgtggccagatcttattcagaaggcaaaagaaggaggactggatgttattcagacatatgttttttggaatgggcatgaaccttcaccaggaaagtattattttgaggggaactatgatctggtcaagtttgttaagctggcgaaggaagcaggcctttatgttcatctcaggattggaccttatatctgtgctgagtggaactttgggggtttcccagtttggctcaagtacattccaggcatcaatttcagaacagacaatggccctttcaaggctcaaatgcagaagttcacaacaaaggttgttaacatgatgaaagcagaaaggttatttgagactcaaggtggtccaataattctctcccagattgagaatgaatatggacccatggagtatgaaattggttcacctggtaaagcttacaccaaatgggctgcagaaatggctgtaggtctccgtactggtgtcccatgggtcatgtgcaagcaagatgatgccccagatcctattatcaacacctgcaatggtttctactgtgattacttctctccaaacaaagcttacaaaccaaagatgtggactgaagcttggactggctggtttacccaatttggtggcccagttcctcaccgaccggctgaagacatggcattttcggttgcaaggttcatacagaagggggggtcattcataaactattatatgtatcatggagggacaaattttggccgaactgctggtggtcctttcattgcaacaagttacgattatgatgctcctcttgatgaatatggactgttaaggcagcctaaatggggccatttgaaagatttgcatcgggcaattaagctgtgtgaacccgctttagtatctggagatgcaactgtgataccacttggaaattaccaagaggctcatgtattcaattataaggccggaggttgtgcagcattccttgcaaattaccatcagagatcatttgcaaaggtgtcatttaggaatatgcattataacctgcctccatggtccatcagcattcttccagattgcaagaacactgtttacaacactgcaagggttggagctcaaagtgcaaggatgaagatgacccctgttcctatgcatggagggttctcttggcaagcatataatgaagagccgtctgcaagtggtgatagcacattcactatggttgggttgctggagcaaataaatacaactagagatgtttcagactatttgtggtacatgacagacgttcatatcgaccccagcgaaggctttctgaggagtggaaaatatcctgttcttggtgttctatcagctgggcacgctttacatgttttcatcaatggtcaactatcagggaccgcctatggaagtttagatttcccaaagttgacatttactcaaggtgtaaagttgagagctggcgtcaacaaaatttctcttctcagcattgctgttggtctcccgaatgttggcccacactttgagacatggaatgctggtattcttggacctgtgacgttgaatggtctcaatgagggaagaagggacttgtcctggcagaagtggtcttacaagattggtcttcatggggaagcattgggtctccattcaatcagtgggagttcctcggttgagtgggcagagggatctttggtggcccaaagacagccactgtcatggtataaaactactttcaacgctcctgctgggaattcccctttggcattggatatgggcagcatgggaaaaggccagatatggataaatggacaacatgttggacgtcactggcctgcttataaagcatctggaacatgtggggactgtagttatattggaacttataatgaaaagaaatgctcaactaattgtggcgaggcttcccagagatggtatcatgtccctcagtcatggctaaagccaacagggaacttgctggttgtgtttgaagaatggggtggagatccaaatgggatttctttggttagaagagatgtagacagtgtgtgcgctgatatttatgagtggcagccaactttgatgaattatcagatgcaagcatctggtaaagtcaataagccactgaggcctaaagctcatctgtcatgtggccctggacagaaaatcagatcaatcaagtttgccagctttgggacaccagaaggggtttgtggtagctatcgccagggaagctgtcatgccttccactcttatgatgcttttaacaatctttgtgttgggcagaattcatgctcggtgactgtagcacctgaaatgtttgggggagatccttgcctgaatgtcatgaagaaactagcagtagaggccatttgcagctga

SEQ ID NO: 2516 - protein, 839 aa, Populus balsamifera subsp. trichocarpa
  misc_feature (32)..(338): Pfam Name: Glyco_hydro_35 Pfam Description: Glycosyl hydrolases family 35
  misc_feature (761)..(838): Pfam Name: Gal_Lectin Pfam Description: Galactose binding lectin domain
  misc_feature: Ceres Annot ID no. 1540596
  misc_feature: Bit score of 1216.5 for HMM based on sequences of Figure 23
  misc_feature: Functional Homolog Of SEQ ID NO. 2466
MCNSSNALLVLLFLVSSLACSVTASVSYDSKAITINGQRRILISGSIHYPRSSPEMWPDLIQKAKEGGLDVIQTYVFWNGHEPSPGKYYFEGNYDLVKFVKLAKEAGLYVHLRIGPYICAEWNFGGFPVWLKYIPGINFRTDNGPFKAQMQKFTTKVVNMMKAERLFETQGGPIILSQIENEYGPMEYEIGSPGKAYTKWAAEMAVGLRTGVPWVMCKQDDAPDPIINTCNGFYCDYFSPNKAYKPKMWTEAWTGWFTQFGGPVPHRPAEDMAFSVARFIQKGGSFINYYMYHGGTNFGRTAGGPFIATSYDYDAPLDEYGLLRQPKWGHLKDLHRAIKLCEPALVSGDATVIPLGNYQEAHVFNYKAGGCAAFLANYHQRSFAKVSFRNMHYNLPPWSISILPDCKNTVYNTARVGAQSARMKMTPVPMHGGFSWQAYNEEPSASGDSTFTMVGLLEQINTTRDVSDYLWYMTDVHIDPSEGFLRSGKYPVLGVLSAGHALHVFINGQLSGTAYGSLDFPKLTFTQGVKLRAGVNKISLLSIAVGLPNVGPHFETWNAGILGPVTLNGLNEGRRDLSWQKWSYKIGLHGEALGLHSISGSSSVEWAEGSLVAQRQPLSWYKTTFNAPAGNSPLALDMGSMGKGQIWINGQHVGRHWPAYKASGTCGDCSYIGTYNEKKCSTNCGEASQRWYHVPQSWLKPTGNLLVVFEEWGGDPNGISLVRRDVDSVCADIYEWQPTLMNYQMQASGKVNKPLRPKAHLSCGPGQKIRSIKFASFGTPEGVCGSYRQGSCHAFHSYDAFNNLCVGQNSCSVTVAPEMFGGDPCLNVMKKLAVEAICS

SEQ ID NO: 2517 - protein, 854 aa, Pyrus pyrifolia
  misc_feature (34)..(340): Pfam Name: Glyco_hydro_35 Pfam Description: Glycosyl hydrolases family 35
  misc_feature (764)..(840): Pfam Name: Gal_Lectin Pfam Description: Galactose binding lectin domain
  misc_feature: Public GI ID no. 61162201
  misc_feature: Bit score of 1229.5 for HMM based on sequences of Figure 23
  misc_feature: Functional Homolog Of SEQ ID NO. 2466
MEPNSASKLGFFMGLFLLLGFQLVHCAVTYDRKAIVINGQRRILISGSIHYPRSTPEMWEDLIQKAKDGGLDVVETYVFWNVHEPTPGNYNFEGRYDLVRFLKTIQKAGLYAHLRIGPYVCAEWNFGGFPVWLKYVPGISFRTDNEPFKRAMQGFTQKIVGLMKSESLFESQGGPIILSQIENEYGAQSKLFGAAGHNYITWAAEMAVGLDTGVPWVMCKEEDAPDPVINTCNGFYCDSFSPNRPYKPTIWTETWSGWFTEFGGPIHQRPVQDLAYAVATFIQKGGSFVNYYMYHGGTNFGRTAGGPFITTSYDYDAPLDEYGLIRQPKYGHLKELHKAIKMCERALVSADPIITSLGNFQQAYVYTSESGDCSAFLSNHDSKSAARVMFNNMHYNLPPWSISILPDCRNVVFNTAKVGVQTSQMQMLPTNIPMLSWESYDEDLTSMDDSSTMTAPGLLEQINVTRDSTDYLWYITSVDIDSSESFLHGGELPTLIVQSTGHAVHIFINGQLTGSAFGTRESRRFTYTGKVNLRAGTNKIALLSVAVGLPNVGGHFEAWNTGILGPVALHGLNQGKWDLSWQKWTYQVGLKGEAMNLVSQNAFSSVEWISGSLIAQKKQQPLTWHKTIFNEPEGSEPLALDMEGMGKGQIWINGQSIGRYWTAFANGNCNGCSYAGGFRPTKCQSGCGKPTQRYYHVPRSWLKPTQNLLVLFEELGGDPSRISLVKRAVSSVCSEVAEYHPTIKNWHIESYGKVEDFHSPKVHLRCNPGQAISSIKFASFGTPLGTCGSYQEGTCHATTSYSVVQKKCIGKQRCAVTISNSNFGDPCPKVLKRLSVEAVCAPITSTNVEPNSQG

SEQ ID NO: 2518 - protein, 853 aa, Prunus persica
  misc_feature (34)..(340): Pfam Name: Glyco_hydro_35 Pfam Description: Glycosyl hydrolases family 35
  misc_feature (763)..(839): Pfam Name: Gal_Lectin Pfam Description: Galactose binding lectin domain
  misc_feature: Public GI ID no. 57232107
  misc_feature: Bit score of 1217.6 for HMM based on sequences of Figure 23
  misc_feature: Functional Homolog Of SEQ ID NO. 2466
METNSVSKLCLFLGLVCFLGFQLVQCTVTYDRRAIVINGQRRILISGSIHYPRSTPEMWEDLIQKAKDGGLDVVETYVFWNVHEPSPGNYNFKGRYDLVRFLKTIQKAGLYAHLRIGPYVCAEWNFGGFPVWLKYVPGISFRTDNEPFKRAMQGFTEKIVGLMKSEKLFESQGGPIILSQIENEYGAQSKLFGAAGHNYMTWAANMAVGLGTGVPWVMCKEEDAPDPVINTCNGFYCDSFAPNKPYKPTIWTEAWSGWFSEFGGPIHQRPVQDLAYAVARFIQKGGSFVNYYMYHGGTNFGRTAGGPFITTSYDYDAPLDEYGLIRQPKYGHLKELHRAIKMCERALVSADPIITSLGNFQQAYVYTSESGDCSAFLSNHDSKSAARVMFNNMHYNLPPWSISILPDCRNVVFNTAKVGVQTSQMGMLPTNIQMLSWESYDEDITSLDDSSTITAPGLLEQINVTRDSTDYLWYKTSVDIGSSESFLRGGELPTLIVQSTGHAVHIFINGQLSGSSFGTRESRRFTYTGKVNLHAGTNRIALLSVAVGLPNVGGHFEAWNTGILGPVALHGLDQGKWDLSWQKWTYQVGLKGEAMNLVSPNSISSVDWMRGSLAAQKQQPLTWHKTLFNAPEGDEPLALDMEGMGKGQIWINGQSIGRYWTAFANGNCNGCSYAGGFRPPKCQVGCGQPTQRVYHVPRSWLKPMQNLLVIFEEFGGDPSRISLVKRSVSSVCAEVAEYHPTIKNWHIESYGKAEDFHSPKVHLRCNPGQAISSIKFASFGTPLGTCGSYQEGTCHAATSYSVLQKKCIGKQRCAVTISNSNFGDPCPKVLKRLSVEAVCAPIVSTTMEPNSRG

SEQ ID NO: 2519 - protein, 832 aa, Asparagus officinalis
  misc_feature (33)..(339): Pfam Name: Glyco_hydro_35 Pfam Description: Glycosyl hydrolases family 35
  misc_feature (749)..(831): Pfam Name: Gal_Lectin Pfam Description: Galactose binding lectin domain
  misc_feature: Public GI ID no. 1168654
  misc_feature: Bit score of 1202.4 for HMM based on sequences of Figure 23
  misc_feature: Functional Homolog Of SEQ ID NO. 2466
MALKLVLMLMVALLAAVWSPPAVTASVTYDHKSVIINGQRRILISGSIHYPRSTPEMWPDLIQKAKDGGLDVIQTYVFWNGHEPSPGQYYFGGRYDLVRFLKLVKQAGLYAHLRIGPYVCAEWNFGGFPVWLKYVPGIHFRTDNGPFKAAMGKFTEKIVSMMKAEGLYETQGGPIILSQIENEYGPVEYYDGAAGKSYTNWAAKMAVGLNTGVPWVMCKQDDAPDPVINTCNGFYCDYFSPNKDNKPKMWTEAWTGWFTGFGGAVPQRPAEDMAFAVARFIQKGGSFINYYMYHGGTNFGRTAGGPFISTSYDYDAPIDEYGLLRQPKWGHLRDLHKAIKLCEPALVSGEPTITSLGQNQESYVYRSKSSCAAFLANFNSRYYATVTFNGMHYNLPPWSVSILPDCKTTVFNTARVGAQTTTMKMQYLGGFSWKAYTEDTDALNDNTFTKDGLVEQLSTTWDRSDYLWYTTYVDIAKNEEFLKTGKYPYLTVMSAGHAVHVFINGQLSGTAYGSLDNPKLTYSGSAKLWAGSNKISILSVSVGLPNVGNHFETWNTGVLGPVTLTGLNEGKRDLSLQKWTYQIGLHGETLSLHSLTGSSNVEWGEASQKQPLTWYKTFFNAPPGNEPLALDMNTMGKGQIWINGQSIGRYWPAYKASGSCGSCDYRGTYNEKKCLSNCGEASQRWYHVPRSWLIPTGNFLVVLEEWGGDPTGISMVKRSVASVCAEVEELQPTMDNWRTKAYGRPKVHLSCDPGQKMSKIKFASFGTPQGTCGSFSEGSCHAHKSYDAFEQEGLMQNCVGQEFCSVNVAPEVFGGDPCPGTMKKLAVEAICE

SEQ ID NO: 2520 - DNA, 2523 bp, Populus balsamifera subsp. trichocarpa
  misc_feature: Ceres Annot ID no. 1543613
  misc_feature: Encodes the peptide sequence at SEQ ID NO. 2521
atggccttgaagaagataccaatgtccaatgataatgcgtcggtagtttttttggtttttttggcttcattggtttgttctgtcactgcctctgtgtcttatgactctaaggctatcaccattaatggccaaagaaggattcttatttccggatccattcactacccaagaagttcccctgagatgtggccagatcttattcagaaggcaaaagaaggaggactggatgttattcagacatatgttttttggaatggacatgaaccttcacctggaaaatattattttgaggggaactatgatctggtcaagtttgttaagctggtgaaggaagcaggcctttatgttaatctcaggattggaccttatatctgtgctgagtggaactttgggggtttcccagtttggcttaagtacattccaggcatcaatttcagaacggacaatggccctttcaaggctcaaatgcgaaaattcaccacgaagattgttaacatgatgaaagcagaaaggttatttgagtctcaaggcggtccaataattttatcccagattgagaatgaatatggacccatggaatatgaacttggttcacctggtcaagcttacaccaagtgggctgcacaaatggctgtaggtctccgtactggtgtcccatgggtcatgtgcaagcaagatgatgccccggatcctattattaacacctgcaatggtttctactgcgactacttttctccaaacaaagcttacaagccaaagatgtggactgaagcttggactggctggtttacccaatttggtggcccagttcctcaccgaccagctgaagacatggctttctccgttgcaaggttcatacagaaggggggatcattcataaattattatatgtatcatggaggaacaaattttggccgaactgctggtggtcctttcattgcaacaagctatgattatgatgctcctcttgatgaatatggactgttgcggcagcctaaatggggccatttgaaagatttgcatagagcaattaagctgtgtgaacctgctttagtatctggagatgcaactgttataccacttggaaattaccaagaggctcacgtgttcaattataaggctggaggttgcgcagcattccttgcaaattaccatcaaagatcatttgcaaaggtgtcttttaggaatatgcattataacctaccaccatggtccatcagcattcttccagattgcaagaacaccgtttacaacactgcaagggttggtgctcaaagtgcaacgatcaagatgactcctgttcctatgcatggaggcttgtcttggcaaacgtataatgaagagccatcctcaagtggtgacaacacattcactatggttgggttgctggagcagataaatacaactagagatgtttcagactatttgtggtacatgacagatgttcatattgaccccagcgaaggctttctgaagagtggcaaatatcctgttcttactgttctatcagctgggcatgctttgcatgttttcatcaatggccagctatctgggactgcctatggaagtttagacttcccaaagttgacatttagtcaaggtgtgagtttgagagctggtgtcaacaaaatttctcttctgagcattgctgttggtctcccgaatgttggcccacactttgagacatggaatgctggtattcttggacctgtgacattgaatggtctcaatgaggggaggatggacttgtcctggcagaagtggtcttacaagattggtcttcatggagaagcattgagtctccattcaatcagtgggagttcttcagttgagtgggcagaggggtctctggtggcccaaaaacagccactctcatggtataaaactactttcaatgctcctgctgggaattcccctttggctttagatatgggcagcatgggcaaaggccaaatatggataaatggacagcatgttggacgtcactggcctgcatataaagcatctggaacatgcggggaatgtacttacattggaacttataatgaaaataaatgctcaactaattgtggcgaggcttcccagagatggtatcacgtccctcaatcatggctaaaaccaacagggaacttgttggttgtgtttgaagaatggggtggagatccaaatggggtttctttggttaggagagaagtagacagtgtgtgcgctgatatttatgagtggcagccaactttgatgaattatcagatgcaagcatctggtaaagtcaataagccgctgaggcctaaagcccatttgtcatgtggccctggacagaaaatcagatcaatcaagtttgccagctttgggacaccagaaggggtttgtggaagctacaaccagggaagctgtcatgccttccactcttacgatgcttttaacaataactcatgctcggtgaccgtagcacctgaaatgtttgggggagatccttgcccgagtgtcatgaagaaactagcagcagaggctatttgcagctga

SEQ ID NO: 2521 - protein, 833 aa, Populus balsamifera subsp. trichocarpa
  misc_feature (31)..(337): Pfam Name: Glyco_hydro_35 Pfam Description: Glycosyl hydrolases family 35
  misc_feature (760)..(832): Pfam Name: Gal_Lectin Pfam Description: Galactose binding lectin domain
  misc_feature: Ceres Annot ID no. 1543613
  misc_feature: Bit score of 1190.3 for HMM based on sequences of Figure 23
  misc_feature: Functional Homolog Of SEQ ID NO. 2466
MSNDNASVVFLVFLASLVCSVTASVSYDSKAITINGQRRILISGSIHYPRSSPEMWPDLIQKAKEGGLDVIQTYVFWNGHEPSPGKYYFEGNYDLVKFVKLVKEAGLYVNLRIGPYICAEWNFGGFPVWLKYIPGINFRTDNGPFKAQMRKFTTKIVNMMKAERLFESQGGPIILSQIENEYGPMEYELGSPGQAYTKWAAQMAVGLRTGVPWVMCKQDDAPDPIINTCNGFYCDYFSPNKAYKPKMWTEAWTGWFTQFGGPVPHRPAEDMAFSVARFIQKGGSFINYYMYHGGTNFGRTAGGPFIATSYDYDAPLDEYGLLRQPKWGHLKDLHRAIKLCEPALVSGDATVIPLGNYQEAHVFNYKAGGCAAFLANYHQRSFAKVSFRNMHYNLPPWSISILPDCKNTVYNTARVGAQSATIKMTPVPMHGGLSWQTYNEEPSSSGDNTFTMVGLLEQINTTRDVSDYLWYMTDVHIDPSEGFLKSGKYPVLTVLSAGHALHVFINGQLSGTAYGSLDFPKLTFSQGVSLRAGVNKISLLSIAVGLPNVGPHFETWNAGILGPVTLNGLNEGRMDLSWQKWSYKIGLHGEALSLHSISGSSSVEWAEGSLVAQKQPLSWYKTTFNAPAGNSPLALDMGSMGKGQIWINGQHVGRHWPAYKASGTCGECTYIGTYNENKCSTNCGEASQRWYHVPQSWLKPTGNLLVVFEEWGGDPNGVSLVRREVDSVCADIYEWQPTLMNYQMQASGKVNKPLRPKAHLSCGPGQKIRSIKFASFGTPEGVCGSYNQGSCHAFHSYDAFNNNSCSVTVAPEMFGGDPCPSVMKKLAAEAICS

SEQ ID NO: 2522 - protein, 827 aa, Oryza sativa subsp. japonica
  misc_feature (32)..(338): Pfam Name: Glyco_hydro_35 Pfam Description: Glycosyl hydrolases family 35
  misc_feature (749)..(826): Pfam Name: Gal_Lectin Pfam Description: Galactose binding lectin domain
  misc_feature: Public GI ID no. 115437888
  misc_feature: Bit score of 1195.6 for HMM based on sequences of Figure 23
  misc_feature: Functional Homolog Of SEQ ID NO. 2466
MAASAVAVAFVVAVAAVLAAAASAAVTYDRKAVVVNGQRRILISGSIHYPRSTPEMWPDLIEKAKDGGLDVVQTYVFWNGHEPSPGQYYFEGRYDLVHFIKLVKQAGLYVNLRIGPYVCAEWNFGGFPVWLKYVPGISFRTDNEPFKAEMQKFTTKIVEMMKSEGLFEWQGGPIILSQIENEFGPLEWDQGEPAKAYASWAANMAVALNTSVPWIMCKEDDAPDPIINTCNGFYCDWFSPNKPHKPTMWTEAWTAWYTGFGIPVPHRPVEDLAYGVAKFIQKGGSFVNYYMYHGGTNFGRTAGGPFIATSYDYDAPIDEYGLLREPKWGHLKQLHKAIKLCEPALVAGDPIVTSLGNAQKSSVFRSSTGACAAFLENKDKVSYARVAFNGMHYDLPPWSISILPDCKTTVFNTARVGSQISQMKMEWAGGFAWQSYNEEINSFGEDPLTTVGLLEQINVTRDNTDYLWYTTYVDVAQDEQFLSNGENLKLTVMSAGHALHIFINGQLKGTVYGSVDDPKLTYTGNVKLWAGSNTISCLSIAVGLPNVGEHFETWNAGILGPVTLDGLNEGRRDLTWQKWTYQVGLKGESMSLHSLSGSSTVEWGEPVQKQPLTWYKAFFNAPDGDEPLALDMSSMGKGQIWINGQGIGRYWPGYKASGNCGTCDYRGEYDETKCQTNCGDSSQRWYHVPRSWLSPTGNLLVIFEEWGGDPTGISMVKRSIGSVCADVSEWQPSMKNWHTKDYEKAKVHLQCDNGQKITEIKFASFGTPQGSCGSYTEGGCHAHKSYDIFWKNCVGQERCGVSVVPEIFGGDPCPGTMKRAVVEAICG

SEQ ID NO: 2523 - protein, 841 aa, Medicago truncatula
  misc_feature (34)..(340): Pfam Name: Glyco_hydro_35 Pfam Description: Glycosyl hydrolases family 35
  misc_feature (763)..(840): Pfam Name: Gal_Lectin Pfam Description: Galactose binding lectin domain
  misc_feature: Public GI ID no. 124360385
  misc_feature: Bit score of 1212.7 for HMM based on sequences of Figure 23
  misc_feature: Functional Homolog Of SEQ ID NO. 2466
MWKVPSSLVLLLLLQLACSLICSVIASVSYDSKAITINGQSRILISGSIHYPRSTPEMWPDLIQKAKEGGLDVIQTYVFWNGHEPSPGKYYFEGNYDLVKFIKLVQQAGLYVHLRIGPYVCAEWNFGGFPVWLKYIPGISFRTDNEPFKFQMQKFTEKIVDMMKADRLFESQGGPIIMSQIENEYGPMEYEIGAPGKSYTKWAADMAVGLGTGVPWIMCKQDDAPDPVINTCNGFYCDYFSPNKDYKPKMWTEAWTGWFTEFGGPVPHRPAEDMAFSVARFIQKGGSFINYYMYHGGTNFGRTAGGPFIATSYDYDAPLDEYGLLQQPKWGHLKDLHRAIKLSEPALISGDPTVTRIGNYQEAHVFKSKSGACAAFLGNYNPKAFATVAFGNMHYNLPPWSISILPDCKNTVYNTARVGSQSAQMKMTRVPIHGGLSWQVFTEQTASTDDSSFTMTGLLEQLNTTRDLTDYLWYSTDVVIDPNEGFLRSGKDPVLTVLSAGHALHVFINSQLSGTIYGSLEFPKLTFSQNVKLIPGVNKISLLSVAVGLPNVGPHFETWNAGVLGPITLNGLDEGRRDLSWQKWSYKVGLHGEALSLHSLGGSSSVEWVQGSLVSRMQPLTWYKTTFDAPDGIAPFALDMGSMGKGQVWLNGQNLGRYWPAYKASGTCDNCDYAGTYNENKCRSNCGEASQRWYHVPHSWLIPTGNLLVVFEELGGDPNGIFLVRRDIDSVCADIYEWQPNLISYQMQTSGKTNKPVRPKAHLSCGPGQKISSIKFASFGTPVGSCGNFHEGSCHAHKSYNTFEKNCVGQNSCKVTVSPENFGGDPCPNVLKKLSVEAICT

SEQ ID NO: 2524 - DNA, 752 bp, Panicum virgatum
  misc_feature: Ceres Clone ID no. 1763298
  misc_feature: Encodes the peptide sequence at SEQ ID NO. 2525
aaaacacaaggaattgaagagaggaaaagatccatcgagcttaccataccctctctcccctctcccgctagccatggcctcttacgctgtagctcccgttcaaagtgagcttcagatgaccctatacaacaaggaggtgtactctggacgggacatcaacggagtgaagattacgggtggacatccactgggtacaacctgggtcttctcttggcttgtaactgatgggccaggttccgatgcaaatatcgttggccatctgcagggcacaggcgttcaagtagccagtagtcccaattatgtgtggcactactcccttggattagtgttcggggataaaaggttcaaggggtctacactacaaatatctgggacttcccaaataaatggtgagtggagcatagttggagggacaggagaacttgctatggcaaagggtactgtcaaacgcacagaaatttcatataagggagatacgaggatttcagaactcaaaatacatgcagtttacactccaaagaaccagacaattgtttctggtaatgctgaatgtaaagtagagaaggcgtgaggttttatgcagtcccttacactggtcttcaaggaagccaaacaagatctgctgaggaaatatctacgcccttcagttgttttgttgcctaataatttcccgactatgtactcgggatcacggacaaagtttgttgtcaccttgtactttgctgcacttcatcagttgtttgtttcctgat

SEQ ID NO: 2525 - protein, 165 aa, Panicum virgatum
  misc_feature (1)..(146): Pfam Name: Dirigent Pfam Description: Dirigent-like protein
  misc_feature: Ceres Clone ID no. 1763298
  misc_feature: Bit score of 378.0 for HMM based on sequences of Figure 17
  misc_feature: Functional Homolog Of SEQ ID NO. 2525
  misc_feature: in Figure 17
MASYAVAPVQSELQMTLYNKEVYSGRDINGVKITGGHPLGTTWVFSWLVTDGPGSDANIVGHLQGTGVQVASSPNYVWHYSLGLVFGDKRFKGSTLQISGTSQINGEWSIVGGTGELAMAKGTVKRTEISYKGDTRISELKIHAVYTPKNQTIVSGNAECKVEKA

SEQ ID NO: 2526 - DNA, 675 bp, Zea mays
  misc_feature: Ceres Clone ID no. 100892614
  misc_feature: Encodes the peptide sequence at SEQ ID NO. 2527
ccaacctaccagccatggcgccacattcttactccatagcccccgtccaaagcgagctgaacatgacgctgtacaacaaggaggtgtacggtgggcgggggaccaacggagtgaccactctagtgaaccgagggccaatcggcaccacctgggtcttctcgtggcctgtcaccgacgggcccgccggcgccgacgcgaacgtcgtcggccatcttcagggcaccggcgttcaagtcgccacttaccccgactacatgtggcactactcccttgggctggtgttcggccagggaagcaggttcaatgggtccacactacaaatacaagggacttccaaaataaatggcgagtggagcattgttggagggacaggagaacttgctatggcaaagggcacggtcagacgcacagaagtttcgtatacgggaaatataaggatttcagaactcaatatacatgtgctttacactccaatgtgacctatacagatgtaagtataatgcaccccagtgtttaatgtgatgggcatttatttttcctatttaacaagttagctacgtacatatttagtttaccagaatttccataataacgtccagactatatatgtaacacatttggaaaatgatgatgcattggttgtttgttgaactgtttctttttttttacttatat

SEQ ID NO: 2527 - protein, 154 aa, Zea mays
  misc_feature (7)..(151): Pfam Name: Dirigent Pfam Description: Dirigent-like protein
  misc_feature: Ceres Clone ID no. 100892614
  misc_feature: Bit score of 328.3 for HMM based on sequences of Figure 17
  misc_feature: Functional Homolog Of SEQ ID NO. 2525
  misc_feature: in Figure 17
MAPHSYSIAPVQSELNMTLYNKEVYGGRGTNGVTTLVNRGPIGTTWVFSWPVTDGPAGADANVVGHLQGTGVQVATYPDYMWHYSLGLVFGQGSRFNGSTLQIQGTSKINGEWSIVGGTGELAMAKGTVRRTEVSYTGNIRISELNIHVLYTPM

SEQ ID NO: 2528 - DNA, 477 bp, Sorghum bicolor
  misc_feature: Ceres Annot ID no. 8692947
  misc_feature: Encodes the peptide sequence at SEQ ID NO. 2529
atggcctattgcgaaatggctccttgtgcgctagctcaacattctgagcttacgatgactctatacacaaacaaggaggtgtattctggaccagaccaaaatgcagcaacaaacacagaagggtcaacaataatgggcagaacccaggtctactcgtggcctgtagccgatggggcaactcctgatgcaaacatcgtcggccatctccagggcactagtgttcaagtagccaaatctcccgccgcggtgtatcactactccctgggtttagtgttctcggatgaaaggttcaaagggtctacactccaaatacaagggacttcccaaataaatggtgagtgggccattgttggagggacaggagaacttactatggcaacgggtactgtcaaacgcacaacagttgtagagaaagactataccaggatctcagaactcaaaatacatgcctatttatttcgctccagtgaagcctag

SEQ ID NO: 2529 - protein, 158 aa, Sorghum bicolor
  misc_feature (8)..(152): Pfam Name: Dirigent Pfam Description: Dirigent-like protein
  misc_feature: Ceres Annot ID no. 8692947
  misc_feature: Bit score of 347.8 for HMM based on sequences of Figure 17
  misc_feature: Functional Homolog Of SEQ ID NO. 2525
  misc_feature: in Figure 17
MAYCEMAPCALAQHSELTMTLYTNKEVYSGPDQNAATNTEGSTIMGRTQVYSWPVADGATPDANIVGHLQGTSVQVAKSPAAVYHYSLGLVFSDERFKGSTLQIQGTSQINGEWAIVGGTGELTMATGTVKRTTVVEKDYTRISELKIHAYLFRSSEA

SEQ ID NO: 2530 - protein, 169 aa, Oryza sativa subsp. japonica
  misc_feature (10)..(149): Pfam Name: Dirigent Pfam Description: Dirigent-like protein
  misc_feature: Public GI ID no. 53791709
  misc_feature: Bit score of 391.0 for HMM based on sequences of Figure 17
  misc_feature: Functional Homolog Of SEQ ID NO. 2525
  misc_feature: in Figure 17
MAYYAIAPILCALVQNELYMHLYINQVYAGQSTNQLVVITSSQPQGFGITVINDWPITDGANTVGRAQGLHFQSGQTSQKWYTSMNLIFEDTRFSGSSLQVMGTIPQDGEWSIIGGTGEFVAAQGIVEHNVIQEAGGAWTYELKIHAFYTPMQSSGVGAYGCNSWKLGP

SEQ ID NO: 2531 - protein, 187 aa, Saccharum hybrid cultivar
  misc_feature (6)..(167): Pfam Name: Dirigent Pfam Description: Dirigent-like protein
  misc_feature: Public GI ID no. 55416171
  misc_feature: Bit score of 442.5 for HMM based on sequences of Figure 17
  misc_feature: Functional Homolog Of SEQ ID NO. 2525
  misc_feature: in Figure 17
MANLRSVLAVSLAVALFAVAPASFALDEKELHLSLYLNQTYSGNGLNQAVVVEPGLPGEFGNIAVQDWPVTNGEGSDATVVGRAQGIQFKPSQRNDQAWYTTLTIVFENTSLKGSTLQMMGYIPQDGQWSIFGGTGQLTMARGVVNHKVVRQTNGGRMYKINIHAFYTPLGASSNCGINLRRLDFDA

SEQ ID NO: 2532 - DNA, 911 bp, Triticum aestivum
  misc_feature: Ceres Clone ID no. 1019755
  misc_feature: Encodes the peptide sequence at SEQ ID NO. 2533
atactaactcacacacaaattactagacatcctcgttctctgtgcagttccaacaatcctagtgatggcgtgtgcaagccatgtcatgattttccttgtgttctcaaatttagccatagccatggccacccttcctcctcccttgtatgaccctaacctagggaagtgtaagaatagttgtgaggaagagctcaatctatctttgtacctacaccaagttgtgacaggaccagcccacaaccaagaagtaattctcagccctggctttcctaacatgtttggtatgatagccgtcgttgactggaccatatacgccgtccctgattccacttcaagtatcattgctcgggcaaagggaatgactatccaggctacccaaagcgaggtcaatggtgttgcctggtttcttcctttcagcatggtctttcaggattccaggtttggcggttctacgctgcaagtgatgggagcaattactggtgcagtagatggtgagtgggctattgtgggtgggactggcaaattgtccacggcacgtggtactattaagttcatagcagtccaggcacagagcaccccaacctttgaggtctacagaaggattgatatccatgcattctacacacccgcaccggccgtttaagatatgaagaatacacatgcagcactccgactggaaaggcgagccagcaatctcgcataaataaaatatgtgttttccattatgactagtagtactacctcgttgtaatatgtggtcaagtcgtctttactttcaaaaaatgcaggagtttgtggcatatcattgaaaatcttagacataaatccacaaggcctttgtccttttttgtaaaattggactgtatgatttaatttggaatattacaatcttaatatattatgtgaaaagg

SEQ ID NO: 2533 - protein, 192 aa, Triticum aestivum
  misc_feature (21)..(186): Pfam Name: Dirigent Pfam Description: Dirigent-like protein
  misc_feature: Ceres Clone ID no. 1019755
  misc_feature: Bit score of 461.6 for HMM based on sequences of Figure 17
  misc_feature: Functional Homolog Of SEQ ID NO. 2525
  misc_feature: in Figure 17
MACASHVMIFLVFSNLAIAMATLPPPLYDPNLGKCKNSCEEELNLSLYLHQVVTGPAHNQEVILSPGFPNMFGMIAVVDWTIYAVPDSTSSIIARAKGMTIQATQSEVNGVAWFLPFSMVFQDSRFGGSTLQVMGAITGAVDGEWAIVGGTGKLSTARGTIKFIAVQAQSTPTFEVYRRIDIHAFYTPAPAV

SEQ ID NO: 2534 - DNA, 814 bp, Panicum virgatum
  misc_feature: Ceres Clone ID no. 1956225
  misc_feature: Encodes the peptide sequence at SEQ ID NO. 2535
aaaacacaaggaattgaagagaggaaaagatccatcgagcttaccataccctctctcccctctcccgctagccatggcctcttacgctgtagctcccgttcaaagtgagcttcagatgaccctatacaacaaggaggtgtactctggacgggacatcaacggagtgaagattacgggtggacatccactgggtacaacctgggtcttctcttggcttgtaactgatgggccaggttccgatgcaaatatcgttggccatctgcagggcacaggtgttcaagtagccagtagtcccaattatgtgtggcactactcccttggattagtgttcggggataaaaggttcaaggggtctacactacaaatatctgggacttcccaaataaatggtgagtggagcatagttggagggacaggagaacttgctatggcaaatggtactgtcaaacgcacagaaatttcatataagggagatacgaggatttcagaactcaaaatacatgcagtttacactccaaagaaccagacaattgtttctggtaatgctgaatgtaaagtagagaaggcgtgaggttttatgcagtcccttagactggtcttcaaggaagccaaacaagatctgctgaggaaatatctacgcccttcagttgttttgttgcctaataatttcccgactatgtactcgggatcacggacaaagtttgttgtcaccttgtactttgctgcacttcatcagttgtttgtttcctgataacttctcgactctgtattcgggactacagaccaatagtttgctctaccaatgtttgttttc

SEQ ID NO: 2535 - protein, 165 aa, Panicum virgatum
  misc_feature (1)..(146): Pfam Name: Dirigent Pfam Description: Dirigent-like protein
  misc_feature: Ceres Clone ID no. 1956225
  misc_feature: Bit score of 374.7 for HMM based on sequences of Figure 17
  misc_feature: Functional Homolog Of SEQ ID NO. 2525
MASYAVAPVQSELQMTLYNKEVYSGRDINGVKITGGHPLGTTWVFSWLVTDGPGSDANIVGHLQGTGVQVASSPNYVWHYSLGLVFGDKRFKGSTLQISGTSQINGEWSIVGGTGELAMANGTVKRTEISYKGDTRISELKIHAVYTPKNQTIVSGNAECKVEKA

SEQ ID NO: 2536 - DNA, 689 bp, Zea mays
  misc_feature: Ceres Clone ID no. 379196
  misc_feature: Encodes the peptide sequence at SEQ ID NO. 2537
atcctcggctcctcctcagaaaacacaagggaagacagctgcctacccaacctctaccagccatggcgccaccttcttactccatagcccccgtccaaagcgagctgaacatgacgctgtacaacaaggaggtgtacggtgggcgggggaccaacggagtgaccactctagtgaaccgagggccaatcggcaccacctgggtcttctcgtggcctgtgaccgacgggcccgccggcggcgccgacgcgaacgtcgtcggccatcttcagggcaccggcgttcaagtcgccacttaccccgactacatgtggcactactcccttgggctggtgttcggccagggaagcaggttcaatgggtccacactacaaatacaagggacttccaaaataaatggcgagtggagcattgttggagggacaggagaacttgctatggcaaagggcacggtcagacgcacagaaatttcgtatacgggaaatataaggatttcagaactcaatatacatgtgctttacactccaatgtgacctatacagatgtcaagaacaagtatctctggaggaggactactatgataagttcgatgagatctagggtgtggagaagttatcttaatctggtttattttatttagttatttttgtaagatgtttcgtcatgtaataaagattgtgacattggtttac

SEQ ID NO: 2537 - protein, 155 aa, Zea mays
  misc_feature (7)..(152): Pfam Name: Dirigent Pfam Description: Dirigent-like protein
  misc_feature: Ceres Clone ID no. 379196
  misc_feature: Bit score of 323.5 for HMM based on sequences of Figure 17
  misc_feature: Functional Homolog Of SEQ ID NO. 2525
MAPPSYSIAPVQSELNMTLYNKEVYGGRGTNGVTTLVNRGPIGTTWVFSWPVTDGPAGGADANVVGHLQGTGVQVATYPDYMWHYSLGLVFGQGSRFNGSTLQIQGTSKINGEWSIVGGTGELAMAKGTVRRTEISYTGNIRISELNIHVLYTPM

SEQ ID NO: 2538 - DNA, 899 bp, Zea mays
  misc_feature: Ceres Clone ID no. 275753
  misc_feature: Encodes the peptide sequence at SEQ ID NO. 2539
aagcaaataagagcaaatcatagctgaccgatccaaacaacacgcccccgctctctcccaggtccctaagtgaaccaccctgtctggctaggcatggcctattgcgcatttgctccatctgcaccacctcaatattctgagcttaagatgactctatacacaaacaaggaggtgtatcgttctgggccagatcaaaacggagtaaccatcacagagagatcaaacatgggcacaacctgggtcttctcgtggcctgtagccgatgggccaacacctgatgcgaacatcgtcggccaactccagggcactagtgttcaagtagccaatactcccgttgtggtgtaccactactccctgggattagtgttcgaggataaaaggttcaatgggtccacactccaaatacaagggacctcccaaataaatggcgagtggagcattgttggagggacaggacaacttactatggcaatgggtactgtcaaacgcactgaagttgtgtacaaagacaataccaggatctcagaactcaaaatacatgcctatttcgctccagtgaattaagcctactacaactagtgtttatgaggctactgcatccgattaacctccccaaggcgtgagctttatgcagtcatttagcctggagtttgtatccgtgtcacctaatactttacggtaataataagagactgtatcagtatgtttcggtaaactagagttctggtcacctcttgtactcttttgtattttaatgaaatttagaatccgagtgtttctcttttgtactgatgcatcagtagttgtacatgcatcggtagatcgatcttttgttctttctaagctgtgatttgttgttggccttcttgtataatggtatatgaaaatacctttagccg

SEQ ID NO: 2539 - protein, 156 aa, Zea mays
  misc_feature (3)..(152): Pfam Name: Dirigent Pfam Description: Dirigent-like protein
  misc_feature: Ceres Clone ID no. 275753
  misc_feature: Bit score of 300.7 for HMM based on sequences of Figure 17
  misc_feature: Functional Homolog Of SEQ ID NO. 2525
MAYCAFAPSAPPQYSELKMTLYTNKEVYRSGPDQNGVTITERSNMGTTWVFSWPVADGPTPDANIVGQLQGTSVQVANTPVVVYHYSLGLVFEDKRFNGSTLQIQGTSQINGEWSIVGGTGQLTMAMGTVKRTEVVYKDNTRISELKIHAYFAPVN

SEQ ID NO: 2540 - protein, 169 aa, Oryza sativa subsp. indica
  misc_feature (10)..(149): Pfam Name: Dirigent Pfam Description: Dirigent-like protein
  misc_feature: Public GI ID no. 125525841
  misc_feature: Bit score of 388.0 for HMM based on sequences of Figure 17
  misc_feature: Functional Homolog Of SEQ ID NO. 2525
MAYYAIAPILCALVQNELYMHLYINQVYAGQSTNQLVVITSSQPQGFGITVINDWPITDGANTVGRAQGLHFQSGQTSQKWYTSMNLIFEDTRFSGSSLQVMGTIPQDGEWSIIGGTGEFVAAQGIVEHNVIQEAAGAWTYELKIHAFYTPMQSSGVGAYGCNSWKLGP

SEQ ID NO: 2541 - protein, 187 aa, Saccharum hybrid cultivar
  misc_feature (6)..(167): Pfam Name: Dirigent Pfam Description: Dirigent-like protein
  misc_feature: Public GI ID no. 37700483
  misc_feature: Bit score of 422.2 for HMM based on sequences of Figure 17
  misc_feature: Functional Homolog Of SEQ ID NO. 2525
MASLRSVLAVSLAVALFAVAPASFALDEKELHLSLYLNQTYSGNGLNEAVVVEPGLPGEFGNIAVQDWPVTNGEGSDATVVGRAQGIQFKPSERNDQAWYTTLTIVFEGTSLKGSTLQMMGYIPQDGQWSIFGGTGQLTLARGVVNHKVVRQTNGGRMYKINIHAFYTPLGASTNCGINLWRLDFDA

SEQ ID NO: 2542 - protein, 187 aa, Saccharum officinarum
  misc_feature (11)..(167): Pfam Name: Dirigent Pfam Description: Dirigent-like protein
  misc_feature: Public GI ID no. 42454402
  misc_feature: Bit score of 404.6 for HMM based on sequences of Figure 17
  misc_feature: Functional Homolog Of SEQ ID NO. 2525
MASLRSVLAVSLALALFAVAPASFALDERELHLSLYLNQTYSGNGLNQAVVVEPGLPGEFGNNAIQDWPVTNGEGSDATVVGRAQGIQFKPSERNDQAWYTTLTIVFERTSLKGSTLQMMGYIPQDGQWSIFGGTGQLTMARGVVNHKVVRQTNGRRMYKINIYAFYTPLGASSSCRINPRRLDFDA

SEQ ID NO: 2543 - DNA, 2457 bp, Panicum virgatum
  misc_feature: Ceres Clone ID no. 1806608
  misc_feature: Encodes the peptide sequence at SEQ ID NO. 2544
atccttgccaagcatctcgcaatcctagataggcgaagaggagatgacgatcacatcatccgtcaagctcgccggcggcacgctgtcggtctgcgggaggacggtgctgtccggcgtgccagccgccgtggcggcgtcctctgcgtcagcggccggagcggtcgacggggtcttcattggcgccgacctcgccgagccggcgtcccaccacgtcatttccctcggcaccttaaggggcgtgcgtttcatggcgtgcttccggagcaagctgtggtggatgtcgcagcggatgggggacaagggcggcgatgtcccgcacgagacgcagttcctgctcgtggagtccacgggcgccggtggcaaggacgcggcggcggcggcgtacgtcgtgttcctcccgctcgtggagggcgcgttccgggccagcctccagggcggcgccggcgaggcgctggagctctgcgtcgagagcggggacgacgacacgcgcgcggcgtccatcgagcgcgcgctcttcgtgggcgctgcggagtcggaccccttcgcagccgtcgccggcgccgtcgccgccgccaggtccgcgctcaagacgttccgggtccgcgccgagaagaagctcccgggcatcgtggactactttgggtggtgcacctgggacgccttctaccaggacgtcacgcaggagggcgtcgaggccgggctccgcagcctcgtcaccggcggcgcgccgcccaagttcgtcatcatcgacgacggctggcagtccgtcggcacggaccagcccagccccagccccgacgaacacgccggagaggccacgcagccgcgcctgccccggctcaccggtatcagggagaacagcaagttccagaacgccgacgacccggccgccggcatcaaggcggtggtgcgcgcagcgaaggaggagtacgggctcaagtacgtcttcgtctggcacgccatcatcggctactggggcggcgtccgtccgggcgccgccgggatggagcgctaccgctccagcatgcagttccccaagatctcgccgggcgtcgccgagaacgaccccggcatgaggaccgactggatcaccgcccagggggtcggcctggtgcccccccgcgccgtgtaccggttctacgacgagcagcacgcgtacctcgccgccgccggcgttgacggcgtcaaggtggacgagcagtgcatcctggagacgctcggcgccggccacggcggccgcgcgcagctcaccaggcagtaccaccaggcgctcgacgcgtccgtcgccaagaacttccccgagaacggcatcatcgcgtgcatgagccacaacaccgacgccctatactgctcgaagcagacggcggtggtgagggcgtctgatgatttcttcccgagggaccccgtctcgcacacgatccacatcgccgcggtggcgtacaacagcgtgttcctcggcgagttcatgctcccggactgggacatgttccactccctccacccggccggcgagtaccacggctcggcccgggcgatcagcggcggccccgtctatgtcagtgatgcccccgggaagcacgacttcgagctgctgaagaagatcgtcttgccggacggctcggtgctccgcgcgcgcctgcctggccggccgaccaaggactgcctgttcaccgacccggcacgcgacggcgtcagcttgctcaagatatggaacatgaacaagttcaccggcgtgctgggcgtgtacaactgccagggcgcggcgtggagcttcgtggagaagaagaccacgttccaccgcaccggcgccggcgccctgacctgcggcgtcaaaggcagcgacgtccacctcatctccgacgccgcgacggacccggatcagtggagcggcgactgcgccgtgtaccgccacggcagcggtgacctcgccgtcctccccgacggcgcggcgctgcccgtctccctcaaggtcctcgagcaagacatcctcaccgtgtcgccgatcaaggacctggcacccgggttcaggttcgccccggtcgggctggtcggcatgttcaacggcggcgcggcggtggaaggcctgacctaccacctcctcgacgggggcaagcttgtcggcgacggcggctctgctgcttgcaggtcagaggaggccgtcggattggtgtgcatggaagtgcgggggcgtggcagattcggcgcctactcttctgtcaggccgaggaggtgcatgctgggctcggctgagatcgagttctcctacgtcccttcgtccgggctgctgactctgctgctggaggagatgcccggggagagggttcacaagattgtcgtcgagttgtagacttgcggtgcggtagcatcacaaatccagagcacccgcttttttgtttttttggcccttgccgaaagaatttcacaaatagacccagaaggaaatgttttccgtttccg

SEQ ID NO: 2544 - protein, 767 aa, Panicum virgatum
  misc_feature (7)..(752): Pfam Name: Raffinose_syn Pfam Description: Raffinose synthase or seed imbibition p
  misc_feature: Ceres Clone ID no. 1806608
  misc_feature: Bit score of 1928.2 for HMM based on sequences of Figure 37
  misc_feature: Functional Homolog Of SEQ ID NO. 2544
  misc_feature: in Figure 37
MTITSSVKLAGGTLSVCGRTVLSGVPAAVAASSASAAGAVDGVFIGADLAEPASHHVISLGTLRGVRFMACFRSKLWWMSQRMGDKGGDVPHETQFLLVESTGAGGKDAAAAAYVVFLPLVEGAFRASLQGGAGEALELCVESGDDDTRAASIERALFVGAAESDPFAAVAGAVAAARSALKTFRVRAEKKLPGIVDYFGWCTWDAFYQDVTQEGVEAGLRSLVTGGAPPKFVIIDDGWQSVGTDQPSPSPDEHAGEATQPRLPRLTGIRENSKFQNADDPAAGIKAVVRAAKEEYGLKYVFVWHAIIGYWGGVRPGAAGMERYRSSMQFPKISPGVAENDPGMRTDWITAQGVGLVPPRAVYRFYDEQHAYLAAAGVDGVKVDEQCILETLGAGHGGRAQLTRQYHQALDASVAKNFPENGIIACMSHNTDALYCSKQTAVVRASDDFFPRDPVSHTIHIAAVAYNSVFLGEFMLPDWDMFHSLHPAGEYHGSARAISGGPVYVSDAPGKHDFELLKKIVLPDGSVLRARLPGRPTKDCLFTDPARDGVSLLKIWNMNKFTGVLGVYNCQGAAWSFVEKKTTFHRTGAGALTCGVKGSDVHLISDAATDPDQWSGDCAVYRHGSGDLAVLPDGAALPVSLKVLEQDILTVSPIKDLAPGFRFAPVGLVGMFNGGAAVEGLTYHLLDGGKLVGDGGSAACRSEEAVGLVCMEVRGRGRFGAYSSVRPRRCMLGSAEIEFSYVPSSGLLTLLLEEMPGERVHKIVVEL

SEQ ID NO: 2545 - DNA, 2298 bp, Sorghum bicolor
  misc_feature: Ceres Annot ID no. 8735307
  misc_feature: Encodes the peptide sequence at SEQ ID NO. 2546
atgaccatctcctcgtccgtcaagctcgccggaggcacgctgtcggtatgcgggcggacggtgctgtccggggtgccggacgcggtggtggcctcgtcggcggcggcggggggagcggtcgacggggtcttcatcggcgccgacttcgccgagcccgccgcccggcacgtcgtctccctcggggacctgaggggcgtgcggttcatggcgtgcttccggttcaagctctggtggatggcgcagcggatgggggagaaaggcggcgacgtcccgcgcgagacgcagttcctgctcgtcgagtccaagggcgccggcgacggcgccgcggcggcgtacgtcgtgttcctgcccctcgtcgagggcgcgttccgtgccagcctccagggcggcgcgggcgacgcgctggagctctgcgtcgagagcggggacgcggagacgcgcgcggcgtccttcgagcgcgcgctcttcgtgggcgccgcggagtccgaccccttcgcggccatctccggcgccgtcggtgccgccaagtccgcgctcaggacgttccgggtccgcgccgagaagaagctgccgggcatcgtcgactacttcggctggtgcacctgggacgccttctaccaggatgtcacccaggagggcgtcgaggccgggctccgcagcctcatcgccggcggcgcgccgcccaagttcgtcatcatcgacgacggctggcagtccgtcggcaccgacaagtccgccaccgacaccgacaccgacgaacctgccggagaggacaagccgccccgcctgtctcgcctcaccggcatcaaggagaacagcaagttccagaacgtggacgacccggccgccggcatcaagacggtggtgcgcgcggcgaaggaggagtacgggctcaagtacgtctacgtctggcacgccatcaccggctactggggcggcgtccgacccggcgaacccgggacggagcactaccgctccagcatgcagttccccaaggtctcgccgggcgtcatggagaacgagcccggcatgaagaccgacgtgctcaccgtgcagggactcggcctcgtgcacccgcgcgccgtgtaccgcttctacgacgagctccacgcctacctcgccgccgccggtgtcgacggcgtcaaggtagacgtgcagtgcatcctggagacgctcggcgccggccacggcggccgcgtgcagctcaccaggcagtaccaccaggcgctcgacgcctccatcgccaagaacttcccggagaacggcatcatcgcctgcatgagccacaacaccgacgccctttactgctccaagcagacggcggtggtgagggcgtcggatgatttctatccgagggaccccgtgtcgcatacgatccatatcgcctcggtggcgtacaacagcgtgttcctcggcgagttcatgctgccggactgggacatgttccactcgctccaccaggccggcgactaccacggctcggcacgcgcgatcagtggaggcccggtctacgtcagtgatgcccccgggaagcacaacttcgagctgctcaagaagattgtcttgcccgacggctccattctccgcgcgcgtctgccaggccggccgaccaaggattgcctgttcaccgacccggcacgcgacggcgtcagcctgctcaagatatggaacatgaacaagttcaccggcgtgctcggcgtgtacaactgccagggcgcggcgtggagctccgtggagaagaagaacacctttcatcataccggcaccgaggccctgacctgcggtatcaagggcagcgacgtccacctcatctccgaggccgcgacggaccctgaatggaacggcgactgtaccgtgtaccgacatgccgacagcgacctcgccgtcctcccgtacggtgcggcgttgcctgtctctctcaaggtcctggaacatgacatcctcaccgtgtcaccgatcaaggacttggcacctggtttcaggttcgccccgattgggctggtggacatgttcaatagcggcggggcggtggaaggcctgacctaccacctcctcggcggcgcaaagctgctcgacggcggcaacggttctgcttcgggctccgaggctgtcggattggcgtgcatggaggtgaagggctgtggaaggttcggtgcctactcttcagtcaggccaaggaaatgcatgctgggttcagctcagctggagttctcctatgattcttcctcagggctggtggttcttcagctggagaagatgcccaaggagagggttcacaagattgttgtcgagttgtag

SEQ ID NO: 2546 - protein, 765 aa, Sorghum bicolor
  misc_feature (7)..(750): Pfam Name: Raffinose_syn Pfam Description: Raffinose synthase or seed imbibition p
  misc_feature: Ceres Annot ID no. 8735307
  misc_feature: Bit score of 1972.3 for HMM based on sequences of Figure 37
  misc_feature: Functional Homolog Of SEQ ID NO. 2544
  misc_feature: in Figure 37
MTISSSVKLAGGTLSVCGRTVLSGVPDAVVASSAAAGGAVDGVFIGADFAEPAARHVVSLGDLRGVRFMACFRFKLWWMAQRMGEKGGDVPRETQFLLVESKGAGDGAAAAYVVFLPLVEGAFRASLQGGAGDALELCVESGDAETRAASFERALFVGAAESDPFAAISGAVGAAKSALRTFRVRAEKKLPGIVDYFGWCTWDAFYQDVTQEGVEAGLRSLIAGGAPPKFVIIDDGWQSVGTDKSATDTDTDEPAGEDKPPRLSRLTGIKENSKFQNVDDPAAGIKTVVRAAKEEYGLKYVYVWHAITGYWGGVRPGEPGTEHYRSSMQFPKVSPGVMENEPGMKTDVLTVQGLGLVHPRAVYRFYDELHAYLAAAGVDGVKVDVQCILETLGAGHGGRVQLTRQYHQALDASIAKNFPENGIIACMSHNTDALYCSKQTAVVRASDDFYPRDPVSHTIHIASVAYNSVFLGEFMLPDWDMFHSLHQAGDYHGSARAISGGPVYVSDAPGKHNFELLKKIVLPDGSILRARLPGRPTKDCLFTDPARDGVSLLKIWNMNKFTGVLGVYNCQGAAWSSVEKKNTFHHTGTEALTCGIKGSDVHLISEAATDPEWNGDCTVYRHADSDLAVLPYGAALPVSLKVLEHDILTVSPIKDLAPGFRFAPIGLVDMFNSGGAVEGLTYHLLGGAKLLDGGNGSASGSEAVGLACMEVKGCGRFGAYSSVRPRKCMLGSAQLEFSYDSSSGLVVLQLEKMPKERVHKIVVEL

SEQ ID NO: 2547 - protein, 788 aa, Oryza sativa subsp. japonica
  misc_feature (7)..(773): Pfam Name: Raffinose_syn Pfam Description: Raffinose synthase or seed imbibition p
  misc_feature: Public GI ID no. 115466686
  misc_feature: Bit score of 1945.0 for HMM based on sequences of Figure 37
  misc_feature: Functional Homolog Of SEQ ID NO. 2544
  misc_feature: in Figure 37
MTVTSSVKVAGGELSVHGRTVLSGVPEAVRASSAAAAGPVDGVFLGGDFAEPASRHVVSLGAMRFDGANRIGGFGVGSRGVRFMACFRFKLWWMAQRMGEKGGDVPHETQFLLVESKAGVDGGGGDASYLVFLPLVEGAFRASLQGGGAGGDELQLCVESGDAGTRAASFDRALFVGAADSDPFAAIAGAVAAAKSCLKTFRIRAEKKLPGIVDYFGWCTWDAFYQDVTQEGVEAGLRSLTAGGAPPKFVIIDDGWQSVGTDHQNPDDTGADAKDKQPLLARLTGIKENSKFQDGDDPAAGIKTVVRAAKEKYGLKYVYVWHAITGYWGGVRPGVAGMEGYHSNMQFPNVSPGVVENEPGMKTDVLTTQGLGLVHPRAVYRFYDELHAYLAAAGVDGVKVDVQCILETLGAGHGGRVSLTRQFHQALDASIAKNFPENGIIACMSHHTDALYCAKQTAVVRASDDFYPRDPVSHTIHIASVAYNSVFLGEFMLPDWDMFHSLHPAGDYHGSARAISGGPVYVSDAPGKHNFELLKKMVLPDGSVLRAWLPGRPTKDCLFTDPARDGVSLLKIWNMNKFTGVLGVYNCQGAAWSSVEKKNIFHKTGAEALSCGVKGSDVHLIADAATDSEWNGDCAVYRHASADLVVLPNGAALPISLKVLEHDILTVSPIKDLAPGFRFAPIGLVDMFNSGAAVEGLTYHRLDGVKSLSNGSASTLPELQSLSSQAIGLVCMEVRGCGKFGAYSSVRPRKCMLGSAQVEFTYDSSSGLVILDLETMPKERVHKIVVEL

SEQ ID NO: 2548 - protein, 747 aa, Zea mays
  misc_feature (7)..(732): Pfam Name: Raffinose_syn Pfam Description: Raffinose synthase or seed imbibition p
  misc_feature: Public GI ID no. 162462869
  misc_feature: Bit score of 1925.9 for HMM based on sequences of Figure 37
  misc_feature: Functional Homolog Of SEQ ID NO. 2544
  misc_feature: in Figure 37
MTVASSVRLAGGNLTVCGRTVLSGVPDAVVATSAATEGAVDGIFLGADFAEPAARHVVSLGDLRDVRFMACFRFKLWWMAQRMGEKGSDVPRETQFLLVESRGVGDEDAAYVVFLPLVEGAFRASIQGGAGDALELCVESGDDDTRAASFERSLFVGAAESDPFAAISGAVAAAKSALRTFRVRAEKKLPGIVDYFGWCTWDAFYQDVTQEGVEAGLRSLIAGGAPPKFVIIDDGWQSVATDTNESAGEDKPPLLSRLTGIKENSKFQNADDPAAGIKTVVRLAKEEYRLKYVYVWHAITGYWGGVRPGEEHYRSSMQFPKVSPGVMENEPGMKTDVLTVQGLGLVHPRAVYRFYDELHAYLAAAGVDGVKVDVQCILETLGAGHGGRVQLTRQYHQALDASVAKNFPENGIIACMSHNTDALYCSKQTAVVRASDDFCPRDPASHTIHIASVAYNSVFLGEFMLPDWDMFHSLHQAGDYHGSARAISGGPVYVSDAPGKHNFELLKKIVLPDGSILRARLPGRPTKDCLFTDPARDGVSLLKIWNMNKFTGVLGVYNCQGAAWNSVEKKNTFHQTGTEALTCGVKGGDVHLISEAATDTEWDGDCAMYRHADGDLVVLPHDAALPVSLKVLEHDILTVSPIKELAPGFRFAPIGLVDMFNSGGAVEGLTYHLLGGDGSTLGSEAVALACMEVKGCGRFGAYSSVRPRKSTLGSAQIELKYDSSSGLLILQLDAMPKERVHKIVIEL

SEQ ID NO: 2549 - DNA, 2355 bp, Populus balsamifera subsp. trichocarpa
  misc_feature: Ceres Annot ID no. 1478531
  misc_feature: Encodes the peptide sequence at SEQ ID NO. 2550
atgacgatcaaaccggcggttcgaatttcggaaagcaaattggtcgttaaagaccggacgatattgactggtgtaccagacaatgttatggcaacatctggttcaagttcaggtccggtcgacggagtgtttctaggtgttgttttcgatcaagaaaatagtagacatgtggtttctttgggtgctctacgtgatgtccggttcatggcttgtttccggtttaagctatggtggatggctcaaaagatgggagatcaagggagagatattcctctagagacacagtttttattggtggaaactaaagacggttcccaccttgaatcagacggtggagatgaagagaatcagattgtatacactgttttcctgccgttgattgaaggatcattcagggcctgtttgcaggggaatgttgacgatgagcttgaactctgtttggaaagtggtgatgcagagactaaaaggacatcgttttctcattctgtgttcattcatgctgggacggatccgtttaggactataacggaggctgttagagccgtcaagttgcatctgaagactttccgtcaacggcacgagaaaaaattgcctggaattgttgattattttggttggtgtacctgggatgccttctatcaagaagttacacaagaaggggtggaagccgggctagaaagtctggcttctggtggtaccccaccaaagtttgtgatcattgatgatggatggcaatcggtcggtggtgacccacaagaggaaagcaatgatcaagatgagaagaaagaaaatcagcaaccgttgcttaggttgactgggattaaagaaaatgcaaagttccaaaagaaagatgatccaacagcggggattaagagcatagtgaatgtagcaaaggaaaaacatgggctaaaatatgtgtatgtgtggcatgctattactggatattggggtggggtccgcccagaagttaaggagatggaggagtatggttcaacgctgaaatatctgatggtgtcaaagggggtggtggagaacgatcccacatggaaaaacgatgccttggcgttgcagggattagggctggtgaatccaaaaaatgtgtacaagttttataacgagttgcatagttatctggcatctgctggcattgatggggttaaggtggatgttcaatgtatattggagacacttggtgctggtttgggtggtagggttcaattgactaggcaataccatcaggcccttgatgcttctgtcgcaaggaacttccctgataacggctgcattgcttgcatgagccataatactgatgctttgtactgctccaaacaaacggcagtggtgagagcatcggatgatttctacccgcatgatccagtatcacacaccatccatatagcagcggtggcgtataacagtgttttcttgggagagttcatgcagcctgattgggacatgttccattctctacatccaactgctgaatatcatgcttctgctagggctattagtggtggacccatctatgttagtgatgcacctgggaagcacaactttgagctactaaagaaattgatccttcctgatgggtcaattcttcgagcccgtttgcctggtaggcctacccgtgactgcttgttctccgacccagcccgcgacggtgttagcttattgaaaatatggaacatgaacaagttcacaggggtcctaggagtctacaattgccaaggagcagcatggaacaacactgaaagaaagaacacgttccaccaaaccaaaaatgaggtactgacaggcgccattaggggtcgtgatgtgcacctcatcgctgaagctgccatggaccccaactgggatggtaattgtgctgtctattgtcatcggactggagaacttatcaccctcccatacaatgcagcgttgccaatgtcactcaaagtccttgagcatgacatatttacagtcacacccatcaaggacttggcacccgggttcagctttgcacccctggggctaatcaacatgttcaatgctggtggagccattgaggggctgaagtatgaagtgaaaggtggtgctgaattattaaatcttgatgatggatataagggtgaaagtagttgtgtgagtgaacagagggtggaaaactatagcgatgaactggtagggaaagttagcatggaggttaaaggatgcggcaagtttggtgcttactcatctgctaagccaaggaagtgcattgtggacgcaaatgtggtcgaatttgtgtacgattcagattctagtttggttagtcttagcttggatagcatgcctgaggagggcaagcttcatgtagttgagattgagttatag

SEQ ID NO: 2550 - protein, 784 aa, Populus balsamifera subsp. trichocarpa
  misc_feature (7)..(768): Pfam Name: Raffinose_syn Pfam Description: Raffinose synthase or seed imbibition p
  misc_feature: Ceres Annot ID no. 1478531
  misc_feature: Bit score of 2001.4 for HMM based on sequences of Figure 37
  misc_feature: Functional Homolog Of SEQ ID NO. 2544
  misc_feature: in Figure 37
MTIKPAVRISESKLVVKDRTILTGVPDNVMATSGSSSGPVDGVFLGVVFDQENSRHVVSLGALRDVRFMACFRFKLWWMAQKMGDQGRDIPLETQFLLVETKDGSHLESDGGDEENQIVYTVFLPLIEGSFRACLQGNVDDELELCLESGDAETKRTSFSHSVFIHAGTDPFRTITEAVRAVKLHLKTFRQRHEKKLPGIVDYFGWCTWDAFYQEVTQEGVEAGLESLASGGTPPKFVIIDDGWQSVGGDPQEESNDQDEKKENQQPLLRLTGIKENAKFQKKDDPTAGIKSIVNVAKEKHGLKYVYVWHAITGYWGGVRPEVKEMEEYGSTLKYLMVSKGVVENDPTWKNDALALQGLGLVNPKNVYKFYNELHSYLASAGIDGVKVDVQCILETLGAGLGGRVQLTRQYHQALDASVARNFPDNGCIACMSHNTDALYCSKQTAVVRASDDFYPHDPVSHTIHIAAVAYNSVFLGEFMQPDWDMFHSLHPTAEYHASARAISGGPIYVSDAPGKHNFELLKKLILPDGSILRARLPGRPTRDCLFSDPARDGVSLLKIWNMNKFTGVLGVYNCQGAAWNNTERKNTFHQTKNEVLTGAIRGRDVHLIAEAAMDPNWDGNCAVYCHRTGELITLPYNAALPMSLKVLEHDIFTVTPIKDLAPGFSFAPLGLINMFNAGGAIEGLKYEVKGGAELLNLDDGYKGESSCVSEQRVENYSDELVGKVSMEVKGCGKFGAYSSAKPRKCIVDANVVEFVYDSDSSLVSLSLDSMPEEGKLHVVEIEL

SEQ ID NO: 2551 - protein, 742 aa, Vitis vinifera
  misc_feature (7)..(725): Pfam Name: Raffinose_syn Pfam Description: Raffinose synthase or seed imbibition p
  misc_feature: Public GI ID no. 147865342
  misc_feature: Bit score of 1936.8 for HMM based on sequences of Figure 37
  misc_feature: Functional Homolog Of SEQ ID NO. 2544
  misc_feature: in Figure 37
  misc_feature (159)..(159): Xaa is any aa, unknown, or other
  misc_feature (284)..(284): Xaa is any aa, unknown, or other
  misc_feature (351)..(351): Xaa is any aa, unknown, or other
MTITSAVRIADRKLVVKERTILEGVPDNVVATSGSTSGPVEGVFLGAVFNESSSTHVVSLGTLRDVRFMACFRFKLWWMAQKMGDRGRDIPLETQFLLVETKDGSQIESDGAGEENQIVYTVFLPLIEGSFRACLQGNSRDELELCLESGDADTKTSSXTHSVFISAGTDPFATITSAIRAVKLHLKTFRLRHEKKLPGIVDYFGWCTWDAFYQEVTPEGVEAGLQSLAAGGTPPKFVIIDDGWQSVGGDPQKDEDQTENKQQPLLRLTGIKENSKFQNKEDPXGGIKSIVNIAKQKHGLKYVYVWHAITGYWGGVRPGVKEMEQYDSLMKYPMVSKGVVENEPVWKTDVXTLQGLGLVNPKNVYRFYNELHEYLASAGIDGVKVDVQCILETLGAGLGGRVELTTQYHKALDASVARHFPDNGIIACMSHNTDALYCSKQTAVVRASDDFYPRDPVSHTIHIAAVAYNSVFLGEIMQPDWDMFHSLHSAAEYHASARAISGGPIYVSDAPGKHNYELLKKLVLPDGSVLRARLPGRPTRDCLFSDPARDGISLLKIWNMNKYTGVIGVYNCQGAAWNSAERKNTFHETHSGAITGTIRGRDVHLIAEAATDPEWSGDCAVYCHKSGELITLPHNAALPVSLKVLEHEILTVTPIKVLAPGFSFAPFGLINMFNAGGAIQELRYEVKGCGRFGAYSSAKPRRCTLGSIEVDFIYNSSFGLVTLNLSHMPEEGQNVHVVKVEI

SEQ ID NO: 2552 - protein, 749 aa, Arabidopsis thaliana
  misc_feature (7)..(732): Pfam Name: Raffinose_syn Pfam Description: Raffinose synthase or seed imbibition p
  misc_feature: Public GI ID no. 15241300
  misc_feature: Bit score of 1934.2 for HMM based on sequences of Figure 37
  misc_feature: Functional Homolog Of SEQ ID NO. 2544
  misc_feature: in Figure 37
MTIKPAVRISDGNLIIKNRTILTGVPDNVITTSASEAGPVEGVFVGAVFNKEESKHIVPIGTLRNSRFMSCFRFKLWWMAQRMGEMGRDIPYETQFLLVESNDGSHLESDGANGVECNQKVYTVFLPLIEGSFRSCLQGNVNDEVELCLESGDVDTKRSSFTHSLYIHAGTDPFQTITDAIRTVKLHLNSFRQRHEKKLPGIVDYFGWCTWDAFYQEVTQEGVEAGLKSLAAGGTPPKFVIIDDGWQSVERDATVEAGDEKKESPIFRLTGIKENEKFKKKDDPNVGIKNIVKIAKEKHGLKYVYVWHAITGYWGGVRPGEEYGSVMKYPNMSKGVVENDPTWKTDVMTLQGLGLVSPKKVYKFYNELHSYLADAGVDGVKVDVQCVLETLGGGLGGRVELTRQFHQALDSSVAKNFPDNGCIACMSHNTDALYCSKQAAVIRASDDFYPRDPVSHTIHIASVAYNSVFLGEFMQPDWDMFHSVHPAAEYHASARAISGGPLYVSDSPGKHNFELLRKLVLPDGSILRARLPGRPTRDCLFADPARDGVSLLKIWNMNKYTGVLGVYNCQGAAWSSTERKNIFHQTKTDSLTGSIRGRDVHSISEASTDPTTWNGDCAVYSQSRGELIVMPYNVSLPVSLKIREHEIFTVSPISHLVDGVSFAPIGLVNMYNSGGAIEGLRYEAEKMKVVMEVKGCGKFGSYSSVKPKRCVVESNEIAFEYDSSSGLVTFELDKMPIENKRFHLIQVEL

SEQ ID NO: 2553 - DNA, 2355 bp, Populus balsamifera subsp. trichocarpa
  misc_feature: Ceres Annot ID no. 1453769
  misc_feature: Encodes the peptide sequence at SEQ ID NO. 2554
atgacgatcaaaccagcggttcgtatttcagacgggaaattgatcgttaaagaccggacaatattgactggtgtgccagacaatgtgatagcaacatccggttcaacttcaggtccggtggagggagtgtttttaggtgcggtgtttgatcaagaaaatagtagacacgtgacttctttgggcgccttacgtgatgtccggttcatggcttgtttccggttcaagttgtggtggatggctcagaaaatgggggatcaagggagagatattcctctagagacacagtttttattagtggaaactaaagatgggtcccaccttgaatcagacggtggagatgaagataatcaggttgtttacactgtttttctgccgttgattgaagggtcatttagggcttgtttgcaggggaatgttagcgatgagcttgaactctgtttggagagtggtgatgcagagaccaaaacgtcgtcgtttactcacactttgttcattcatgccgggaccgatccgtttaggacaataacggaggctgttagagccgttaagttgcatctgaagacttttcgtcaacggcatgagaaaagattgcctggaattattgatcattttggttggtgtacctgggatgccttttatcaagaagtgactcaagaaggggtagaagctgggctacaaagtctagcttctggtggtaccccgccaaaattcgtgatcattgatgatggatggcaatcagttggtggtgacccagaagaggaaaccaatggtcaagatgtgaagaaacaagatcagcaaccgttgcttaggttgaccgggattaaagagaacgcaaagttccaaaagaaagatgatccagcagcggggatcaagagcatagtgaacatagctaaagaaaaatacggtttaaaatatgtgtatgtgtggcatgctattactggttattggggtggggtccgtccaggagttaaggagatggaggaatatgggtcaatgatgaagtatccaatggtgtcaaagggggtggtggagaatgagcccatatggaaaaacgatgcattgacattgcagggattagggttagtgaatccaaaaaatgtgtacaggttttataatgagttgcatagttatttggcagcagctggtatcgatggggttaaggtggatgttcaatgtattttggagacacttggtgctggtttaggaggaagggttgaattgactaggcaatatcatcaagcccttgatgcttctgttgctaggaacttccttgataatggttgcattgcttgcatgagccacaacactgatgccttgtactgctccaaacaaacagcagtggtgagagcatcagatgatttctacccgcgcgatccagtatcacacaccattcatatagcagcagtggcatataacagtgttttcttgggagagttcatgcagcctgattgggacatgttccattctctacatgcagctgcagagtatcatgcttctgctagggctattagtggtggacctatctatgtcagtgatgcacctgggaagcacaactttgagctattaaagaaggtggtacttcccgatgggtctattcttcgagctcgtttgcctggaaggcccacctctgactgcttgttctctgaccctgcccgtgatggagtgagcttattgaaaatatggaacatgaacaagttcacaggggtcctaggtgtctacaattgccaaggagcagcttggagcagcactgaaagaaagaacgctttccaccaaaccacaactgaggccctaacaggcacaattaggggccgtgatgttcacctcgttgctgaagctgccacggaccccaactgggatggcaattgtgctttctattgtcaccggacaggagagctaatcaccctcccttacaatgcagcattgccagtgtcactcaaagtccttgagcatgacatattcactgtaacacccatcaaggttttagcacctgggttcagttttgcacccctagggctaatcaacatgttcaatgcaggtggagccattgaggggctgaagtatgaagtgaaaggtggtgctgaattatcagagcttgatgatggatataggggtgaaagtagtggtgtgactgaagagagggtggggaactatagcgatgaattggtagggaaagtttgcgtagaggttaaagggtgtggcaagtttggtgcttattcatctgctaagccaaggaagtgcattgtggactcaaatgtggttgattttgtgtatgattcgaattctgggttggttggttttaacttggatagcttgcttgaggagggcaaacttcgtattgttgagattgagttatag

SEQ ID NO: 2554 - protein, 784 aa, Populus balsamifera subsp. trichocarpa
  misc_feature (7)..(768): Pfam Name: Raffinose_syn Pfam Description: Raffinose synthase or seed imbibition p
  misc_feature: Ceres Annot ID no. 1453769
  misc_feature: Bit score of 1944.9 for HMM based on sequences of Figure 37
  misc_feature: Functional Homolog Of SEQ ID NO. 2544
MTIKPAVRISDGKLIVKDRTILTGVPDNVIATSGSTSGPVEGVFLGAVFDQENSRHVTSLGALRDVRFMACFRFKLWWMAQKMGDQGRDIPLETQFLLVETKDGSHLESDGGDEDNQVVYTVFLPLIEGSFRACLQGNVSDELELCLESGDAETKTSSFTHTLFIHAGTDPFRTITEAVRAVKLHLKTFRQRHEKRLPGIIDHFGWCTWDAFYQEVTQEGVEAGLQSLASGGTPPKFVIIDDGWQSVGGDPEEETNGQDVKKQDQQPLLRLTGIKENAKFQKKDDPAAGIKSIVNIAKEKYGLKYVYVWHAITGYWGGVRPGVKEMEEYGSMMKYPMVSKGVVENEPIWKNDALTLQGLGLVNPKNVYRFYNELHSYLAAAGIDGVKVDVQCILETLGAGLGGRVELTRQYHQALDASVARNFLDNGCIACMSHNTDALYCSKQTAVVRASDDFYPRDPVSHTIHIAAVAYNSVFLGEFMQPDWDMFHSLHAAAEYHASARAISGGPIYVSDAPGKHNFELLKKVVLPDGSILRARLPGRPTSDCLFSDPARDGVSLLKIWNMNKFTGVLGVYNCQGAAWSSTERKNAFHQTTTEALTGTIRGRDVHLVAEAATDPNWDGNCAFYCHRTGELITLPYNAALPVSLKVLEHDIFTVTPIKVLAPGFSFAPLGLINMFNAGGAIEGLKYEVKGGAELSELDDGYRGESSGVTEERVGNYSDELVGKVCVEVKGCGKFGAYSSAKPRKCIVDSNVVDFVYDSNSGLVGFNLDSLLEEGKLRIVEIEL

SEQ ID NO: 2555 - DNA, 2259 bp, Populus balsamifera subsp. trichocarpa
  misc_feature: Ceres Annot ID no. 1532021
  misc_feature: Encodes the peptide sequence at SEQ ID NO. 2556
atgacgatcaaaccggcggttcgaatttcggaaagcaaattggtcgttaaagaccggacgatattgactggtgtaccagacaatgttatggcaacatctggttcaagttcaggtccggtcgacggagtgtttctaggtgttgttttcgatcaagaaaatagtagacatgtggtttctttgggtgctctacgtgatgtccggttcatggcttgtttccggtttaagctatggtggatggctcaaaagatgggagatcaagggagagatattcctctagagacacagtttttattggtggaaactaaagacggttcccaccttgaatcagacggtggagatgaagagaatcagattgtatacactgttttcctgccgttgattgaaggatcattcagggcctgtttgcaggggaatgttgacgatgagcttgaactctgtttggaaagtggtgatgcagagactaaaaggacatcgttttctcattctgtgttcattcatgctgggacggatccgtttaggactataacggaggctgttagagccgtcaagttgcatctgaagactttccgtcaacggcacgagaaaaaattgcctggaattgttgattattttggttggtgtacctgggatgccttctatcaagaagttacacaagaaggggtggaagccgggctagaaagtctggcttctggtggtaccccaccaaagtttgtgatcattgatgatggatggcaatcggtcggtggtgacccacaagaggaaagcaatgatcaagatgagaagaaagaaaatcagcaaccgttgcttaggttgactgggattaaagaaaatgcaaagttccaaaagaaagatgatccaacagcggggattaagagcatagtgaatgtagcaaaggaaaaacatgggctaaaatatgtgtatgtgtggcatgctattactggatattggggtggggtccgcccagaagttaaggagatggaggagtatggttcaacgctgaaatatctgatggtgtcaaagggggtggtggagaacgatcccacatggaaaaacgatgccttggcgttgcagggattagggctggtgaatccaaaaaatgtgtacaagttttataacgagttgcatagttatctggcatctgctggcattgatggggttaaggtggatgttcaatgtatattggagacacttggtgctggtttgggtggtagggttcaattgactaggcaataccatcaggcccttgatgcttctgtcgcaaggaacttccctgataacggctgcattgcttgcatgagccataatactgatgctttgtactgctccaaacaaacggcagtggtgagagcatcggatgatttctacccgcatgatccagtatcacacaccatccatatagcagcggtggcgtataacagtgttttcttgggagagttcatgcagcctgattgggacatgttccattctctacatccaactgctgaatatcatgcttctgctagggctattagtggtggacccatctatgttagtgatgcacctgggaagcacaactttgagctactaaagaaattgatccttcctgatgggtcaattcttcgagcccgtttgcctggtaggcctacccgtgactgcttgttctccgacccagcccgcgacggtgttagcttattgaaaatatggaacatgaacaagttcacaggggtcctaggagtctacaattgccaaggagcagcatggaacaacactgaaagaaagaacacgttccaccaaaccaaaaatgaggtactgacaggcgccattaggggtcgtgatgtgcacctcatcgctgaagctgccatggaccccaactgggatggtaattgtgctgtctattgtcatcggactggagaacttatcaccctcccatacaatgcagcgttgccaatgtcactcaaagtccttgagcatgacatatttacagtcacacccatcaaggacttggcacccgggttcagctttgcacccctggggctaatcaacatgttcaatgctggtggagccattgaggggctgaagtatgaagtgaaagggaaagttagcatggaggttaaaggatgcggcaagtttggtgcttactcatctgctaagccaaggaagtgcattgtggacgcaaatgtggtcgaatttgtgtacgattcagattctagtttggttagtcttagcttggatagcatgcctgaggagggcaagcttcatgtagttgagattgagttatag

SEQ ID NO: 2556 - protein, 752 aa, Populus balsamifera subsp. trichocarpa
  misc_feature (7)..(736): Pfam Name: Raffinose_syn Pfam Description: Raffinose synthase or seed imbibition p
  misc_feature: Ceres Annot ID no. 1532021
  misc_feature: Bit score of 1969.3 for HMM based on sequences of Figure 37
  misc_feature: Functional Homolog Of SEQ ID NO. 2544
MTIKPAVRISESKLVVKDRTILTGVPDNVMATSGSSSGPVDGVFLGVVFDQENSRHVVSLGALRDVRFMACFRFKLWWMAQKMGDQGRDIPLETQFLLVETKDGSHLESDGGDEENQIVYTVFLPLIEGSFRACLQGNVDDELELCLESGDAETKRTSFSHSVFIHAGTDPFRTITEAVRAVKLHLKTFRQRHEKKLPGIVDYFGWCTWDAFYQEVTQEGVEAGLESLASGGTPPKFVIIDDGWQSVGGDPQEESNDQDEKKENQQPLLRLTGIKENAKFQKKDDPTAGIKSIVNVAKEKHGLKYVYVWHAITGYWGGVRPEVKEMEEYGSTLKYLMVSKGVVENDPTWKNDALALQGLGLVNPKNVYKFYNELHSYLASAGIDGVKVDVQCILETLGAGLGGRVQLTRQYHQALDASVARNFPDNGCIACMSHNTDALYCSKQTAVVRASDDFYPHDPVSHTIHIAAVAYNSVFLGEFMQPDWDMFHSLHPTAEYHASARAISGGPIYVSDAPGKHNFELLKKLILPDGSILRARLPGRPTRDCLFSDPARDGVSLLKIWNMNKFTGVLGVYNCQGAAWNNTERKNTFHQTKNEVLTGAIRGRDVHLIAEAAMDPNWDGNCAVYCHRTGELITLPYNAALPMSLKVLEHDIFTVTPIKDLAPGFSFAPLGLINMFNAGGAIEGLKYEVKGKVSMEVKGCGKFGAYSSAKPRKCIVDANVVEFVYDSDSSLVSLSLDSMPEEGKLHVVEIEL

SEQ ID NO: 2557 - protein, 710 aa, Vitis vinifera
  misc_feature (7)..(693): Pfam Name: Raffinose_syn Pfam Description: Raffinose synthase or seed imbibition p
  misc_feature: Public GI ID no. 157343006
  misc_feature: Bit score of 1623.8 for HMM based on sequences of Figure 37
  misc_feature: Functional Homolog Of SEQ ID NO. 2544
MTITSAVRIADRKLVVKERTILEGVPDNVVATSVAVHTWCLWELSETCGSWRASGSSYGGWLRKWGIEGEIFPWRRSFCWWRQKMENQIVYTVFLPLIEGPFRACLQGNSRDELELCLESGDADTKTSSFTHSVFISAGTDPFATITSAIRAVKLHLKTFRLRHEKKLPGIVDYFGWCTWDAFYQEVTPEGVEAGLQSLAAGGTPPKFVIIDDGWQSVGDEDQTENKQQPLLRLTGIKENSKFQNKEDPTGGIKSIVNIAKQKHGLKYVYVWHAITGYWGGVRPGMEQYDSLMKYPMVSKGVVENEPVWKTDVMTLQGLGLVNPKNVYRFYNELHEYLASAGIDGVKVDVQCILETLGAGLGGRVELTTQYHKALDASVARHFPDNGIIACMSHNTDALYCSKQTAVVRASDDFYPRDPVSHTIHIAAVAYNSVFLGEIMQPDWDMFHSLHSAAEYHASARAISGGPIYVSDAPGKHNYELLKKLVLPDGSVLRARLPGRPTRDCLFSDPARDGISLLKIWNMNKYTGVIGVYNCQGAAWNSAERKNTFHETHSGAITGTIRGRDVHLIAEAATDPEWSGDCAVYCHKSGELITLPHNAALPVSLKVLEHEILTVTPIKVLAPGFSFAPFGLINMFNAGGAIQELRYEEHRIGGCRCGRFGAYSSAKPRRCTLGSIEVDFIYNSSFGLVTLNLSHMPEEGQNVHVVKVEI

SEQ ID NO: 2558 - protein, 771 aa, Oryza sativa subsp. japonica
  misc_feature (7)..(755): Pfam Name: Raffinose_syn Pfam Description: Raffinose synthase or seed imbibition p
  misc_feature: Public GI ID no. 50540754
  misc_feature: Bit score of 1307.4 for HMM based on sequences of Figure 37
  misc_feature: Functional Homolog Of SEQ ID NO. 2544
MTVTPRITVAEGRLVAHGRTILTGVADNIALTHASGAGLVDGAFVGATADEPKSLHVFTFGTLRDLRFMCCFRFKLWWMTQRMGTSGRDVPLETQFMLLESRDGGGGGEAVYVVMLPLLEGQFRAALQGNDRDELEICIESGDKAVQTAQGTYMVYVHAGANPFDTITQAVKVVERHLQTFHHREKKKLPSFLDWFGWCTWDAFYTDVTADGVKQGLQSLAEGGTPPRFLIIDDGWQQIGSENKEDAGNAVVQEGAQFASRLIGIKENTKFQKTTTTAMADGGETAASAAGLKALVEEAKKEHGVKYVYVWHAMAGYWGGVKPAAEGMEHYESAVAFPVQSPGVMGNQPDIVMDSLSVLGLGLVHPRMALAFYGELHAYLASCGVDGVKVDAQNIIETLGAGHGGRVSLTRAFHRALEASVARSFPDNGCISCMCHNTDMLYSARQTAVVRASDDFYPLDPASHTIHISSVAYNTLFLGEFMQPDWDMFHSLHPAAEYHGAARAIGGCPIYVSDKPGNHNFELLKKLVLPDGSVLRARLPGRPTRDCLFVDPARDGASLLKIWNVNKCTGVVGVFNCQGAGWCRITKKTRVHDAAPGTLTGSVRADDVDAIADVAGTGWTGDAVVYAHRSGELIRLPKGATLPVTLKVLEFELFHVCPVMTVAPGGGGGGVTFAPIGLLDMFNSGGAVEECDVVRALDAAGEAEAEAEAAVVRLRARGCGRFGAYSSRRPARCALDAVEVEFSYDADTGLVALDVPVPAHELYKWTVEIQV

SEQ ID NO: 2559 - protein, 770 aa, Oryza sativa subsp. indica
  misc_feature (7)..(754): Pfam Name: Raffinose_syn Pfam Description: Raffinose synthase or seed imbibition p
  misc_feature: Public GI ID no. 125546144
  misc_feature: Bit score of 1306.6 for HMM based on sequences of Figure 37
  misc_feature: Functional Homolog Of SEQ ID NO. 2544
MTVTPRITVAEGRLVAHGRTILTGVADNIALTHASGAGLVDGAFVGATADEPKSLHVFTFGTLRDLRFMCCFRFKLWWMTQRMGTSGRDVPLETQFMLLESRDGGGGGGGEAVYVVMLPLLEGQFRAALQGNDRDELEICIESGDKAVQTAQGTYMVYVHAGANPFDTITQAVKVVERHLQTFHHREKKKLPSFLDWFGWCTWDAFYTDVTADGVKQGLQSLAEGGTPPRFLIIDDGWQQIGSENKEDAGNAVVQEGAQFASRLIGIKENTKFQKTTTTAMADGGETAASAAGLKALVEEAKKEHGVKYVYVWHAMAGYWGGVKPAAEGMEHYESAVAFPVQSPGVMGNQPDIVMDSLSVLGLGLVHPRMALAFYGELHAYLASCGVDGVKVDAQNIIETLGAGHGGRVSLTRAFHRALEASVARSFPDNGCISCMCHNTDMLYSARQTAVVRASDDFYPLDPASHTIHISSVAYNTLFLGEFMQPDWDMFHSLHPAAEYHGAARAIGGCPIYVSDKPGNHNFELLKKLVLPDGSVLRARLPGRPTRDCLFVDPARDGASLLKIWNVNKCTGVVGVFNCQGAGWCRISKKTRVHDAAPGTLTGSVRADDVDAIADVAGTGWTGDAVVYAHRSGELIRLPKGATLPVTLKVLEFELFHVCPVMTVAPGGGGGGGVTFAPIGLLDMFNSGGAVEECDVVRALDAAGEAEAAVVRLRARGCGRFGAYSSRRPARCALDAAEVEFSYDADTGLVALDVPVPAHELYKWTVEIQV

SEQ ID NO: 2560 - DNA, 2322 bp, Sorghum bicolor
  misc_feature: Ceres Annot ID no. 8632040
  misc_feature: Encodes the peptide sequence at SEQ ID NO. 2561
atgacggtgacgccgaggattacggtgggggatgggcggctggtggcgcacgggcggaccatcctcaccggcgtgccggacaacatcgcgctcacgcacgcctccggtgcggggctcgtcgacggcgccttcgtcggcgccacggccgccgagcccagtagcatgcacgtcttcaccttcggcaccctccgggagctgcggttcatgtgctgcttccggttcaagctatggtggatgacccagcgcatgggcacctccggccgcgacgtcccgctggagacacagttcatgctcctggagagccgcccaggcacgggcgacaccaccggcggcggcggcgacggcgacagcggcgagacggtgtacgttgtgatgctgccgctgctggagggccaattccgggcggcgctgcagggcaacgaccgcgacgagctggagatcaccctcgagagcggggacaaggcggtgcagacggcgcaggggacctacatggtgtacgtgcacgccgggaccaaccctttcgacaccatcactcaggccgtcaaggtggtggagaggcacctgcaaacgttccatcacagggagaagaaaaagctgccgtcgttcgtggactggttcggctggtgcacgtgggacgccttctacaccgacgtcaccgccgagggcgtcaagcaaggtctcaagagcttggcggagggcggcacgccgccgcggttcctgatcatcgacgacgggtggcagcagatcggcagcgagaacaaggaggagtccaacaacgccgtcgtccaggaaggagcgcagttcgcaagcaggctgacagggatcaaggagaacgccaagttccagaagaagaagaataagaagaagagcgacgacgacaaggatggcggcgatgatcagcaggcccaggcgccggggctgaagctggtggtggaggaggcgaagcgcgaccacggcgtgaagtacgtgtacgtgtggcacgccatggcggggtactggggcggcgtgaagccggcggcggaagggatggagcactacgagagcgcgctggcgtacccggtgcagtcccccggggtgatgggcaaccagccggacatcgtcatggactcgctctccgtgctgggcctggggctggtgcacccgcgcagggtgctcagcttctacgacgagctgcactcgtacctcgcctcctgcggcgtcgacggcgtcaaggtggacgtgcagaacatcatcgagacgctcggcgccgggcacggcggccgcgtcgcgctcacccgcgcctaccaccgcgcgctcgaggcctccgtcgcccgcaacttccccgacaacggctgcatctcctgcatgtgccacaacaccgacatgctctacagcgcgcgacagaccgccgtcgtccgcgcctccgacgacttctacccgcgcgacccggcgtcgcacaccgtccacgtctcctccgtcgcctacaacaccctcttcctcggcgagttcatgcagccagactgggacatgttccatagcctgcacccggcggcggagtaccacggcgcggcgagggcgatcggcggctgcccgatctacgtcagcgacaagccaggcaaccacaacttcgagctgctcaagaagctggtcctccccgacggctccgtgctccgcgcgcagctccccggccgccccacccgcgactgcctcttcgccgacccggcacgcgacggcaccagcctgctcaagatctggaacgtgaacaagtgcacgggcgtggtgggcgtgttcaactgccagggcgccgggtggtgccgcgtcaccaagaagacccgcgtgcacgacgccgcgccggggacgctgacgggatcaatccgcgccgacgacgtggacgcgatcgccggcctcgcgggggccggctggagcggcgaggccgtcgtgtacgcctacaggtcgggggagctcgtcaggctgcccggtggcgccacgctgccggtgacgctcaaggtgctggagtacgaggtgttccacgtctgccccgtcagcggggtcgcgccgggcgtgtcgttcgcgcccatcggcctgctcgacatgttcaactccggcggggcggtggagcagtgcgaggtccgcggcggcggcggtggcgcgggcgccgtcgtcgcgctcagggtccgcggctgcggccggttcggcgcgtactgctcgcggaggcccgcgaggtgcaggctggacgcggcggaggtggacttcagctacgacgacgacacggggctcgtcgcgctccatatccccgtgccggagcaggagttctacagatgggacctggagatcgatgtctag

SEQ ID NO: 2561 - protein, 773 aa, Sorghum bicolor
  misc_feature (7)..(757): Pfam Name: Raffinose_syn Pfam Description: Raffinose synthase or seed imbibition p
  misc_feature: Ceres Annot ID no. 8632040
  misc_feature: Bit score of 1331.7 for HMM based on sequences of Figure 37
  misc_feature: Functional Homolog Of SEQ ID NO. 2544
MTVTPRITVGDGRLVAHGRTILTGVPDNIALTHASGAGLVDGAFVGATAAEPSSMHVFTFGTLRELRFMCCFRFKLWWMTQRMGTSGRDVPLETQFMLLESRPGTGDTTGGGGDGDSGETVYVVMLPLLEGQFRAALQGNDRDELEITLESGDKAVQTAQGTYMVYVHAGTNPFDTITQAVKVVERHLQTFHHREKKKLPSFVDWFGWCTWDAFYTDVTAEGVKQGLKSLAEGGTPPRFLIIDDGWQQIGSENKEESNNAVVQEGAQFASRLTGIKENAKFQKKKNKKKSDDDKDGGDDQQAQAPGLKLVVEEAKRDHGVKYVYVWHAMAGYWGGVKPAAEGMEHYESALAYPVQSPGVMGNQPDIVMDSLSVLGLGLVHPRRVLSFYDELHSYLASCGVDGVKVDVQNIIETLGAGHGGRVALTRAYHRALEASVARNFPDNGCISCMCHNTDMLYSARQTAVVRASDDFYPRDPASHTVHVSSVAYNTLFLGEFMQPDWDMFHSLHPAAEYHGAARAIGGCPIYVSDKPGNHNFELLKKLVLPDGSVLRAQLPGRPTRDCLFADPARDGTSLLKIWNVNKCTGVVGVFNCQGAGWCRVTKKTRVHDAAPGTLTGSIRADDVDAIAGLAGAGWSGEAVVYAYRSGELVRLPGGATLPVTLKVLEYEVFHVCPVSGVAPGVSFAPIGLLDMFNSGGAVEQCEVRGGGGGAGAVVALRVRGCGRFGAYCSRRPARCRLDAAEVDFSYDDDTGLVALHIPVPEQEFYRWDLEIDV

SEQ ID NO: 2562 - protein, 757 aa, Hordeum vulgare subsp. vulgare
  misc_feature (7)..(741): Pfam Name: Raffinose_syn Pfam Description: Raffinose synthase or seed imbibition p
  misc_feature: Public GI ID no. 167100
  misc_feature: Bit score of 1312.8 for HMM based on sequences of Figure 37
  misc_feature: Functional Homolog Of SEQ ID NO. 2544
MTVTPQITVGDGRLAVRGRTVLSGVPDNVTAAHAAGAGLVDGAFVGATAAEAKSHHVFTFGTLRDCRFMCLFRFKLWWMTQRMGTSGRDVPLETQFILIEVPAAAGNDDGDSSDGDSEPVYLVMLPLLEGQFRTVLQGNDQDELQICIESGDKAVETEQGMNNVYVHAGTNPFDTITQAVKAVEKHTQTFHHREKKTVPSFVDWFGWCTWDAFYTDVTADGVKQGLRSLAEGGAPPRFLIIDDGWQQIGSENKDDPGVAVQEGAQFASRLTGIRENTKFQSEHNQEETPGLKRLVDETKKEHGVKSVYVWHAMAGYWGGVKPSAAGMEHYEPALAYPVQSPGVTGNQPDIVMDSLSVLGLGLVHPRRVHRFYDELHAYLAACGVDGVKVDVQNIVETLGAGHGGRVALTRAYHRALEASVARNFPDNGCISCMCHNTDMLYSAKQTAVVRASDDFYPRDPASHTVHISSVAYNTLFLGEFMQPDWDMFHSLHPAAEYHGAARAIGGCPIYVSDKPGNHNFDLLRKLVLPDGSVLRAQLPGRPTRDCLFSDPARDGASLLKIWNMNKCAGVVGVFNCQGAGWCRVAKKTRIHDEAPGTLTGSVRAEDVEAIAQAAGTGDWGGEAVVYAHRAGELVRLPRGATLPVTLKRLEYELFHVCPVRAVAPGVSFAPIGLLHMFNAGGAVEECTVETGEDGNAVVGLRVRGCGRFGAYCSRRPAKCSVDSADVEFTYDSDTGLVTADVPVPEKEMYRCALEIRV

SEQ ID NO: 2563 - DNA, 2719 bp, Panicum virgatum
  misc_feature: Ceres Clone ID no. 1807161
  misc_feature: Encodes the peptide sequence at SEQ ID NO. 2564
aatcctgattgcgagggcagctaattactagtgctaagctcgctagcgtaattagccacgactggtagctttgtttgtcgccgcgctaattagtgattagcgtgtgacagaggaggtaatagtaattccggtggcggttctctgatctcggcggagagagagagatgacggtgacgccgaagatcacggtgggggatgggcggctggtggcgcacgggcggaccatcctgaccggcgtgccggagaacatcgtgctgacgcacgcctccggggcggagctcgtcgacggcgccttcgtcggcgccacggccggcgaggccaagagcatgcacgtcttcaccttcggcaccctcagggacctgcggttcatgtgctgcttccggttcaagctgtggtggatgacccagcgcatgggcacctccggccgcgacgtcccgctggagacgcagttcatgctcctggagagccggccgggcgccggcgccggcggcgacgacgacagcggcgagccggtgtacctggtgatgctgccgctgctggagggccagttccgcgccgcgctgcagggcaacgaccgcgacgagctggagatcaccctcgagagcggggacaaggaggttcagacggcgcaggggacctacatggtgtacgtgcacgccgggaccaaccccttcgacaccatcactcaggctgtcaaggttgtggagaggcacctgcagacgttccaccacagggacaagaaaaagctgccgtccttcgtggactggttcgggtggtgcacatgggacgccttctacaccgacgtcaccgccgagggcgtcaagcagggcctgcagagcttggcggagggcggcacgccgccgcggttcctgatcatcgacgacgggtggcagcagatcggcagcgagaacaaggaggaggccaatgccgtcgtgcaggaaggcgcgcagttcgccagcaggctgacggggatcaaggagaacgccaagttccagaacaagaaggaggaggcagagcagcagcagagccagcagcaggccgagcagggccccgggctgaagcttctggtggaggaggcgaagcgcgagcacggcgtcaagtacgtgtacgtgtggcacgccatggcggggtactggggcggcgtgaagccggcggcggaggggatggagcactacgagagcgcgctggcgttccccgtgcagtcgccgggggtgatgggcaaccagccggacatcgtcatggactccctctccgtgctggggctgggcctggtgcacccgcgcaaggccctccgcttctacgacgagctccactcgtacctggccacctgcggcgtggacggcgtcaaggtggacgtgcagaacatcatcgagaccctgggcgccgggcacggcggccgcgtgtcgctcacccgcgcctaccaccacgcgctcgaggcctccgtggcgcgcaacttccccgacaacggctgcatctcctgcatgtgccacaacaccgacatgctctacagcgcccgccagaccgccgtcgtgcgcgcctccgacgacttctacccgcgcgacccggcctcgcacaccatccacatctcctccgtcgcctacaacacgctcttcctcggcgagttcatgcagcccgactgggacatgttccatagcctgcacccggcggcggagtaccacggcgcggcgcgggcgatcggcggctgccctatctacgtcagcgacaagccgggcaaccacaacttcgagctgctcaagaagctcgtgctccccgacggctccgtgctccgcgcgcagctccccggccgccccacccgcgactgcctcttcgccgacccggcgcgcgacggcaccagcctgctcaagatctggaacgtgaacaagtgcacgggcgtggtgggcgtgttcaactgccagggcgccggctggtgccgcgtcaccaagaagacccgcgtccacgacgccgcgccggggacgctcaccgggtccgtccgcgccgaggacgtcgacgccatcgccgacctcgccggcccgggctggggcggcgaggccgtcgtgtacgcctaccggtcgggggagctcatccggctgcccaggggcgccacgctgccggtgacgctcagggtcctcgagttcgagctgttccacgtcgcccccgtcaaggaggtggcgccgggcgtgtcgttcgcgcccatcgggctgctcggcatgttcaacgccggcggcgcggtggagcagtgcgaggccgcggacggcgcggccgccgccgtgcggctcagggtccgcggctgcggccggttcggcgcctactgctcgcggaggccggcgcggtgcacgctggacgcggcggaggcggagttcacctacgacgcagacacgggactcgtcgcgctcgacatccccgtgccggagcaggagttgtacagatggaacctggagatccaggtctaggaggctcttcgatccgaccttctcaggaggctcttcgatcttctccgtcgacgtgtccgtgatggtgctcgcctcattcttcggtggacttgaccattttacgcgtgtgtggttggtgtggccatggagaggtgcgtgtgtgcacgaaatgaagccgtccgccattgatgcgtcctctctctctctctccctagaagaataaactagcgctgctctgtatactgcactacttctgttgcatatgcaataaacgaccactccatgtatgc

SEQ ID NO: 2564 - protein, 761 aa, Panicum virgatum
  misc_feature (7)..(745): Pfam Name: Raffinose_syn Pfam Description: Raffinose synthase or seed imbibition p
  misc_feature: Ceres Clone ID no. 1807161
  misc_feature: Bit score of 1326.6 for HMM based on sequences of Figure 37
  misc_feature: Functional Homolog Of SEQ ID NO. 2544
MTVTPKITVGDGRLVAHGRTILTGVPENIVLTHASGAELVDGAFVGATAGEAKSMHVFTFGTLRDLRFMCCFRFKLWWMTQRMGTSGRDVPLETQFMLLESRPGAGAGGDDDSGEPVYLVMLPLLEGQFRAALQGNDRDELEITLESGDKEVQTAQGTYMVYVHAGTNPFDTITQAVKVVERHLQTFHHRDKKKLPSFVDWFGWCTWDAFYTDVTAEGVKQGLQSLAEGGTPPRFLIIDDGWQQIGSENKEEANAVVQEGAQFASRLTGIKENAKFQNKKEEAEQQQSQQQAEQGPGLKLLVEEAKREHGVKYVYVWHAMAGYWGGVKPAAEGMEHYESALAFPVQSPGVMGNQPDIVMDSLSVLGLGLVHPRKALRFYDELHSYLATCGVDGVKVDVQNIIETLGAGHGGRVSLTRAYHHALEASVARNFPDNGCISCMCHNTDMLYSARQTAVVRASDDFYPRDPASHTIHISSVAYNTLFLGEFMQPDWDMFHSLHPAAEYHGAARAIGGCPIYVSDKPGNHNFELLKKLVLPDGSVLRAQLPGRPTRDCLFADPARDGTSLLKIWNVNKCTGVVGVFNCQGAGWCRVTKKTRVHDAAPGTLTGSVRAEDVDAIADLAGPGWGGEAVVYAYRSGELIRLPRGATLPVTLRVLEFELFHVAPVKEVAPGVSFAPIGLLGMFNAGGAVEQCEAADGAAAAVRLRVRGCGRFGAYCSRRPARCTLDAAEAEFTYDADTGLVALDIPVPEQELYRWNLEIQV

SEQ ID NO: 2565 - protein, 774 aa, Vitis vinifera
  misc_feature (7)..(758): Pfam Name: Raffinose_syn Pfam Description: Raffinose synthase or seed imbibition p
  misc_feature: Public GI ID no. 157348674
  misc_feature: Bit score of 1298.9 for HMM based on sequences of Figure 37
  misc_feature: Functional Homolog Of SEQ ID NO. 2544
MTVTPKISINEGNLVVQGKTILTGVPDNIVLTPGSGGGLVAGTFIGATASHSKSLHVFPMGTLDGLRFMCCFRFKLWWMTQRMGTCGKDVPFETQFMLIESKETTEGGEHDDAPTIYTVFLPLLEGQFRAVLQGNDKNEIEICLESGDTAVETNQGLHLVYMHSGTNPFEVIDQAVKAVEKHMQTFLHREKKKLPSFLDWFGWCTWDAFYTDVTAEGIEEGLQSLSKGGAPPKFLIIDDGWQQIGNENKDNNCVVQEGAQFANRLTGIKENEKFQKNGRNNEQVPGLKHVVEDAKQRHNVKFVYVWHALAGYWGGVKPAAAGMEHYECALAYPVQSPGVMGNQPDIVMDSLSVHGLGLVPPRTVFNFYNELHAYLASCGVDGVKVDVQNIIETLGAGHGGRVALTRSYQQALEASIARNFTDNGCISCMCHNTDGLYSTKQTAVVRASDDFYPRDPASHTIHISSVAYNTLFLGEFMQPDWDMFHSLHPAAEYHGAARAVGGCAIYVSDKPGHHNFELLRKLVLPDGSVLRAQLPGRPTRDCLFADPARDGTSLLKIWNVNKCSGVVGVFNCQGAGWCKIEKKTRVHDTSPDTLTGSVCAADVDQIAHVAGTNWKGDVVVYAYKSGEVVRLPEGASLPVTLKVLEFEVFHFCPLKEIATNISFAPIGLLDMLNSGGAVEQFEVHMASEKPELFDGEIPFELSTSLSENRSPTATIALTARGCGRFGAYSSQRPLKCQVGDAEVEFSYDPNNGLLTFTIPIPEEEMYRWSIAIQV

SEQ ID NO: 2566 - DNA, 2295 bp, Sorghum bicolor
  misc_feature: Ceres Annot ID no. 8645125
  misc_feature: Encodes the peptide sequence at SEQ ID NO. 2567
atgacggtgacgccgtggatcacggtgagcgacgggacgctggcggtgcgcggccgcacggtgctcaccggcgtgccggacaacgtgtccgcggcgcacgccgccggtgccggcctcgtcgacggggccttcgtcggcgcccacgccgccgagcccaagagccaccacgtcttcaccttcggcacgctccgggactgccggtttctgtgcctgttccggttcaagctatggtggatgacgcagcggatgggcgtctccggccgcgacgtgcctctcgagacccagttcatgctcatcgaggtccctcctgccgccaccgacggcgacggcaaacccgcgtacgtggtgatgctgccgctgctggaggggcagttccgggcggcgctgcaggggaacgaccgcgacgagctggagatctgcgtcgagagcggcgacaaggcggtgcagacggagcagggcgcgcgcatggtatacctccacgccggcgacagccccttcgacgccgtcaccgccgcggtcaaggcggtggagaagcacctgcagacgttccaccaccgagagaggaagaggatgccgtcgttcctcgactggttcggctggtgcacctgggacgccttctacaccgacgtcaccgccggcggcgtcaagcacggcctccagagcctgtccaagggcggcgcgccgccgcggttcctcatcatcgacgacggctggcagcagatcgcctccgacaacaagaagcccgacgaccccaacgtcgccgtccaggagggcgcgcaattcgccagtcggctgacggggatcaaggagaacaccaagttccagaccaagccggacggcgacggcgacggcgacggcgggctgaagcggctggtgtcggagaccaagggcgtgcacggcgtgaagcaggtgtacgtgtggcacgcgatggcggggtactggggcggcgtggcgccgtcgtcggggacagcgatggagcgttacgagccggcgctggcgtacccggtgcagtccccaggcgtgacggcgaaccagccggacatcgtcatggactcgctgtccgtcctgggcctcggcctggtgcacccgcggcgggcgcgggacttctacggcgagctccacgcgtacctggcctcctgcggcgtggacggcgtcaaggtggacgtgcagaacatcatcgagacgctgggcgccggccatggcggccgcgtcgcgctcaccagggcctaccaccgcgcgctcgaggcctccgtggcgcgcagcttccccgacaacggctgcatctcctgcatgtgccacaacaccgacatgctctacagcgccaggcagaccgccgtggtgcgcgcctccgacgacttctacccgcgcgacccggcctcccacaccgtccatgtcgcctccgtcgcctacaacaccgtcttcctcggcgagttcatgcagcccgactgggacatgttccatagcttgcacccggcggcggagtaccacggcgcggcgagggccatcggcggctgcccgatatatgtcagcgacaagccggggaaccacaacttcgagctgctcaggaagctcgtcctccccgacggctccgtgctccgcgcgcagctccccggccggcccacacgcgactgcctcttctccgacccggcgcgcgacggcgcaagcctgctcaagatctggaacctgaacaagtgcggcggcgtggtgggcgtgttcaactgccagggcgccgggtggtgccgcgtgacgaagcggacgcgcgtgcacgacgcggcgccgggcacgctgaccggcgccgtgcgcgccgacgacgtggacgccatagcgcgcgtcgccggcgacggcggcaacgatggcgacaacggcagcaacggcgagtgggacggcgaggccgtggtgtacgcgcaccgcgcgcgggagctggtgcggctgccgcgtggcgccgcgctgcccgtgacgctggcgccgctgcagtacgaggtgttccacgtgtgcccgctccgcgccgccgcgccgggggtggcgttcgcgcccgtggggctgctcgacatgttcaacgccgggggcgccgtcgaggagtgccgcgcagtggacggcggcgggaaggccgtggtggcgctcagggtgcgcgggtgcggccggttcggtgcctactgctcgcgggagccggcgaggtgcctgctggactcggcggaagtggagttcggctacgacgccgacaccggcctcgtgtccgtcgacctgccggtgccggagaaggagatgtaccggtggacgctggagattgtggtctag

SEQ ID NO: 2567 - protein, 764 aa, Sorghum bicolor
  misc_feature (7)..(748): Pfam Name: Raffinose_syn Pfam Description: Raffinose synthase or seed imbibition p
  misc_feature: Ceres Annot ID no. 8645125
  misc_feature: Bit score of 1260.4 for HMM based on sequences of Figure 37
  misc_feature: Functional Homolog Of SEQ ID NO. 2544
MTVTPWITVSDGTLAVRGRTVLTGVPDNVSAAHAAGAGLVDGAFVGAHAAEPKSHHVFTFGTLRDCRFLCLFRFKLWWMTQRMGVSGRDVPLETQFMLIEVPPAATDGDGKPAYVVMLPLLEGQFRAALQGNDRDELEICVESGDKAVQTEQGARMVYLHAGDSPFDAVTAAVKAVEKHLQTFHHRERKRMPSFLDWFGWCTWDAFYTDVTAGGVKHGLQSLSKGGAPPRFLIIDDGWQQIASDNKKPDDPNVAVQEGAQFASRLTGIKENTKFQTKPDGDGDGDGGLKRLVSETKGVHGVKQVYVWHAMAGYWGGVAPSSGTAMERYEPALAYPVQSPGVTANQPDIVMDSLSVLGLGLVHPRRARDFYGELHAYLASCGVDGVKVDVQNIIETLGAGHGGRVALTRAYHRALEASVARSFPDNGCISCMCHNTDMLYSARQTAVVRASDDFYPRDPASHTVHVASVAYNTVFLGEFMQPDWDMFHSLHPAAEYHGAARAIGGCPIYVSDKPGNHNFELLRKLVLPDGSVLRAQLPGRPTRDCLFSDPARDGASLLKIWNLNKCGGVVGVFNCQGAGWCRVTKRTRVHDAAPGTLTGAVRADDVDAIARVAGDGGNDGDNGSNGEWDGEAVVYAHRARELVRLPRGAALPVTLAPLQYEVFHVCPLRAAAPGVAFAPVGLLDMFNAGGAVEECRAVDGGGKAVVALRVRGCGRFGAYCSREPARCLLDSAEVEFGYDADTGLVSVDLPVPEKEMYRWTLEIVV

SEQ ID NO: 2568 - DNA, 2807 bp, Zea mays
  misc_feature: Ceres Clone ID no. 1533376
  misc_feature: Encodes the peptide sequence at SEQ ID NO. 2569
aaaacccgccagcatctccctccgagtccagggggcaggggcaccattaccgagtagtttaattagtgctagttgtattaccgttgttagtgacataattaccctcacgcgaagaacccctaccttggctagtcctcctacgtatacgtctcttctcttcgcttaatcttggtcggtgatttgattctgcacttcttgggcgcattgcagagggtgctcggtctgcagctatcttaggttaaccagtcgtgtgtggtctatcggtttcgatatagtactactgctctgttataatcagcggggaggaggaagatgacggtgacgccacggatcacggtgagcgacgggcggctgacggtgcgcggccgtacggtgctcaccggcgtgccggacaacgtgtcggcggcgcacgcggccggggcggggctcgtcgacggggccttcgtcggcgcccacgccggcgaggccaagagccaccacgtcttcactttcggcacgctccgggactgccggttcctgtgcctgttccggttcaagctgtggtggatgacgcagcggatgggcgtctccggccgcgacgtccctctggagacccagttcatgctcgtcgaggtccctgccagtgacggcgacggcgacgacgcccccgcgtacgtggtgatgcttccgctgctggaggggcagtttcgggcggcgctgcaggggaacgaccgcgacgagctgcagatctgcatcgagagcggggacaaggcggtgcagacggaccaggccgcgcacatggtgtacctccacgccggcgacaaccccttcgacaccgtcaccgccgccgtcaaggcggtggagaagcacctgcagacgttccaccaccgcgacaagaagaagctgccgtcgttcctcgactggttcggctggtgcacctgggacgccttctacaccgacgtcaccgccgacggcgtcaagaacggccttcagagcctgtccaagggcggcgcgccgccgcggttcctcatcatcgacgacggctggcagcagatcgcctccgagaacaagcccgaccccaacgtcgccgtccaggagggcgcgcaattcgccagccggctgaccgggatcaaggagaacaccaagttccagaccaagcccgacggagacggcgacggcgagcaggcggcgggcgggctgaagcgactggtggccgagaccaaggacgcgcacggcgtgaagcaggtgtacgtgtggcacgccatggccgggtactggagcggcgtgacgccgacggcggggacggcgatggagcgctacgagccggcgctggcgtaccccgtgcagtccccgggcgtgacgggcaaccagccggacatcgtcatggactcgctgtccgtcctggggctgggcctggtgcacccgcgccgggtgcgggacttctacggcgagctccacgcgtacctcgcctcctgcggcgtcgacggcgtcaaggtggacgtgcagaacatcatcgagacgctgggcgccggccacggcggccgcgtcgccatcacccgcgcctaccaccgcgcgctcgaggcctccgtggcgcgcagcttcccagacaacggctgcatctcctgcatgtgccacaactccgacatgctgtacagcgccaggcagaccgccgtcgtgcgcgcctccgacgacttctacccgcgcgacccggcatcgcacaccgtccacgtcgcctccgtcgcgtacaacaccgtcttcctcggcgagttcatgcagcccgattgggacatgttccatagcttgcatccggcggcggagtaccacggcgcggcgagggccatcggtggctgcccgatatacgtcagcgacaagccggggaaccacaacttcgagctgctcaggaagctcgtgctccccgacggctccgtgctacgcgcgcagcttcccggccggcccacacgcgactgcctcttctccgacccggcgcgcgacggcgcgagtttgctcaagatctggaacctgaacaagtgcggtggcgtggtgggtgtgttcaactgccagggagccgggtggtgccgcgtgaccaagcggacgcgcgtgcacgacgcgtcgccgggcacgctgaccggcaccgtgcgtgccgacgacgtcgacgccatagcgcgcgtcgctagtgacggcggcgggtgggacggcgagaccgtggtgtatgcgcaccgcacgcgggagctagtgcgacttccgcggggcgtcgcgctgcccgtgacgctaggcccgctccagtatgaggtgttccatgtgtgcccgctccgcgccgtcgtgccgggggtctcgttcgcgcccgtcgggctgctggacatgttcaacgccgggggcgccgttgaggagtgcgacgtgatcagcgatgctggcggcaaggccatggctctcagggttcgcgggtgcggtcggttcggcgcttactgctcgcgggagccggcgaggtgcctattggactcggcggaagtggagttcagctacgatatcgacactggcctcgtgtccgtcgacttgctggtgccggagcaggagctatacctttggacgctggagattatgatctaggtcgtgatgctgtgcgccgacgccaacgcttgccttcgcggctgagccattatgagtcggacgacattgtcatttgctatgtgcacgagagatagatgtattgtggtggtgttgtataattggcatggggagtgttttttttgttatgttcttatctgtatatcatacgtgctctgaatgttatataatacttgataataaaggatgggtgctcctttaatacg

SEQ ID NO: 2569 - protein, 756 aa, Zea mays
  misc_feature (7)..(740): Pfam Name: Raffinose_syn Pfam Description: Raffinose synthase or seed imbibition p
  misc_feature: Ceres Clone ID no. 1533376
  misc_feature: Bit score of 1257.7 for HMM based on sequences of Figure 37
  misc_feature: Functional Homolog Of SEQ ID NO. 2544
MTVTPRITVSDGRLTVRGRTVLTGVPDNVSAAHAAGAGLVDGAFVGAHAGEAKSHHVFTFGTLRDCRFLCLFRFKLWWMTQRMGVSGRDVPLETQFMLVEVPASDGDGDDAPAYVVMLPLLEGQFRAALQGNDRDELQICIESGDKAVQTDQAAHMVYLHAGDNPFDTVTAAVKAVEKHLQTFHHRDKKKLPSFLDWFGWCTWDAFYTDVTADGVKNGLQSLSKGGAPPRFLIIDDGWQQIASENKPDPNVAVQEGAQFASRLTGIKENTKFQTKPDGDGDGEQAAGGLKRLVAETKDAHGVKQVYVWHAMAGYWSGVTPTAGTAMERYEPALAYPVQSPGVTGNQPDIVMDSLSVLGLGLVHPRRVRDFYGELHAYLASCGVDGVKVDVQNIIETLGAGHGGRVAITRAYHRALEASVARSFPDNGCISCMCHNSDMLYSARQTAVVRASDDFYPRDPASHTVHVASVAYNTVFLGEFMQPDWDMFHSLHPAAEYHGAARAIGGCPIYVSDKPGNHNFELLRKLVLPDGSVLRAQLPGRPTRDCLFSDPARDGASLLKIWNLNKCGGVVGVFNCQGAGWCRVTKRTRVHDASPGTLTGTVRADDVDAIARVASDGGGWDGETVVYAHRTRELVRLPRGVALPVTLGPLQYEVFHVCPLRAVVPGVSFAPVGLLDMFNAGGAVEECDVISDAGGKAMALRVRGCGRFGAYCSREPARCLLDSAEVEFSYDIDTGLVSVDLLVPEQELYLWTLEIMI

SEQ ID NO: 2570 - DNA, 2331 bp, Populus balsamifera subsp. trichocarpa
  misc_feature: Ceres Annot ID no. 1453705
  misc_feature: Encodes the peptide sequence at SEQ ID NO. 2571
atgacggtgacaccaaagatttcaatcaatgatgggaaccttgtggttcatgggaagacaattttaactggagttcctgataacattgttctgactcctggctctggtgttggacttgttgctggtgcttttattggtgctactgcttctcataacaaaagtctccatgtttttcctgttgggggtttagaggatcttcgatttatgtgttgcttccgattcaagttatggtggatgacccagagaatggggaagtgtgggaaagatattccactggagactcaattcatgctagtggaaagcaagggtggtggtgaagaagttgatcaagatgatgcacagacaatctacactgttttccttcccctgcttgaaggccagttccgtgctgtactgcaaggcaacgacaggaatgagatggagatttgccttgagagcggcgatagtgctgttgaaaccaaccaaggccttcacctggtctacatgcatgctgggaccaatccttttgaagtcataaaccaagctgtaaaggctgtggaaaaacatttgcaaacctttcttcatcgggagaagaaaaagatgccctcatttcttgactggtttggctggtgtacttgggatgccttttacacagatgtcaccgctgagggtgttgaggaaggccttaagagtctgtcagagggagggactcctccacgatttttgatcatcgatgatggttggcaacagattgaaaataaagcaaaggaggatgctaatgctgttgtacaagaaggagcacaatttgcaagtaggcttactggaataaaggagaactctaaattccagaagaatggtgaaaagaatgagcaggccataggactgaagcttgttgtggacaatgccaagcaacaacacaatgtgaagtatgtttatgcatggcatgctttggctggttattggggtggagttaaaccagcagctgctggtatggagcattatgacactgccctggcttatccagttcaatctcctggcgtgttaggcaaccaacctgatattgttatggacagcctagcagttcatggccttggtttggtgcatccaaagaaggtcttcaacttctacaatgagctccatgcctacttagcatcgtgtggagttgatggagtgaaagtcgatgttcagaacattattgaaacccttggtgctggccatggtggaagagtttctctgactcgtagctatcaacaagcacttgaggcttcaattgcacgaaacttccctgacaatggatgtatttcctgcatgtgtcataacactgatggaatctatagcaccaagcagacagctgtagtgagagcttctgatgatttctatcctcgggatcctgcttcccacaccatccatatctcctctgtggcttacaacactctattccttggagaatttatgcaaccagactgggatatgttccatagtttacacccggctgcagattatcatggggcagctcgtgctattggtggatgtgcaatctatgtcagtgataagccaggcaaccacaactttgatctattgaagaagctggtcctccctgatggatctgtccttcgtgctcaacttccaggcaggccaacacgtgacagcctctttgttgatccagcaagagatggaatgagcttactcaaggtctggaatgtgaacaaatgcactggtgtggttggtgtcttcaactgccaaggtgcgggttggtgcaagattgagaagaagacccgcattcatgacacaactccggggaccctcactgcttctgttcgtgccagcgacgttgactgcattgctcaagttgctggtgcaaattgggatggggagaccgtggtctatgcctacaaatcaggggagttggttcggttgcctaaaggtgcttcaatgccagtgacattgaaagttcttgaatacgaactcttccatttctgtcctatcaatgagatcacttccaacatttcatttgcaccaataggcttgcttgacatgttcaacacaggaggtgctgtggagcaggttgaaattcaaatggcttctgacaagtcaccggagcactttgatggtgaagtctcctcagagctgaccacttctctcagtgagagccggtctccaactgcaaccattgcgctgaaagtcagggggtgtggaaggtttggtgcttactcttcccaaagacctctgaaatgcactgtgggcaatgttttcaccgacttcaattatgactctgccactgggctagttaccctgactctgcctgtaccagtagtggaaatgtacagatggcctgtggagatacaagtttaa

SEQ ID NO: 2571 - protein, 776 aa, Populus balsamifera subsp. trichocarpa
  misc_feature (7)..(760): Pfam Name: Raffinose_syn Pfam Description: Raffinose synthase or seed imbibition p
  misc_feature: Ceres Annot ID no. 1453705
  misc_feature: Bit score of 1313.4 for HMM based on sequences of Figure 37
  misc_feature: Functional Homolog Of SEQ ID NO. 2544
MTVTPKISINDGNLVVHGKTILTGVPDNIVLTPGSGVGLVAGAFIGATASHNKSLHVFPVGGLEDLRFMCCFRFKLWWMTQRMGKCGKDIPLETQFMLVESKGGGEEVDQDDAQTIYTVFLPLLEGQFRAVLQGNDRNEMEICLESGDSAVETNQGLHLVYMHAGTNPFEVINQAVKAVEKHLQTFLHREKKKMPSFLDWFGWCTWDAFYTDVTAEGVEEGLKSLSEGGTPPRFLIIDDGWQQIENKAKEDANAVVQEGAQFASRLTGIKENSKFQKNGEKNEQAIGLKLVVDNAKQQHNVKYVYAWHALAGYWGGVKPAAAGMEHYDTALAYPVQSPGVLGNQPDIVMDSLAVHGLGLVHPKKVFNFYNELHAYLASCGVDGVKVDVQNIIETLGAGHGGRVSLTRSYQQALEASIARNFPDNGCISCMCHNTDGIYSTKQTAVVRASDDFYPRDPASHTIHISSVAYNTLFLGEFMQPDWDMFHSLHPAADYHGAARAIGGCAIYVSDKPGNHNFDLLKKLVLPDGSVLRAQLPGRPTRDSLFVDPARDGMSLLKVWNVNKCTGVVGVFNCQGAGWCKIEKKTRIHDTTPGTLTASVRASDVDCIAQVAGANWDGETVVYAYKSGELVRLPKGASMPVTLKVLEYELFHFCPINEITSNISFAPIGLLDMFNTGGAVEQVEIQMASDKSPEHFDGEVSSELTTSLSESRSPTATIALKVRGCGRFGAYSSQRPLKCTVGNVFTDFNYDSATGLVTLTLPVPVVEMYRWPVEIQV

SEQ ID NO: 2572 - protein, 763 aa, Oryza sativa subsp. indica
  misc_feature (7)..(747): Pfam Name: Raffinose_syn Pfam Description: Raffinose synthase or seed imbibition p
  misc_feature: Public GI ID no. 125557655
  misc_feature: Bit score of 1251.7 for HMM based on sequences of Figure 37
  misc_feature: Functional Homolog Of SEQ ID NO. 2544
MTVTPQITVSDGRLAVRGRTVLTGVPENVTAAHASGAGLVDGAFVGADAGEAKSHHVFTFGTLRECRFMCLFRFKLWWMTQRMGSSGRDVPLETQFMLIEVPATAAGDGHDGGGDGEPVFVVMLPLLEGKFRAALQGNDDDELQICIESGDKAVQTEQGVNMVYIHAGTNPFDTITQAIKAVEKRMQTFHHRDKKKMPSFLDWFGWCTWDAFYTDVTADGVKQGLRSLANGGAPPRFLIIDDGWQQIGTEDDDTDEHPAVAVQEGAQFASRLTGIKENVKFQSKNGGAGEDTPGLRMLVEEVKGEHGIRQVYVWHAMAGYWGGVAPAPAMERYEAALAYPVQSPGVTANQPDIVMDSLSVLGLGLVHPRKVLDFYDELHAYLASCGVDGVKVDVQNIIETLGAGHGGRVALTRAYNRALEASVARSFPDNGCISCMCHNTDMLYSARQTAVVRASDDFYPRDPASHTIHVASVAYNTVFLGEFMQPDWDMFHSLHPAAEYHGAARAIGGCPIYVSDKPGNHNFDLLRKLVLPDGSVLRARLPGRPTRDCLFSDPARDGESLLKIWNLNKCGGVVGVFNCQGAGWCRVAKKTRVHDAAPGTLTGAVRADDVDAIAQVAGGDGGGWDGEAVVYAHRARELVRLPRGAALPVTLGALEYEVFHVCPVRAIAAAPGGAAVAFAPVGLLDMFNAGGAVEECAVDAAAAVALRVRGCGRFGAYFSRRPARCALDGADVGFTYDGDTGLVAVDLPVPEQEMYRWNLEIHV

SEQ ID NO: 2573 - protein, 772 aa, Cucumis melo
  misc_feature (7)..(756): Pfam Name: Raffinose_syn Pfam Description: Raffinose synthase or seed imbibition p
  misc_feature: Public GI ID no. 29838631
  misc_feature: Bit score of 1279.1 for HMM based on sequences of Figure 37
  misc_feature: Functional Homolog Of SEQ ID NO. 2544
MTVTPKISVNDGNLVVHGKTILTGVPDNIVLTPGSGLGLVAGAFIGATASNSKSLHVFPVGVLEGTRFLCCFRFKLWWMTQRMGTSGRDIPFETQFLLMESKGNDGEDPDNSSTIYTVFLPLLEGQFRAALQGNEKNEMEICLESGDNTVETNQGLSLVYMHAGTNPFEVITQAVKAVEKHTQTFLHREKKKLPSFLDWFGWCTWDAFYTDATAEGVVEGLKSLSEGGAPPKFLIIDDGWQQIEAKPKDADCVVQEGAQFASRLSGIKENHKFQKNGNNYDQVPGLKVVVDDAKKQHKVKFVYAWHALAGYWGGVKPASPGMEHYDSALAYPVQSPGMLGNQPDIVVDSLAVHGIGLVHPKKVFNFYNELHSYLASCGIDGVKVDVQNIIETLGAGHGGRVTLTRSYHQALEASIARNFSDNGCIACMCHNTDSLYSAKQTAVVRASDDYYPRDPTSHTIHISSVAYNSLFLGEFMQPDWDMFHSLHPTAEYHGAARAIGGCAIYVSDKPGNHNFDLLKKLVLPDGSVLRAQLPGRPTRDSLFNDPARDGISLLKIWNMNKCSGVVGVFNCQGAGWCRITKKTRIHDESPGTLTTSVRAADVDAISQVAGADWKGDTIVYAYRSGDLIRLPKGASVPVTLKVLEYDLLHISPLKDIASNISFAPIGLLDMFNTGGAVEQVNVQVVEPIPEFDGEVASELTCSLPNDRPPTATITMKARGCRRFGLYSSQRPLKCSVDKVDVDFVYDEVTGLVTFEIPIPTEEMYRWDIEIQV

SEQ ID NO: 2574 - protein, 763 aa, Oryza sativa subsp. japonica
  misc_feature (7)..(747): Pfam Name: Raffinose_syn Pfam Description: Raffinose synthase or seed imbibition p
  misc_feature: Public GI ID no. 115471135
  misc_feature: Bit score of 1247.6 for HMM based on sequences of Figure 37
  misc_feature: Functional Homolog Of SEQ ID NO. 2544
MTVTPQITVSDGRLAVRGRTVLTGVPENVTAAHASGAGLVDGAFVGADAGEAKSHHVFTFGTLRECRFMCLFRFKLWWMTQRMGSSGRDVPLETQFMLIEVPATAAGDGHDGGGDGEPVFVVMLPLLEGKFRAALQGNDDDELQICIESGDKAVQTEQGVNMVYIHAGTNPFDTITQAIKAVEKRMQTFHHRDKKKMPSFLDWFGWCTWDAFYTDVTADGVKQGLRSLANGGAPPRFLIIDDGWQQIGTEDDDTDEHPAVAVQEGAQFASRLTGIKENVKFQSKNGGAGEDTPGLRMLVEEVKGEHGVRQVYVWHAMAGYWGGVAPAPAMERYEAALAYPVQSPGVTANQPDIVMDSLSVLGLGLVHPRKVLDFYDELHAYLASCGVDGVKVDVQNIIETLGAGHGGRVALTRAYNRALEASVARSFPDNGCISCMCHNTDMLYSARQTAVVRASDDFYPRDPASHTIHVASVAYNTVFLGEFMQPDWDMFHSLHPAAEYHGAARAIGGCPIYVSDKPGNHNFDLLRKLVLPDGSVLRARLPGRPTRDCLFSDPARDGESLLKIWNLNNCGGVVGVFNCQGAGWCRVAKKTRVHDAAPGTLTGAVRADDVDAIAQVAGGDGGGWDGEAVVYAHRARELVRLPRGAALPVTLGALEYEVFHVCPVRAIAAAPGGAAVAFAPVGLLDMFNAGGAVEECAVDAAAAVALRVRGCGRFGAYFSRRPARCALDGADVGFTYDGDTGLVAVDLPVPEQEMYRWNLEIHV

SEQ ID NO: 2575 - protein, 765 aa, Brassica oleracea
  misc_feature (7)..(749): Pfam Name: Raffinose_syn Pfam Description: Raffinose synthase or seed imbibition p
  misc_feature: Public GI ID no. 488787
  misc_feature: Bit score of 1309.2 for HMM based on sequences of Figure 37
  misc_feature: Functional Homolog Of SEQ ID NO. 2544
MTITSNISVQNDNLVVQGKTILTKIPDNIILTPVAGAGSDSGAFIGATFKQSKSLHVFPIGVLEGLRFMCCFRFKLWWMTQRMGASGKDIPLETQFMLLESKDEVNGDDAPTVYTVFLPLLEGQFRAVLQGNEKNEIEICLESGDKAVGTSQGTHLVYVHAGTNPFEVITQSVKAAERQMQTFHHREKKKLPSFVDWFGWCTWDAFYTDVTAEGVDEGLRSLSEGGTPPRFLIIDDGWQQIENKEKDSNCLVQEGAQFATRLVGIKENAKFQKNDPKDTQVSGLKSVVDNAKQRHNVKQVYAWHALAGYWGGVKPRASGMEHYDSALAYPVQSPGVLGNQPDIVMDSLAVHGLGLVNPKKVFNFYNELHSYLASCGIDGVKVDVQNIIETLGAGLGGRVSLTRSYHQALEASIARNFKDNGCISCMCHNTDGLYSAKQTAIVRASDDYYPRDPASHTIHIASVAYNTLFLGEFMQPDWDMFHSLHPTAEYHAAARAVGGCAIYVSDKPGNHNFDLLRKLVLPDGSVLRARLPGRPTRDCLFADPARDGTSLLKIWNMNKFTGIVGVFNCQGAGWCKDTKKNRIHDTSPGTLTGLVRAEDADLISEVAGQDWGGDSIVYAYKSGELVRLPKGASIPLTLKVLEYELFHISPLKEITASISFAPIGLLDMFNSSGAIQSMEINTVTDEKPELSSSSVVSENRSPTALISLGVRGCGRFGAYSSQRPLRCAVDGTETEFNYDAEVGLVTLNLPVTREEMFRWRVEILV

SEQ ID NO: 2576 - protein, 772 aa, Cucumis sativus
  misc_feature (7)..(756): Pfam Name: Raffinose_syn Pfam Description: Raffinose synthase or seed imbibition p
  misc_feature: Public GI ID no. 91075914
  misc_feature: Bit score of 1275.8 for HMM based on sequences of Figure 37
  misc_feature: Functional Homolog Of SEQ ID NO. 2544
MTVTPKITVNDGNLVVHGKTILTGVPDNIVLTPGSGLGLVAGAFIGATASNSKSLHVFPVGVLEGTRFLCCFRFKLWWMTQRMGTSGRDIPFETQFLLMESQGNDGEDPDNSSTIYTVFLPLLEGQFRAALQGNEKNEMEICLESGDNTVETNQGLSLVYMHAGTNPFEVITQAVKAVEKHTQTFLHREKKKLPSFLDWFGWCTWDAFYTDVTAEGVVEGLQSLSDGGAPPKFLIIDDGWQQIEAKPKDADCVVQEGAQFASRLSGIKENHKFQKNGNNYDQVPGLKVVVDDAKKQHKVKFVYAWHALAGYWGGVKPASPGMEHYDSALAYPVQSPGMLGNQPDIVVDSLAVHGIGLVHPKKVFNFYNELHSYLASCGIDGVKVDVQNIIETLGAGHGGRVTLTRSYHQALEASIARNFSDNGCIACMCHNTDSLYSAKQTAVVRASDDYYPRDPASHTIHISSVAYNSLFLGEFMQPDWDMFHSLHPTAEYHGAARAIGGCAIYVSDKPGNHNFDLLKKLVLPDGSVLRAQLPGRPTRDSLFNDPARDGTSLLKIWNMNKCSGVVGVFNCQGAGWCRITKKTRIHDESPGTLTTSVRAADVDAISQVAGADWKGDTIVYAYRSGDLTRLPKGASVPVTLKVLEYDLFHISPLKDITSNISFAPIGLVDMFNIGGAVEQVDIQVVEPIPEFDGEVASELTCSLPDDRPPTATITMKARGCGRFGLYSSQRPLKCSVDKVGTDFVYDDVTGLVTFEIPIPTEEMYRWNIEIEV

SEQ ID NO: 2577 - DNA, 2382 bp, Populus balsamifera subsp. trichocarpa
  misc_feature: Ceres Annot ID no. 1474940
  misc_feature: Encodes the peptide sequence at SEQ ID NO. 2578
atgacggtgacaccaaagatttcaatcaatgatgggaaccttctggttcatgggaagacaattttaactggagttcctgataacattgtcttgactcctggctctggtgttggacctgttgctggtgcttttattggtgccaccgcttctcatagccaaagtctccatgtttttcctgttggggttttagaggatcttcgttttatgtgttgtttccgattcaagttatggtggatgacccagagaatggggaaatgtgggaaagatattcctctggagactcaattcatgctagtggaaagcaggaatggcggtgaaggagttgatcaagatgatgcacagacaatctacaccgtcttccttcccctactagaaggccagttccgtgctgtactgcaaggcagcgacaggaatgagatggagatttgccttgatagcggggatagtgctgttgaaaccaatcaaggacttaacctggtctacatgcatgctgggactaacccctttgaagtcataaaccaggctgtcatggctgtggaaaaatatatgcaaacttttcttcatcgggaaaagaaaaagctgccctcttttcttgactggtttggctggtgtacctgggatgccttttacacggatgtcaccgctgagggtgttagggaaggccttgagagtctgtcagaaggagggactcccccacgatttttgatcattgatgatggttggcaacagatcgaaaataaagcaaaggaggatgctaatgttgttgtacaagaaggagcacaatttgcaagtaggcttactggaataaaggagaattcaaaattccagaagaactgtgaaaagaatgaacaggtgattggactgaagcatgttgtggacgatgctaagcaatgccataatgtgaagtgtgtttatgtatggcatgctttggctggttactggggtggagttaaaccagcggctgctggtatggagcattatgacactgcactggcttatccggttcaatctcctggtgttataggcaaccaacctgacgttgttatggacagcctatcagttcatggccttggtttagtgcatccaaagaaggttttcaacttctacaatgagctccatgcctatttagcatcatgtggagttgatggagtaaaagttgatgctcagaacattattgaaacacttggtgctggccatggtggaagagtgtctctcacccgtagctatcaccaagctcttgaggcctcaattgcaagaaacttccctgacaatggatgcattgcctgcatgtgtcataacactgatggaatctatagtgccaagcagactgctgtagtgagagcttctgatgatttctatcctcgggaccctgcttcccacaccatccatatctcctctgtggcttacaacactcttttccttggagaatttatgcaaccagactgggatatgttccatagtttacacccggctgcagagtatcatggggctgctcgtgctattggtggatgtgcaatctatgtcagtgataaaccagggaaccacaactttgacctattgaagaagctggtcctccctgatggatctgtcctccgtgcccaacttccaggccggccaacacttgacagtctctttgctgacccagcaagagatggaactagcttactcaagatctggaatgtgaacaaatgcaccggtgtagtaggtgtcttcaactgccaaggtgcggggtggtgcaagattgagaagaagacccgcattcatgatgaaactccaggtactctcacgggctctgtttgtgctagtgatgttgattgcattgctcaagttactggtgcaaaatggaatggggaaaccgtggtgtatgcctacaaatcaggggagttggttcggttgcctaaaggtgcttcagtgccagtgacactaaaagttcttgaatatgaactcttccatttctgtcctatcgatgatatcgcttccaacatttcatttgcaccaataggcttgcttgacatgttcaactcaggcggtgctgtggagcaggttgaaatccatatgacttctgacaaggcgccagagcactttgatggtgaagtctcctcagagctgactacttctctcagtgagaaccggtttccaactgcaaccattgcactgagagtcaggggctgcggacggtttggtgcttactcttcccagcgccctctaaaatgcactgtgggcaatgttgacacagacttcaatcatgactctgccactgggctactgaccctgactctccctgtagcagaagaggaaatgtacagatggcctgtggagatacaggctgtgattgattttcaacagcaaggtaaactgtctattgtactgcgaggccattaa

SEQ ID NO: 2578 - protein, 793 aa, Populus balsamifera subsp. trichocarpa
  misc_feature (7)..(760): Pfam Name: Raffinose_syn Pfam Description: Raffinose synthase or seed imbibition p
  misc_feature: Ceres Annot ID no. 1474940
  misc_feature: Bit score of 1292.8 for HMM based on sequences of Figure 37
  misc_feature: Functional Homolog Of SEQ ID NO. 2544
MTVTPKISINDGNLLVHGKTILTGVPDNIVLTPGSGVGPVAGAFIGATASHSQSLHVFPVGVLEDLRFMCCFRFKLWWMTQRMGKCGKDIPLETQFMLVESRNGGEGVDQDDAQTIYTVFLPLLEGQFRAVLQGSDRNEMEICLDSGDSAVETNQGLNLVYMHAGTNPFEVINQAVMAVEKYMQTFLHREKKKLPSFLDWFGWCTWDAFYTDVTAEGVREGLESLSEGGTPPRFLIIDDGWQQIENKAKEDANVVVQEGAQFASRLTGIKENSKFQKNCEKNEQVIGLKHVVDDAKQCHNVKCVYVWHALAGYWGGVKPAAAGMEHYDTALAYPVQSPGVIGNQPDVVMDSLSVHGLGLVHPKKVFNFYNELHAYLASCGVDGVKVDAQNIIETLGAGHGGRVSLTRSYHQALEASIARNFPDNGCIACMCHNTDGIYSAKQTAVVRASDDFYPRDPASHTIHISSVAYNTLFLGEFMQPDWDMFHSLHPAAEYHGAARAIGGCAIYVSDKPGNHNFDLLKKLVLPDGSVLRAQLPGRPTLDSLFADPARDGTSLLKIWNVNKCTGVVGVFNCQGAGWCKIEKKTRIHDETPGTLTGSVCASDVDCIAQVTGAKWNGETVVYAYKSGELVRLPKGASVPVTLKVLEYELFHFCPIDDIASNISFAPIGLLDMFNSGGAVEQVEIHMTSDKAPEHFDGEVSSELTTSLSENRFPTATIALRVRGCGRFGAYSSQRPLKCTVGNVDTDFNHDSATGLLTLTLPVAEEEMYRWPVEIQAVIDFQQQGKLSIVLRGH

SEQ ID NO: 2579 - DNA, 2714 bp, Arabidopsis thaliana
  misc_feature: Ceres Annot ID no. 875520
  misc_feature: Encodes the peptide sequence at SEQ ID NO. 2580
agccaaacacaccgttctgattactgattcttcattgacggtaggagtcaccacttttggcggcgattccttgttctctattttttttgcacaagcaacatttagcttctgcaaactccagttcatctctcaaccctcatatcgccgtgttttctcgctctagtaccgcgagctcggacgaaccaggaagcaatccgttaatctagaagcggtgttgagaagatgacgattacatcaaatatctctgtacagaacgataacctcgttgttcaagggaagactatccttaccaaaatccctgacaacattatcctaactccggttaccggtaatggattcgtttccggttcatttataggcgcgacgtttgaacaaagcaagagtcttcatgtgttccccatcggtgtattggagggtcttcggttcatgtgctgtttccggtttaagctatggtggatgactcagagaatgggaagctgtggaaaagacattcctttggagacacagttcatgctactggaaagcaaggatgaggttgaagggaatggggatgatgctcctactgtttataccgtctttctccctctccttgaaggccagttcagagctgttctgcaaggaaatgagaagaatgagattgagatttgttttgagagtggagataaggcggtggaaactagccagggaactcaccttgtttatgttcatgctggaaccaatccctttgaagttatcagacaatccgtaaaggctgtggagagacacatgcagacatttcatcatcgtgagaagaagaagcttccttctttcctagactggtttggctggtgcacatgggacgctttctacacagatgtgactgccgagggtgttgatgaaggccttaaaagtctttctgaaggaggtacccctccgaagtttctgatcatagacgatggttggcaacaaatagaaaacaaagagaaagatgaaaactgcgttgttcaggaaggagcacagtttgctactaggcttgttggtatcaaggagaatgcaaaatttcagaagagtgatcagaaggatacgcaagtgtcaggactaaagagtgtagttgacaatgcgaagcagcgccataatgtgaagcaagtttatgcatggcatgctttagctggatactggggtggagtaaaacccgctgcttctggaatggaacactatgatagtgcattagcatacccagttcagtctccaggtgtcttagggaaccaaccagatatagtaatggacagccttgctgttcatggtctcggacttgtcaatccgaagaaagttttcaacttctacaacgaactgcattcatacttggcttcatgtggtatagatggagtcaaagttgacgtccagaacatcattgaaaccctaggtgctggtcttggcgggagagtctctctcactcgtagctaccagcaagctttagaagcttcaattgcccggaacttcacagataatggttgcatatcttgcatgtgtcacaacacagacggactttacagcgcaaaacaaaccgctattgttagagcttccgatgatttctacccaagagatcctgcttctcacaccatccacattgcatcggttgcatacaacagccttttccttggagagttcatgcaacctgactgggatatgttccatagtctacacccaactgcagagtaccatgctgcagcgcgtgcagtgggtggatgcgcaatctatgtcagtgataagccaggcaaccacaactttgatctattgaggaagctggttcttcctgatggttcagttcttcgggctaagctcccgggtaggcctacccgtgactgcttattcgctgatccagctagagatggaatcagcttgctcaagatctggaacatgaataagtttactggtattgttggtgtattcaattgtcaaggtgctggttggtgcaaggaaacgaagaagaaccagatccatgatacttctcctggcacactcacgggttcaatccgtgcggatgatgctgatctaatctctcaagtggctggtgaagattggagtggagattcaatagtctatgcatacagatcaggtgaggtggtaagactacctaaaggtgcttcaattcctctcaccctcaaagtccttgaatatgaactcttccacatctctcctttgaaggaaatcactgaaaacatttcgttcgcaccaataggacttgtagacatgttcaactcaagtggagcaatcgagtcgattgatatcaatcacgtgaccgacaagaatcctgaattcttcgatggagagatctcctcggcttctcccgcgctcagcgataaccgttctccaacagctctggtatctgtcagtgtcagaggctgtggtcgttttggagcttactcttctcagcgtcctctaaaatgcgccgttgaaagcacagagactgatttcacgtacgacgccgaggttgggcttgtgactttgaatctgccggtgacgagggaggaaatgttcagatggcatgttgagattctggtctagaccaccaataagttattttttttcaccaatttgtcattcatcattttgtagtataaaggcatcaataaattaggaaattaatggtcattcttcgctttgtaataatgtaatctcgtcaagttggggaagcaccgtccccttgtagtttcgttctaataatatagtacctt

SEQ ID NO: 2580 - protein, 773 aa, Arabidopsis thaliana
  misc_feature (7)..(757): Pfam Name: Raffinose_syn Pfam Description: Raffinose synthase or seed imbibition p
  misc_feature: Ceres Annot ID no. 875520
  misc_feature: Bit score of 1318.4 for HMM based on sequences of Figure 37
  misc_feature: Functional Homolog Of SEQ ID NO. 2544
MTITSNISVQNDNLVVQGKTILTKIPDNIILTPVTGNGFVSGSFIGATFEQSKSLHVFPIGVLEGLRFMCCFRFKLWWMTQRMGSCGKDIPLETQFMLLESKDEVEGNGDDAPTVYTVFLPLLEGQFRAVLQGNEKNEIEICFESGDKAVETSQGTHLVYVHAGTNPFEVIRQSVKAVERHMQTFHHREKKKLPSFLDWFGWCTWDAFYTDVTAEGVDEGLKSLSEGGTPPKFLIIDDGWQQIENKEKDENCVVQEGAQFATRLVGIKENAKFQKSDQKDTQVSGLKSVVDNAKQRHNVKQVYAWHALAGYWGGVKPAASGMEHYDSALAYPVQSPGVLGNQPDIVMDSLAVHGLGLVNPKKVFNFYNELHSYLASCGIDGVKVDVQNIIETLGAGLGGRVSLTRSYQQALEASIARNFTDNGCISCMCHNTDGLYSAKQTAIVRASDDFYPRDPASHTIHIASVAYNSLFLGEFMQPDWDMFHSLHPTAEYHAAARAVGGCAIYVSDKPGNHNFDLLRKLVLPDGSVLRAKLPGRPTRDCLFADPARDGISLLKIWNMNKFTGIVGVFNCQGAGWCKETKKNQIHDTSPGTLTGSIRADDADLISQVAGEDWSGDSIVYAYRSGEVVRLPKGASIPLTLKVLEYELFHISPLKEITENISFAPIGLVDMFNSSGAIESIDINHVTDKNPEFFDGEISSASPALSDNRSPTALVSVSVRGCGRFGAYSSQRPLKCAVESTETDFTYDAEVGLVTLNLPVTREEMFRWHVEILV

SEQ ID NO: 2581 - protein, 779 aa, Persea americana
  misc_feature (7)..(763): Pfam Name: Raffinose_syn Pfam Description: Raffinose synthase or seed imbibition p
  misc_feature: Public GI ID no. 7242785
  misc_feature: Bit score of 1259.0 for HMM based on sequences of Figure 37
  misc_feature: Functional Homolog Of SEQ ID NO. 2544
  misc_feature (260)..(260): Xaa is any aa, unknown, or other
  misc_feature (370)..(370): Xaa is any aa, unknown, or other
  misc_feature (377)..(377): Xaa is any aa, unknown, or other
  misc_feature (379)..(379): Xaa is any aa, unknown, or other
  misc_feature (652)..(652): Xaa is any aa, unknown, or other
MTVTPKISINDGNLVVHGKTILTGVPDNIVLTPRTGDGLVAGCFIGATASESESIHVFPMGTLEGLRFTCCFRFKLWWMTQRMGMCGKDVPLETQFMLIESKDGAAAIDDDEEEAPTIYTVFLPLLEGQFRAVLQGNESNQIEICLESGDCAVRTNQGMYLVYMHAGTNPFQVINQAVKAVEKHLYSFQHLEKKKIPSFLDWFGWCTWDAFFTDVTDEGVEEGLKSLSGGGTPPRFLIIDDGWQQIGSEETKDDSNCVVXEGAQFASRLTGIKENDKFQKNGKSEHVPGLKLVVDDAKQHHNVKFVYVWHALAGYWGGVKPPAAGMEHYDTALAYPVQSPGVMGNQPDIVMDSLSVHGLGLVHPRKVFNXYNELHAXLXSCGVNGVKVDVQNIIETLGAGHGGRVSLTRSYIQALEGSIARNFPDNGCIACMCHNTDSIYSAKQTAVVRASDDFYPRDPASHTIHVSSVANNSLFLGEFMQPDWDMFHSLHPAAEYHGAARAVGGCPIYVSDKPGHHNFELLKKLVLPDGSVLRARLPGRPTRDSLFVDPARDGVSLLKIWNMNKCLGVVGVFNCQGAGWCKITKKTRIHDAAPGTLSGSIRAHDVEFINQLAGQDWNGEVIVFTYGSGEVVRLPKCASIPVTLEVLEYELXHICPVKEITSNISFAPIGLLDMFNSGGAVEQFDVRMDSNNAEPPLFDGKVASKLSSSLSNNQSPSATVVLRVRGCGRFGAYSSQRPLKCTVDLVETEFNYDSVTGLVTLIIPVPDQEMYKWSVEFQL

SEQ ID NO: 2582 - DNA, 2361 bp, Populus balsamifera subsp. trichocarpa
  misc_feature: Ceres Annot ID no. 1528375
  misc_feature: Encodes the peptide sequence at SEQ ID NO. 2583
atgacggtgacaccaaagatttcaatcaatgatgggaaccttctggttcatgggaagacaattttaactggagttcctgataacattgtcttgactcctggctctggtgttggacctgttgctggtgcttttattggtgccaccgcttctcatagccaaagtctccatgtttttcctgttggggttttagaggatcttcgttttatgtgttgtttccgattcaagttatggtggatgacccagagaatggggaaatgtgggaaagatattcctctggagactcaattcatgctagtggaaagcaggaatggcggtgaaggagttgatcaagatgatgcacagacaatctacaccgtcttccttcccctactagaaggccagttccgtgctgtactgcaaggcagcgacaggaatgagatggagatttgccttgatagcggggatagtgctgttgaaaccaatcaaggacttaacctggtctacatgcatgctgggactaacccctttgaagtcataaaccagcttgtaatcaccattttcctaacaacttatgaaaacagggctgtggaaaaatatatgcaaacttttcttcatcgggaaaagaaaaagctgccctcttttcttgactggtttggctggtgtacctgggatgccttttacacggatgtcaccgctgagggtgttagggaaggccttgagagtctgtcagaaggagggactcccccacgatttttgatcattgatgatggttggcaacagatcgaaaataaagcaaaggaggatgctaatgttgttgtacaagaaggagcacaatttgcaagtaggcttactggaataaaggagaattcaaaattccagaagaactgtgaaaagaatgaacaggtgattggactgaagcatgttgtggacgatgctaagcaatgccataatgtgaagtgtgtttatgtatggcatgctttggctggttactggggtggagttaaaccagcggctgctggtatggagcattatgacactgcactggcttatccggttcaatctcctggtgttataggcaaccaacctgacgttgttatggacagcctatcagttcatggccttggtttagtgcatccaaagaaggttttcaacttctacaatgagctccatgcctatttagcatcatgtggagttgatggagtaaaagttgatgctcagaacattattgaaacacttggtgctggccatggtggaagagtgtctctcacccgtagctatcaccaagctcttgaggcctcaattgcaagaaacttccctgacaatggatgcattgcctgcatgtgtcataacactgatggaatctatagtgccaagcagactgctgtagtgagagcttctgatgatttctatcctcgggaccctgcttcccacaccatccatatctcctctgtggcttacaacactcttttccttggagaatttatgcaaccagactgggatatgttccatagtttacacccggctgcagagtatcatggggctgctcgtgctattggtggatgtgcaatctatgtcagtgataaaccagggaaccacaactttgacctattgaagaagctggtcctccctgatggatctgtcctccgtgcccaacttccaggccggccaacacttgacagtctctttgctgacccagcaagagatggaactagcttactcaagatctggaatgtgaacaaatgcaccggtgtagtaggtgtcttcaactgccaaggtgcggggtggtgcaagattgagaagaagacccgcattcatgatgaaactccaggtactctcacgggctctgtttgtgctagtgatgttgattgcattgctcaagttactggtgcaaaatggaatggggaaaccgtggtgtatgcctacaaatcaggggagttggttcggttgcctaaaggtgcttcagtgccagtgacactaaaagttcttgaatatgaactcttccatttctgtcctatcgatgatatcgcttccaacatttcatttgcaccaataggcttgcttgacatgttcaactcaggcggtgctgtggagcaggttgaaatccatatgacttctgacaaggcgccagagcactttgatggtgaagtctcctcagagctgactacttctctcagtgagaaccggtttccaactgcaaccattgcactgagagtcaggggctgcggacggtttggtgcttactcttcccagcgccctctaaaatgcactgtgggcaatgttgacacagacttcaatcatgactctgccactgggctactgaccctgactctccctgtagcagaagaggaaatgtacagatggcctgtggagatacaggtttaa

SEQ ID NO: 2583 - protein, 786 aa, Populus balsamifera subsp. trichocarpa
  misc_feature (7)..(770): Pfam Name: Raffinose_syn Pfam Description: Raffinose synthase or seed imbibition p
  misc_feature: Ceres Annot ID no. 1528375
  misc_feature: Bit score of 1273.6 for HMM based on sequences of Figure 37
  misc_feature: Functional Homolog Of SEQ ID NO. 2544
MTVTPKISINDGNLLVHGKTILTGVPDNIVLTPGSGVGPVAGAFIGATASHSQSLHVFPVGVLEDLRFMCCFRFKLWWMTQRMGKCGKDIPLETQFMLVESRNGGEGVDQDDAQTIYTVFLPLLEGQFRAVLQGSDRNEMEICLDSGDSAVETNQGLNLVYMHAGTNPFEVINQLVITIFLTTYENRAVEKYMQTFLHREKKKLPSFLDWFGWCTWDAFYTDVTAEGVREGLESLSEGGTPPRFLIIDDGWQQIENKAKEDANVVVQEGAQFASRLTGIKENSKFQKNCEKNEQVIGLKHVVDDAKQCHNVKCVYVWHALAGYWGGVKPAAAGMEHYDTALAYPVQSPGVIGNQPDVVMDSLSVHGLGLVHPKKVFNFYNELHAYLASCGVDGVKVDAQNIIETLGAGHGGRVSLTRSYHQALEASIARNFPDNGCIACMCHNTDGIYSAKQTAVVRASDDFYPRDPASHTIHISSVAYNTLFLGEFMQPDWDMFHSLHPAAEYHGAARAIGGCAIYVSDKPGNHNFDLLKKLVLPDGSVLRAQLPGRPTLDSLFADPARDGTSLLKIWNVNKCTGVVGVFNCQGAGWCKIEKKTRIHDETPGTLTGSVCASDVDCIAQVTGAKWNGETVVYAYKSGELVRLPKGASVPVTLKVLEYELFHFCPIDDIASNISFAPIGLLDMFNSGGAVEQVEIHMTSDKAPEHFDGEVSSELTTSLSENRFPTATIALRVRGCGRFGAYSSQRPLKCTVGNVDTDFNHDSATGLLTLTLPVAEEEMYRWPVEIQV

SEQ ID NO: 2584 - protein, 777 aa, Pisum sativum
  misc_feature (7)..(761): Pfam Name: Raffinose_syn Pfam Description: Raffinose synthase or seed imbibition p
  misc_feature: Public GI ID no. 148925503
  misc_feature: Bit score of 1255.5 for HMM based on sequences of Figure 37
  misc_feature: Functional Homolog Of SEQ ID NO. 2544
MTVTPKISVNDGNLVVHGKTILKGVPENVVLTPGSGNGLLTGGAFIGATASNSKSLHVFPIGILEGLRFVCCFRFKLWWMTQRMGTCGRDIPLETQFMLIESKDSEGEEGNSPVIYTVLLPLLEGPFRSVLQGNEKSEIEICFESGDHAVETNQGLHMVYMHAGTNPFEVINQAVKAVEKHMQTFHHREKKRLPSFLDMFGWCTWDAFYTDVTAEGVEQGLKSLSEGGTPPRFLIIDDGWQQIESKAKDPGCVVQEGAQFATMLTGIKENAKFQKNKNEEHSEPTSGLKHLVDGVKKHHNVKNVYVWHALAGYWGGVKPAATGMEHYDTALAYPVQSPGVLGNQPDIVMDSLSVHGLGLVHPKKVFNFYNELHAYLASCGVDGVKVDVQNIIETLGAGHGGRVSLTRSYHHALEASIARNFSDNGCIACMCHNTDGLYSAKQTAVVRASDDFYPRDPASHTIHISSVAYNSLFLGEFMQPDWDMFHSLHPAAEYHAAARAIGGCPIYVSDKPGNHNFDLLKKLVLSDGSVLRAQLPGRPTRDSLFVDPARDRTSLLKIWNMNKCTGVVGVFNCQGAGWCKVEKKTRIHDISPGTLTSSVCASDVDLITQVAGAEWHGETIVYAYRSGEVIRLPKGVSIPVTLKVLEFELFHFCPIQEISSSISFATIGLMDMFNTGGAVEEVEIHRETDNKQELFEGEAVSSELITSLGPNRTTTATITLKVRGSGKFGVYSSQRPIKCMVDGTETDFNYDSETGLTTFIIPVPQEELYKWLIEIQV

SEQ ID NO: 2585 - protein, 753 aa, Oryza sativa subsp. japonica
  misc_feature (7)..(737): Pfam Name: Raffinose_syn Pfam Description: Raffinose synthase or seed imbibition p
  misc_feature: Public GI ID no. 42408863
  misc_feature: Bit score of 1256.9 for HMM based on sequences of Figure 37
  misc_feature: Functional Homolog Of SEQ ID NO. 2544
MTVGAGVAVQDGGLVALGATVLTEVRDNVLLTPAAGAGMTSGTFVGVRSATAGSRSVFPVGKLRGLRFICTFRFKMWWMTQRMGTSGRDIPFETQFLLVEAADADGSHLAGDGAAAVYTVFLPILEGPFRAVLQGNSDDELEICLESGDPAVESFEGTHLVFVGAGSDPFEVITNSVKAVERHLQTFTHREKKKMPDMLNWFGWCTWDAFYTDVTSEGVMEGLQSLGKGGTGPKFVIIDDGWQSVSMDPAGIASLADNSANFANRLTHIKENHKFQLNGRKGHREENPANGLAHIVNEIKGKHQLKYVYVWHAITGYWGGVRPGADGMEHYESKMQYPVSSPGVQKNEPCDALNSITTNGLGLVNPDRVFSFYNELHAYLASAGIDGVKVDVQNILETLGAGHGGRVLLARKYHQALEASIARNFRDNGIICCMSHNTDNLYSSKRSAVVRASDDFWPRDPASHTIHIASVAYNTVFLGEFMQPDWDMFHSVHPMAEYHAAARAVGGCAIYVSDKPGNHDFNLLKKLVLPDGSILRAKLPGRPTRDCLFSDPARDGKSILKIWNLNEHSGVIGAFNCQGAGWCRVGKKNLVHDEQPATVTGVIRAQDVHHLATVAADGWNGDVIVYSHIGGEVTCLPKNASLPVTLKTREYEVFTVVPLKKLDNGVSFAAVGLIGMFNSGGAVTAVRYVEDAGVEVRVRGSGTVGAYSSAKPARVVVDSEAAEFSYDDGCGLVTFELAVPEQELYSWTISIEY

SEQ ID NO: 2586 - DNA, 2265 bp, Populus balsamifera subsp. trichocarpa
  misc_feature: Ceres Annot ID no. 1480477
  misc_feature: Encodes the peptide sequence at SEQ ID NO. 2587
atgacagtaggggcagggatatcagtggcagacaggaaattggtggtgttagggaattgtgtgttgaatgatgtccatgacaacattgagataacaccagcttctgggggtggttttatcaatggagctttcattggtgtccgatcagatcaagttggttgtcgaagggtctttcctgttggaaagctcgagggattgaggtttatgtgtgtttttcgattcaagatgtggtggatgacacaaaggatgggaaattgtggacaagaaattccctttgagacacagtttttgattgttgaagctcgagatggatctcgttttgacaatggagaggagcaatctgctttgtataccgttttcttgccaattcttgaaggagattttagggctgttcttcaagggaatgagcacaatgagctcgagatttgcttggaaagtggagatcctgctgttaaggaatttgaggggagtcatttagtttttgtggcagctggttcagatccctttgatgtcatcacaaatgcagtgaaggccgtggaatcacatttgcagacattttctcatcgtgagaggaagaagatgccagacatgctgaactggtttggctggtgcacatgggatgctttttacacagatgtcactgcagagggtgtgaagcaaggattagagagcttcgagaaaggtggaattcctccaaaatttgttataattgatgatggatggcaatcagtcggaatggatcccactggtattgagactttagctgataattcagccaactttgcaaacagactaacacatatcaaagagaatcacaaattccagaaaaatggcaaagagggttacagagttgaggatccagcattgggactgacgcacactgtgaccgaaatcaaagaacgacatgatttgaagtacgtttatgtgtggcatgcaataacaggatactggggaggggtcaggccgggtggtgctgaaatggaacactatgaacccaagctgacttaccctatttcttctcctggggttgaatcaaatgagcattgtgatgcttttaaaagcattgccacaaatggacttggccttgtgaatcctgaaaaagtgttcaggttctatgatgaacttcaccactatctttcgtcagctggaattgatggggtcaaagttgatgttcagaatatccttgaaactctcggggcaggccatggtggaagagtgaaacttgctaggaagtaccatcaagcattggaggcttctattgctagaaacttccgtgacaatgggatcatttattgtatgagtcacaacactgatggcttgtacagtgcaaagagatcagctgttataagggcatcggatgatttctggccaagagatccagcatcacacacaattcatatagcatcagttgcttacaataccatttttcttggtgaatttatgcagccggattgggatatgtttcatagcctacacccaatggcggaataccacggagcagcccgtgctgtgggaggatgtgccatctatgttagtgacaagcctggacaacatgactttaatctactgaagaagcttgtgcttcctgatggctctatattgagggccaaacttccaggacgaccaacaagggattgcttgttttctgatcctgcaagagatggtaaaagtctcctgaagatatggaacctgaacgatttcaatggagtcataggggtcttcaactgccagggagctggatggtgcagggtcggaaagacaaaccttatccatgacgaaaatcctggcacgatcaccggttctgttagggctaaagatgttgattatctccctagagtcgcttgtgatggatggacaggcgatagtgtattgtattctcatgttggtggagaagtagtttaccttccaaaggatgcaggtatgccactcacattgaagtctcgcgagtatgaagttttcacagtggttcctgtgaaggagctagccaatggggttaaatttgcccccgtgggtctagtcaagatgtttaattcaggaggggctatcaaggagctgcaatatgactccagcacaactgcgactgtcagcatgaaagctcgcggctgcggcttgtttggagcatattcatctgctcaacccaagagaatatcagttgattctaaggaagtagagttcggttttgaagaaggaactggcttggtcaccattgatttgagagttccagaggaagagttgtatctctggaacataacagtagaactataa

SEQ ID NO: 2587 - protein, 754 aa, Populus balsamifera subsp. trichocarpa
  misc_feature (7)..(738): Pfam Name: Raffinose_syn Pfam Description: Raffinose synthase or seed imbibition p
  misc_feature: Ceres Annot ID no. 1480477
  misc_feature: Bit score of 1263.8 for HMM based on sequences of Figure 37
  misc_feature: Functional Homolog Of SEQ ID NO. 2544
MTVGAGISVADRKLVVLGNCVLNDVHDNIEITPASGGGFINGAFIGVRSDQVGCRRVFPVGKLEGLRFMCVFRFKMWWMTQRMGNCGQEIPFETQFLIVEARDGSRFDNGEEQSALYTVFLPILEGDFRAVLQGNEHNELEICLESGDPAVKEFEGSHLVFVAAGSDPFDVITNAVKAVESHLQTFSHRERKKMPDMLNWFGWCTWDAFYTDVTAEGVKQGLESFEKGGIPPKFVIIDDGWQSVGMDPTGIETLADNSANFANRLTHIKENHKFQKNGKEGYRVEDPALGLTHTVTEIKERHDLKYVYVWHAITGYWGGVRPGGAEMEHYEPKLTYPISSPGVESNEHCDAFKSIATNGLGLVNPEKVFRFYDELHHYLSSAGIDGVKVDVQNILETLGAGHGGRVKLARKYHQALEASIARNFRDNGIIYCMSHNTDGLYSAKRSAVIRASDDFWPRDPASHTIHIASVAYNTIFLGEFMQPDWDMFHSLHPMAEYHGAARAVGGCAIYVSDKPGQHDFNLLKKLVLPDGSILRAKLPGRPTRDCLFSDPARDGKSLLKIWNLNDFNGVIGVFNCQGAGWCRVGKTNLIHDENPGTITGSVRAKDVDYLPRVACDGWTGDSVLYSHVGGEVVYLPKDAGMPLTLKSREYEVFTVVPVKELANGVKFAPVGLVKMFNSGGAIKELQYDSSTTATVSMKARGCGLFGAYSSAQPKRISVDSKEVEFGFEEGTGLVTIDLRVPEEELYLWNITVEL

SEQ ID NO: 2588 - protein, 756 aa, Solanum lycopersicum
  misc_feature (7)..(740): Pfam Name: Raffinose_syn Pfam Description: Raffinose synthase or seed imbibition p
  misc_feature: Public GI ID no. 23452226
  misc_feature: Bit score of 1248.7 for HMM based on sequences of Figure 37
  misc_feature: Functional Homolog Of SEQ ID NO. 2544
  misc_feature (663)..(663): Xaa is any aa, unknown, or other
MTVGAGICVAERKLNVLGQSILSDVDENIIVTQPNGKAFTNGAFLGVNSDRIGSHRVFPIGKLQGLRFMCGFRFKLWWMTQRMGTSGQDIPFETQFLIVEGNDGSNFDQDNQQNSALYVVFLPILEGDFRAVLQGNSNDELEICLESGDPAVQDFEGSHLVYVAAGPDPFDVITNAVKTVERHLQTFCHRDRKKMPDMLNWFGWCTWDAFYTTVTSEGVKQGLESLEKGGIPPKFVLIDDGWQSVSMDPDGIESIADNHANFANRLTHIKENHKFQKNGKEGHRVNDPAMGLRHVVTNIKDQHNLKYVYMWHALAGYWGGVRPGVPGMEHYESKLSFPVSSPGTESQEPDDALSSLIKNGLGLVNPEKVLYFYNELHSYLASAGIDGVKVDVQNILETLGAGHGGRVKLARKYHQALEASIARNFPDNGIISCMSHSNDSLFSAKRSAVIRASDDFWPRDPASHTIHIASVAYNTIFLGEFMQPDWDMFHSVHPMAEYHGAARAVGGCAIYVSDKPGQHDFNLLKKLVLPDGSILRAKLPGRPTRDCLFSDPARDGISLLKIWNLNDFNGVVGVFNCQGAGWCKVGKKNLIHDCQPGTITGIVRANDVNYLPRIAHDGWTGDAILYSHLHRELINLPKNTSIPITLNAREYEVFTVVPINEMXTGSRFAPIGLVNMFNSGGAIKEVKYETEGKCGLVSMKVRGCGTFGAYSSGKPKRIHVDNEEVQFDYDESSGLFTINITVPDQELYLWDVKVET

SEQ ID NO: 2589 - protein, 754 aa, Cucumis melo
  misc_feature (7)..(738): Pfam Name: Raffinose_syn Pfam Description: Raffinose synthase or seed imbibition p
  misc_feature: Public GI ID no. 29838629
  misc_feature: Bit score of 1239.2 for HMM based on sequences of Figure 37
  misc_feature: Functional Homolog Of SEQ ID NO. 2544
MTVGAGITISDANLTVLGNRVLSDVHNNITLTAAPGGGVMNGAFIGVDQSDQIGSRRVFPIGKLIGLRFLCAFRFKLWWMTQRMGCSGQEVPFETQFLVVETRDGSNIAGNGEEGDAVYTVFLPILEGDFRAVLQGNDNNEIEICLESGDPSVDGFEGSHLVFVGAGSDPFETITYAVKSVEKHLQTFAHRERKKMPDILNWFGWCTWDAFYTDVTSDGVKKGLESFENGGIPPKFVIIDDGWQSVAKDATSADCKADNTANFANRLTHIKENYKFQKDGKEGERIENPALGLQHIVSYMKEKHATKYVYVWHAITGYWGGVSAGVKEMEQYESKIAYPVASPGVESNEPCDALNSITKTGLGLVNPEKVFNFYNEQHSYLASAGVDGVKVDVQNILETLGAGHGGRVKLARKYHQALEASISRNFQDNGIISCMSHNTDGLYSSKRNAVIRASDDFWPRDPASHTIHIASVAYNSLFLGEFMQPDWDMFHSLHPMAEYHGAARAVGGCAIYVSDKPGQHDFNLLKKLVLPDGSILRAKLPGRPTKDCLFTDPARDGKSLLKIWNLNDLSGVVGVFNCQGAGWCKVGKKNLIHDENPDTITGVIRAKDVSYLWKIAGESWTGDAVIFSHLAGEVVYLPQDASMPITLKPREFDVFTVVPVKELVNDIKFAPIGLIKMFNSGGAVKEMNHQPGSSNVSLKVRGSGPFGAYSSSKPKRVAVDSEEVEFMYDEGGLITIDLKVPEKELYLWDIRIEL

SEQ ID NO: 2590 - protein, 758 aa, Vitis vinifera
  misc_feature (7)..(742): Pfam Name: Raffinose_syn Pfam Description: Raffinose synthase or seed imbibition p
  misc_feature: Public GI ID no. 157353289
  misc_feature: Bit score of 1267.2 for HMM based on sequences of Figure 37
  misc_feature: Functional Homolog Of SEQ ID NO. 2544
MTVGAGITVADGNLVVLGNAILSDVHDNIVTTPAAGDSLTNGAFIGVHSDRLGSRRVFPVGKLQGLRFMCVFRFKLWWMTQRMGSCGQDIPFETQFLIVEGQNGSHFGEGSEMGAGQSALYVVFLPILEGDFRAVLQGNEHNEIEICLESGDPAVDGFEGSHLVFVAAGSNPFDVITNAVKTVEKHLQTFSHRDKKKMPNMLNWFGWCTWDAFYTDVTAEGVRQGLKSLEKGGIPPKFVIIDDGWQSVGMDTTGIKCKADNTANFASRLTHIKENHKFQKDGKEGHRVEDPAMGLHHIVTEIKEKHYLKYVYVWHAITGYWGGVSPGITEMELYESKISYPISSPGVNSNEPCEALTSIVTNGLGLVNPEKVFSFYNELHSYLASAGIDGVKVDVQNILETLGAGHGGRVKLAQKYHQALEASISRNFQDNGIISCMSHNTDGLYSSKRTAVIRASDDFWPRDPASHTIHIASVAYNTIFLGEFMQPDWDMFHSLHPMAEYHGAARAVGGCAIYVSDKPGHHDFNLLKKLVLSDGSILRAKLPGRPTRDCLFSDPARDGISLLKIWNLNDFSGVVGVFNCQGAGWCRVGKKNLIHDEQPGTITGVIRAKDVDYLPRVADDGWNGDTIIFSHLGGEVVYLPKNASIPMTLKSREYEVFTVVPVKALSNGATFAPIGLIKMFNSGGAIKELKYERERNATVGMKVRGSGIFGVYSSSRPKRIIVDTEEMKFEYEEGSGLTTINLKIPEEEMYLWNITIEL

SEQ ID NO: 2591 - DNA, 2633 bp, Triticum aestivum
  misc_feature: Ceres Clone ID no. 927786
  misc_feature: Encodes the peptide sequence at SEQ ID NO. 2592
aacaccacaaccgcgcgccgcgccaccacacccgcagatccccgccgtcgtaaatctacctacgtgctttgattggagggttgcggtgccggggaggaagatgacggtgggagccgggatcgcggtccaggaagacggcagcctggcggcgctgggggccacggtcctgacggaggtgcgcgacaatgtgctcgtcacgccggccgccgggggcggcatgctgaacggcgcgttcctcggcgtccggtcggcccccgccggcagccgcagcgtcttccccgtcgggaagctcagggacctgcgattcatgtgcacgttcaggttcaagatgtggtggatgacacagaggatgggctcgtcgggccgcgacatccccgtcgagacgcagttcttgatcgtcgaggccgttgactgcgccggggacgagcaatctgcggtgtacaccgtcttcctcccgatcctggagggctcattccgagctgtactacaggggaacgaaaatgatgagctggaaatttgcttggagagtggtgatccagctgtagaatcatttgaaggcacccatctagttttcgttggtgcgggatcggatccgtttgaggtcatcactaatgctgtcaaagcagttgagaggcacctgcagacattctctcacagggaaaaaaagaagatgccagacatgctaaactggtttggctggtgcacatgggatgcattttacactgatgttactgctgaaggagtgaaggaaggactacagagttttgaaaaaggtggaacagctccaaagtttgtcataatcgatgatgggtggcaatcggtcagtatggaccctgctggaagtgcattcgtatctgataatgcagccaacttcgcaaacagattatatgatatcaaggagaaccacaaatttcagaaaaatgggaggaagggtcacagggaagaagatccagcaaatggcctcgcgcatattgtcagtgaaattaaggggaaacatgagctaaagtacgtctatgtatggcatgcgattaccgggtattggggtggcgtaaggcccggtgctgacgggatggagcattaccaatccaagatgcagtaccctgtgtcgtcaccaggagtccagaagaacgaaccctgtgaggccttcaacagcatagcagataacggccttggccttgtggaccctgacaaagtattcagcttctacaatgagctccattcatatcttgcatctgccggggtcgacggcgtgaaagtagacgtgcagaacattctcgaggcgctaggcggtggtcatggtgggagagtgcttctgtctaggaagtaccagcaggctctagaagcttccatcgctcggaatttccgcgacaacggcataatatgttgcatgagccacaacactgacaacttatacagttcaaaaagaaatgcggttgtaagagcctctgatgatttctggcctagagacccagcttcgcataccatacacatcgcatccgtcgcttacaataccgttttccttggagagttcatgcagccggactgggacatgttccatagcgtccacccgatggccgaataccacgccgcggcgcgggcagtcggcggttgcgctatatacgtgagtgacaaaccaggaaaccatgacttcgatctgctgaggaagcttgtgcttcctgacggatcgatcctgcgggccaaactgcccgggagaccgaccggggactgcctcttctctgatcctgcaagggacggcaaaagcattctcaagatctggaacctgaacgcgcactccggcgtcatcggcgccttcaactgccagggcgcgggctggtgccgagaagggaagaagaacctcatccacgatgtgcagcccgggaccatcaccggggccgtccggggacgggacgtgagccgccttcaggaggtcgccggcgatggctggaacggcgacgtggtcgtgtactcgcacgtcgcaggagatgtgaccgtcctgcccaaggacgcggcgctgccggtgacgctgaagccgcgagagtacgaggtgttcaccgtggtgccgctgaagcggctgccgaacggcgcctccttcgcgccgatcggcctgatcgggatgttcaactccggcggggcggtgacggaggtgaggtgcgccggcggcgccggcgtggaggtgaaggtgcggggcgcgggcacggttggagcctactcctcggcgaggccgaagcgcgtggccgtggattcggaggcggttggtttctcctacgacgacggctccggcctggccatgttccaggtcggcgtgccggagcgggagctctactcgtggacggtctcgatagagtgctgagacgagatcgtctggtcgggtgacagtaagacgagggcaccgaagccgcgcctggggaagctgtgatatctttgttcttgcagacgttgccgctagttcgtgttgcctgtgatttattatttgcgctgcgagtacatggtgcttgacttgtattccctgatggaaactaaaaattgtattgtgatttctgaacaccaaccattttagtgcagacagtttttcctttttttctcttactactatgtatgtgcctgtgtgttgtcaggcggaaaaaatatttatt

SEQ ID NO: 2592 - protein, 749 aa, Triticum aestivum
  misc_feature (7)..(733): Pfam Name: Raffinose_syn Pfam Description: Raffinose synthase or seed imbibition p
  misc_feature: Ceres Clone ID no. 927786
  misc_feature: Bit score of 1228.5 for HMM based on sequences of Figure 37
  misc_feature: Functional Homolog Of SEQ ID NO. 2544
MTVGAGIAVQEDGSLAALGATVLTEVRDNVLVTPAAGGGMLNGAFLGVRSAPAGSRSVFPVGKLRDLRFMCTFRFKMWWMTQRMGSSGRDIPVETQFLIVEAVDCAGDEQSAVYTVFLPILEGSFRAVLQGNENDELEICLESGDPAVESFEGTHLVFVGAGSDPFEVITNAVKAVERHLQTFSHREKKKMPDMLNWFGWCTWDAFYTDVTAEGVKEGLQSFEKGGTAPKFVIIDDGWQSVSMDPAGSAFVSDNAANFANRLYDIKENHKFQKNGRKGHREEDPANGLAHIVSEIKGKHELKYVYVWHAITGYWGGVRPGADGMEHYQSKMQYPVSSPGVQKNEPCEAFNSIADNGLGLVDPDKVFSFYNELHSYLASAGVDGVKVDVQNILEALGGGHGGRVLLSRKYQQALEASIARNFRDNGIICCMSHNTDNLYSSKRNAVVRASDDFWPRDPASHTIHIASVAYNTVFLGEFMQPDWDMFHSVHPMAEYHAAARAVGGCAIYVSDKPGNHDFDLLRKLVLPDGSILRAKLPGRPTGDCLFSDPARDGKSILKIWNLNAHSGVIGAFNCQGAGWCREGKKNLIHDVQPGTITGAVRGRDVSRLQEVAGDGWNGDVVVYSHVAGDVTVLPKDAALPVTLKPREYEVFTVVPLKRLPNGASFAPIGLIGMFNSGGAVTEVRCAGGAGVEVKVRGAGTVGAYSSARPKRVAVDSEAVGFSYDDGSGLAMFQVGVPERELYSWTVSIEC

SEQ ID NO: 2593 - protein, 753 aa, Cucumis sativus
  misc_feature (7)..(737): Pfam Name: Raffinose_syn Pfam Description: Raffinose synthase or seed imbibition p
  misc_feature: Public GI ID no. 87128422
  misc_feature: Bit score of 1239.9 for HMM based on sequences of Figure 37
  misc_feature: Functional Homolog Of SEQ ID NO. 2544
MTVGAGITISDANLTVLGNRVLSDVHNNITLTAAPGGGVMNGAFIGVQSDQIGSRRVFPIGKLIGLRFLCAFRFKLWWMTQRMGCSGQEIPFETQFLVVETRDGSNIAGNGEEGDAVYTVFLPILEGDFRAVLQGNDNNELEICLESGDPSVDGFEGSHLVFVGAGSDPFETITYAVKSVEKHLQTFAHRERKKMPDILNWFGWCTWDAFYTDVTSDGVKKGLESFENGGIPPKFVIIDDGWQSVAKDAASTDCKADNTANFANRLTHIKENYKFQKDGKEGERIENPALGLQHIVSYMKEKHATKYVYVWHAITGYWGGVSSGVKEMEQYESKIAYPVASPGVESNEPCDALNSISKTGLGLVNPEKVFNFYNEQHSYLASAGVDGVKVDVQNILETLGAGHGGRVKLARKYHQALEASISRNFQDNGIISCMSHNTDGLYSSKRNAVIRASDDFWPRDPASHTIHIASVAYNSLFLGEFMQPDWDMFHSLHPMAEYHGAARAVGGCAIYVSDKPGQHDFNLLKKLVLHDGSILRAKLPGRPTKDCLFADPARDGKSLLKIWNMNDLSGVVGVFNCQGAGWCKVGKKNLIHDENPDTITGVIRAKDVSYLWKIAGESWTGDAVIFSHLAGEVVYLPQDASMPITLKSREFDVFTVVPVKELANDIKFAPIGLMKMFNSGGAVKEMNHQPGSSNVSLKVRGSGPFGAYSSSKPKRVAVDSEEVEFIYDEGGLITIDLKVPEKELYLWDIRIEL

SEQ ID NO: 2594 - protein, 741 aa, Physcomitrella patens subsp. patens
  misc_feature (7)..(726): Pfam Name: Raffinose_syn Pfam Description: Raffinose synthase or seed imbibition p
  misc_feature: Public GI ID no. 168002098
  misc_feature: Bit score of 1192.5 for HMM based on sequences of Figure 37
  misc_feature: Functional Homolog Of SEQ ID NO. 2544
MTVEGGITIQGGQLLVYGQPLLRNVPSNVTFTSESNLHGGFLGASFSESNSHHVVPLGVLEEVRFLCCFRFKLWWMTQRMGSCGQEVPYETQFMLLEGPSNKYSVLLPILDGAFRACLQGNAENELQLCVESGDPAVVTNRLDYSIYMHVGSDPFEVIEDAVRAVEAHLQTFVHREKKKIPGILDYFGWCTWDAFYTDVSAKGVMQGLSSLAEGGTPARFLIIDDGWQSVAAGDESAGQSTAVTQGTQYASRLTHIKENHKFQKDGVAGSWPEDQSLGLRHTVLDAKANFNLKYVYVWHALAGYWGGVQPGGSNTKIYDSSLVYPVHSPSVLENQPDMSVDSLTVNGLGLVNPTEFFSFYDELHRYLADAAVDGVKVDAQNIFETLGAGLGGRVKLAQQVHQALEASIARNFPENGCISCMSHSTDNLYHSKQTAVVRASDDFWPRDPASHTIHIASVAYNSLFLAEFMQPDWDMFHSLHPAAEYHAAARAVGGCAIYVSDKPGNHDFNLLKKLVLPDGSVLRALLPGRPTRDCLFSDPARDGKSLLKIWNMNKYGGVIGIFNCQGAGWCKLDKKYTIHEIRPDAISSSVRAADIDRLADAAPEGWDGACVVFSHQSCELVRITLHAALPITLRKLEYELFTVAPVKKLDTDLSFAPLGLIEMFNSGGALKGLDFDTQGKSVTMQVFGWGTFGVYASQRPRACALNCSTDIPLSYDQTSGLASVSLPRGEEGCLWTVTITF

SEQ ID NO: 2595 - protein, 754 aa, Arabidopsis thaliana
  misc_feature (7)..(739): Pfam Name: Raffinose_syn Pfam Description: Raffinose synthase or seed imbibition p
  misc_feature: Public GI ID no. 15222768
  misc_feature: Bit score of 1207.5 for HMM based on sequences of Figure 37
  misc_feature: Functional Homolog Of SEQ ID NO. 2544
MTVGAGISVTDSDLVVLGHRVLHGVPENVLVTPASGNALIDGAFIGVTSDQTGSHRVFSLGKLEDLRFMCVFRFKLWWMTQRMGTNGKEIPCETQFLIVEANQGSDLGGRDQSSSYVVFLPILEGDFRAVLQGNEANELEICLESGDPTVDQFEGSHLVFVAAGSDPFDVITKAVKAVEQHLQTFSHRERKKMPDMLNWFGWCTWDAFYTNVTAKDVKQGLESLKAGGVTPKFVIIDDGWQSVGMDETSVEFNADNAANFANRLTHIKENHKFQKDGKEGHRVDDPSLSLGHVITDIKSNNSLKYVYVWHAITGYWGGVKPGVSGMEHYESKVAYPVSSPGVMSSENCGCLESITKNGLGLVNPEKVFSFYNDLHSYLASVGVDGVKVDVQNILETLGAGHGGRVKLAKKYHQALEASISRNFPDNGIISCMSHNTDGLYSAKKTAVIRASDDFWPRDPASHTIHIASVAYNTLFLGEFMQPDWDMFHSLHPMAEYHAAARAVGGCAIYVSDKPGQHDFNLLRKLVLRDGSILRAKLPGRPTSDCFFSDPVRDNKSLLKIWNLNEFTGVIGVFNCQGAGWCKNEKRYLIHDQEPGTISGCVRTNDVHYLHKVAAFEWTGDSIVYSHLRGELVYLPKDTSLPVTLMPREYEVFTVVPVKEFSDGSKFAPVGLMEMFNSGGAIVSLRYDDEGTKFVVRMKLRGSGLVGVYSSVRRPRSVTVDSDDVEYRYEPESGLVTFTLGVPEKELYLWDVVIQ

(The sequence listing continues in the following parts.)

1. A method of producing a plant, said method comprising growing a plant cell comprising an exogenous nucleic acid, said exogenous nucleic acid comprising a regulatory region operably linked to a nucleotide sequence encoding a polypeptide, wherein the HMM bit score of the amino acid sequence of said polypeptide is greater than about 93, said HMM based on the amino acid sequences depicted in one of FIGS. 1-50, and wherein said plant has a difference in the level of biomass as compared to the corresponding level of a control plant that does not comprise said nucleic acid.

2. A method of producing a plant, said method comprising growing a plant cell comprising an exogenous nucleic acid, said exogenous nucleic acid comprising a regulatory region operably linked to a nucleotide sequence encoding a polypeptide having 80 percent or greater sequence identity to an amino acid sequence selected from the group consisting of SEQ ID NO:2, 4, 5, 6, 8, 10, 12, 13, 15, 17, 18, 20, 22, 24, 25, 26, 27, 29, 30, 32, 34, 35, 37, 38, 39, 41, 43, 45, 47, 49, 51, 53, 55, 56, 57, 59, 60, 62, 63, 64, 65, 67, 69, 70, 71, 73, 74, 75, 77, 79, 80, 81, 82, 83, 84, 85, 86, 88, 90, 91, 92, 93, 94, 95, 96, 97, 98, 99, 100, 101, 102, 103, 104, 105, 106, 107, 108, 109, 110, 111, 112, 113, 115, 117, 119, 120, 121, 122, 123, 124, 126, 128, 129, 131, 133, 135, 137, 139, 140, 141, 142, 144, 146, 147, 148, 149, 150, 152, 154, 155, 157, 158, 160, 162, 163, 165, 167, 169, 171, 173, 175, 176, 178, 180, 182, 183, 185, 187, 189, 191, 193, 194, 195, 196, 197, 198, 199, 200, 201, 203, 205, 207, 208, 209, 211, 213, 214, 215, 217, 218, 219, 220, 222, 223, 224, 226, 228, 229, 231, 232, 233, 234, 235, 236, 237, 238, 239, 240, 242, 244, 245, 246, 247, 248, 249, 250, 251, 252, 254, 255, 256, 257, 258, 259, 260, 261, 262, 263, 264, 265, 266, 267, 268, 269, 270, 271, 272, 273, 274, 275, 276, 277, 278, 279, 281, 282, 284, 286, 287, 288, 289, 291, 293, 294, 295, 297, 299, 300, 302, 304, 306, 307, 308, 310, 311, 313, 315, 316, 317, 318, 319, 320, 322, 324, 326, 328, 330, 331, 333, 335, 337, 338, 340, 342, 343, 345, 346, 347, 349, 350, 351, 353, 354, 355, 357, 358, 360, 362, 363, 364, 365, 367, 369, 370, 371, 372, 373, 374, 375, 377, 378, 379, 380, 382, 383, 384, 385, 386, 387, 389, 390, 391, 393, 395, 396, 398, 400, 401, 403, 404, 406, 408, 409, 410, 411, 412, 414, 415, 417, 419, 420, 421, 422, 423, 424, 425, 426, 427, 428, 429, 430, 431, 432, 433, 434, 435, 436, 437, 438, 439, 440, 441, 442, 443, 444, 445, 446, 447, 448, 449, 450, 451, 452, 453, 454, 456, 457, 459, 461, 462, 464, 466, 467, 468, 469, 470, 472, 474, 475, 477, 479, 480, 482, 483, 484, 485, 487, 488, 489, 490, 491, 492, 493, 494, 495, 497, 499, 501, 502, 503, 504, 506, 507, 509, 510, 511, 512, 514, 515, 516, 517, 518, 520, 522, 524, 526, 528, 530, 531, 532, 533, 534, 535, 536, 537, 538, 539, 540, 542, 543, 545, 546, 547, 548, 550, 551, 553, 554, 555, 557, 559, 560, 562, 563, 565, 566, 568, 570, 572, 573, 575, 576, 577, 579, 580, 581, 582, 583, 584, 585, 586, 587, 589, 590, 591, 592, 593, 595, 596, 597, 598, 599, 601, 602, 604, 605, 607, 609, 610, 611, 612, 613, 614, 615, 616, 617, 618, 619, 620, 621, 622, 623, 624, 625, 626, 627, 629, 631, 633, 634, 635, 36, 637, 638, 640, 642, 644, 646, 648, 650, 651, 653, 654, 655, 656, 657, 658, 659, 660, 662, 663, 664, 665, 666, 667, 669, 671, 672, 674, 676, 677, 679, 680, 682, 684, 685, 687, 689, 690, 691, 693, 694, 696, 697, 698, 00, 702, 704, 705, 706, 707, 709, 710, 712, 714, 715, 717, 718, 719, 720, 721, 722, 723, 725, 726, 727, 728, 730, 731, 732, 733, 734, 735, 737, 739, 741, 743, 744, 745, 746, 747, 749, 751, 752, 753, 755, 757, 759, 760, 762, 764, 766, 768, 770, 772, 773, 775, 776, 778, 780, 782, 784, 786, 788, 789, 791, 793, 794, 795, 796, 798, 800, 801, 802, 804, 805, 807, 809, 811, 813, 815, 817, 819, 820, 822, 823, 824, 825, 827, 828, 830, 832, 834, 836, 838, 840, 842, 843, 844, 846, 848, 849, 850, 851, 853, 855, 856, 857, 858, 860, 861, 863, 864, 866, 868, 870, 871, 873, 874, 876, 878, 880, 882, 883, 885, 887, 889, 890, 892, 893, 895, 896, 897, 899, 901, 902, 903, 905, 907, 908, 909, 910, 912, 914, 915, 916, 917, 919, 921, 923, 925, 926, 928, 930, 932, 934, 935, 936, 937, 939, 941, 943, 945, 947, 949, 950, 952, 953, 955, 957, 959, 960, 962, 964, 965, 967, 968, 970, 972, 974, 976, 978, 980, 981, 983, 985, 86, 87, 989, 991, 993, 995, 997, 998, 1000, 1002, 1003, 1005, 1007, 1008, 1009, 1011, 1013, 1014, 1016, 1018, 1020, 1022, 1023, 1024, 1025, 1026, 1027, 1029, 1031, 1033, 1034, 1036, 1038, 1039, 1041, 1042, 1043, 1044, 1045, 1046, 1048, 1049, 1050, 1051, 1052, 1054, 1056, 1058, 1060, 1061, 1062, 1064, 1066, 1067, 1069, 1070, 1071, 1072, 1074, 1076, 1077, 1078, 1079, 1081, 1083, 1085, 1087, 1088, 1090, 1092, 1093, 1095, 1096, 1097, 1099, 1101, 1102, 1104, 1105, 1107, 1108, 1110, 1111, 1112, 1113, 1114, 1115, 1117, 1119, 1120, 1121, 1122, 1124, 1126, 1128, 1130, 1132, 1133, 1135, 1137, 1139, 1141, 1142, 1144, 1146, 1148, 1150, 1152, 1154, 1156, 1157, 1158, 1160, 1162, 1164, 1166, 1168, 1169, 1171, 1173, 1175, 1176, 1177, 1179, 1180, 1181, 1183, 1185, 1187, 1188, 1190, 1192, 1193, 1194, 1196, 1198, 1200, 1201, 1203, 1205, 1207, 1209, 1210, 1212, 1214, 1216, 1218, 1219, 1221, 1222, 1224, 1226, 1228, 1230, 1232, 1234, 1235, 1236, 1238, 1240, 1241, 1243, 1245, 1247, 1249, 1251, 1252, 1253, 1255, 1257, 1259, 1261, 1263, 1265, 1266, 1268, 1270, 1272, 1274, 1276, 1278, 1279, 1281, 1283, 1285, 1287, 1289, 1291, 1293, 1294, 1296, 1297, 1299, 1300, 1302, 1304, 1306, 1308, 1309, 1310, 1312, 1313, 1314, 1316, 1318, 1320, 1322, 1324, 1325, 1326, 1328, 1329, 1330, 1332, 1333, 1334, 1336, 1338, 1339, 1340, 1341, 1342, 1343, 1344, 1345, 1347, 1349, 1350, 1352, 1353, 1355, 1357, 1358, 1359, 1360, 1361, 1363, 1364, 1366, 1367, 1369, 1370, 1371, 1372, 1373, 1375, 1376, 1377, 1379, 1380, 1381, 1382, 1384, 1386, 1388, 1389, 1391, 1393, 1395, 1397, 1399, 1401, 1402, 1403, 1405, 1407, 1409, 1410, 1412, 1414, 1416, 1418, 1420, 1421, 1422, 1424, 1426, 1428, 1429, 1431, 1433, 1435, 1437, 1439, 1440, 1441, 1443, 1445, 1446, 1448, 1450, 1452, 1454, 1456, 1457, 1459, 1461, 1463, 1465, 1467, 1469, 1471, 1473, 1475, 1477, 1479, 1481, 1482, 1483, 1485, 1486, 1488, 1489, 1490, 1492, 1493, 1495, 1497, 1498, 1500, 1502, 1503, 1505, 1506, 1507, 1508, 1509, 1511, 1512, 1514, 1515, 1516, 1518, 1520, 1522, 1523, 1524, 1525, 1526, 1528, 1529, 1531, 1533, 1534, 1535, 1537, 1538, 1540, 1542, 1544, 1546, 1547, 1549, 1550, 1552, 1554, 1555, 1557, 1558, 1560, 1562, 1563, 1564, 1565, 1568, 1569, 1571, 1572, 1574, 1575, 1577, 1578, 1580, 1581, 1583, 1584, 1586, 1588, 1589, 1591, 1593, 1594, 1595, 1596, 1598, 1599, 1600, 1602, 1603, 1604, 1605, 1607, 1609, 1611, 1612, 1613, 1615, 1616, 1618, 1619, 1621, 1622, 1624, 1626, 1628, 1629, 1630, 1632, 1634, 1636, 1637, 1639, 1640, 1642, 1644, 1646, 1647, 1648, 1649, 1650, 1652, 1654, 1656, 1657, 1658, 1660, 1661, 1662, 1664, 1666, 1668, 1669, 1670, 1671, 1672, 1674, 1676, 1677, 1679, 1680, 1681, 1682, 1683, 1684, 1686, 1688, 1689, 1691, 1693, 1695, 1697, 1699, 1700, 1701, 1702, 1704, 1705, 1706, 1707, 1708, 1710, 1711, 1712, 1713, 1714, 1715, 1717, 1719, 1721, 1723, 1724, 1725, 1727, 1729, 1731, 1732, 1734, 1735, 1737, 1739, 1741, 1743, 1745, 1746, 1747, 1749, 1751, 1753, 1755, 1757, 1758, 1759, 1761, 1762, 1764, 1765, 1766, 1767, 1769, 1770, 1772, 1773, 1774, 1776, 1777, 1779, 1781, 1783, 1784, 1786, 1788, 1790, 1792, 1794, 1795, 1797, 798, 1799, 1801, 1803, 1804, 1805, 1806, 1807, 1808, 1809, 1810, 1811, 1812, 1813, 1815, 1816, 1817, 1819, 1821, 1822, 1823, 1825, 1826, 1827, 1828, 1829, 1831, 1833, 1834, 1835, 1837, 1839, 1841, 1842, 1844, 1845, 1847, 1849, 1850, 1852, 1853, 1854, 1855, 1856, 1857, 1858, 1859, 1861, 1863, 1865, 1866, 1867, 1869, 1871, 1872, 1874, 1876, 1877, 1879, 1881, 1882, 1883, 1885, 1887, 1889, 1891, 1893, 1894, 1895, 1897, 1898, 1900, 1902, 1903, 1904, 1906, 1908, 1910, 1912, 1913, 1915, 1917, 1918, 1919, 1920, 1922, 1924, 1926, 1928, 1929, 1931, 1933, 1935, 1936, 1938, 1940, 1942, 1944, 1946, 1948, 1949, 1951, 1953, 1955, 1957, 1959, 1961, 1963, 1965, 1967, 1969, 1971, 1972, 1973, 1974, 1975, 1976, 1978, 1979, 1980, 1982, 1983, 1985, 1986, 1987, 1989, 1990, 1992, 1994, 1996, 1997, 1999, 2000, 2002, 2003, 2005, 2007, 2008, 2009, 2010, 2011, 2013, 2015, 2016, 2017, 2018, 2019, 2021, 2022, 2023, 2024, 2026, 2028, 2030, 2031, 2032, 2034, 2036, 2037, 2038, 2040, 2041, 2042, 2043, 2044, 2046, 2047, 2048, 2049, 2051, 2053, 2055, 2056, 2058, 2060, 2062, 2064, 2066, 2067, 2069, 2070, 2072, 2073, 2074, 2075, 2076, 2077, 2078, 2079, 2081, 2083, 2085, 2087, 2088, 2090, 2091, 2092, 2093, 2095, 2097, 2098, 2100, 2102, 2104, 2105, 2106, 2108, 2110, 2112, 2113, 2115, 2117, 2118, 2119, 2120, 2121, 2122, 2124, 2126, 2128, 2129, 2130, 2132, 2133, 2135, 2136, 2137, 2138, 2140, 2141, 2142, 2143, 2144, 2146, 2148, 2149, 2150, 2151, 2152, 2153, 2154, 2156, 2158, 2159, 2160, 2161, 2162, 2163, 2165, 2167, 2169, 2170, 2171, 2172, 2173, 2174, 2175, 2176, 2177, 2178, 2179, 2181, 2183, 2184, 2186, 2187, 2188, 2190, 2192, 2194, 2195, 2196, 2197, 2198, 2199, 2200, 2201, 2202, 2203, 2205, 2207, 2209, 2211, 2213, 2215, 2217, 2219, 2221, 2223, 2225, 2226, 2228, 2229, 2231, 2233, 2235, 2236, 2237, 2238, 2239, 2240, 2241, 2243, 2244, 2246, 2248, 2250, 2251, 2253, 2255, 2257, 2259, 2261, 2262, 2264, 2265, 2267, 2269, 2270, 2272, 2273, 2275, 2276, 2278, 2279, 2281, 2282, 2284, 2285, 2286, 2288, 2289, 2291, 2293, 2295, 2296, 2297, 2298, 2299, 2300, 2302, 2304, 2306, 2307, 2309, 2310, 2312, 2313, 2314, 2315, 2316, 2317, 2318, 2320, 2321, 2323, 2325, 2327, 2329, 2330, 2332, 2334, 2335, 2337, 2339, 2341, 2343, 2345, 2346, 2347, 2348, 2350, 2352, 2354, 2356, 2357, 2358, 2360, 2361, 2362, 2364, 2366, 2367, 2369, 2371, 2373, 2375, 2376, 2378, 2380, 2381, 2383, 2384, 2386, 2388, 2390, 2391, 2392, 2394, 2396, 2397, 2399, 2401, 2402, 2403, 2405, 2407, 2408, 2409, 2411, 2413, 2415, 2417, 2418, 2419, 2421, 2422, 2423, 2424, 2425, 2427, 2428, 2429, 2430, 2432, 2434, 2435, 2437, 2439, 2440, 2441, 2442, 2443, 2445, 2446, 2448, 2449, 2451, 2452, 2454, 2456, 2457, 2458, 2459, 2460, 2461, 2462, 2463, 2464, 2466, 2468, 2469, 2470, 2471, 2472, 2474, 2475, 2476, 2477, 2478, 2480, 2482, 2483, 2484, 2485, 2486, 2487, 2488, 2489, 2490, 2491, 2493, 2494, 2495, 2496, 2497, 2498, 2499, 2500, 2502, 2503, 2505, 2506, 2507, 2509, 2510, 2511, 2512, 2513, 2514, 2516, 2517, 2518, 2519, 2521, 2522, 2523, 2525, 2527, 2529, 2530, 2531, 2533, 2535, 2537, 2539, 2540, 2541, 2542, 2544, 2546, 2547, 2548, 2550, 2551, 2552, 2554, 2556, 2557, 2558, 2559, 2561, 2562, 2564, 2565, 2567, 2569, 2571, 2572, 2573, 2574, 2575, 2576, 2578, 2580, 2581, 2583, 2584, 2585, 2587, 2588, 2589, 2590, 2592, 2593, 2594, 2595, 2597, 2599, 2601, 2603, 2604, 2606, 2608, 2609, 2611, 2612, 2614, 2615, 2616, 2617, 2619, 2621, 2623, 2624, 2626, 2627, 2628, 2629, 2631, 2632, 2634, 2636, 2638, 2640, 2641, 2642, 2644, 2646, 2647, 2648, 2649, 2650, 2652, 2654, 2656, 2658, 2659, 2661, 2663, 2665, 2667, 2668, 2670, 2672, 2674, 2675, 2677, 2679, 2681, 2683, 2685, 2687, 2689, 2691, 2693, 2695, 2697, 2699, 2701, 2703, 2704, 2706, 2708, 2710, 2711, 2712, 2714, 2716, 2717, 2719, 2721, 2722, 2724, 2726, 2728, 2730, 2732, 2734, 2735, 2736, 2738, 2739, 2740, 2741, 2743, 2745, 2746, 2748, 2750, 2751, 2753, 2754, 2756, 2758, 2760, 2762, 2764, 2766, 2768, 2770, 2771, 2772, 2773, 2775, 2777, 2778, 2780, 2781, 2782, 2784, 2786, 2788, 2790, 2791, 2792, 2794, 2796, 2797, 2799, 2801, 2802, 2803, 2804, 2806, 2807, 2809, 2810, 2811, 2813, 2815, 2816, 2818, 2819, 2821, 2822, 2823, 2825, 2826, 2828, 2830, 2832, 2833, 2835, 2836, 2838, 2840, 2842, 2844, 2845, 2846, 2847, 2849, 2850, 2851, 2852, 2853, 2855, 2856, 2857, 2858, 2859, 2861, 2862, 2863, 2864, 2866, 2867, 2868, 2869, 2870, 2872, 2873, 2875, 2876, 2877, 2878, 2880, 2882, 2883, 2885, 2886, 2888, 2890, 2891, 2892, 2893, 2894, 2896, 2898, 2900, 2902, 2903, 2904, 2906, 2907, 2908, 2909, 2910, 2911, 2915, 2917, 2918, 2919, 2920, 2921, 2922, 2923, 2924 or 2926, wherein a plant produced from said plant cell has a difference in the level of biomass as compared to the corresponding level of a control plant that does not comprise said nucleic acid.

3.-63. (canceled)

64. A plant cell comprising an exogenous nucleic acid, said exogenous nucleic acid comprising a regulatory region operably linked to a nucleotide sequence encoding a polypeptide, wherein the HMM bit score of the amino acid sequence of said polypeptide is greater than about 93, said HMM based on the amino acid sequences depicted in one of FIGS. 1-50, and wherein said plant has a difference in the level of biomass as compared to the corresponding level of a control plant that does not comprise said nucleic acid.

65. A plant cell comprising an exogenous nucleic acid said exogenous nucleic acid comprising a regulatory region operably linked to a nucleotide sequence encoding a polypeptide having 80 percent or greater sequence identity to an amino acid sequence selected from the group consisting of SEQ ID NO:2, 4, 5, 6, 8, 10, 12, 13, 15, 17, 18, 20, 22, 24, 25, 26, 27, 29, 30, 32, 34, 35, 37, 38, 39, 41, 43, 45, 47, 49, 51, 53, 55, 56, 57, 59, 60, 62, 63, 64, 65, 67, 69, 70, 71, 73, 74, 75, 77, 79, 80, 81, 82, 83, 84, 85, 86, 88, 90, 91, 92, 93, 94, 95, 96, 97, 98, 99, 100, 101, 102, 103, 104, 105, 106, 107, 108, 109, 110, 111, 112, 113, 115, 117, 119, 120, 121, 122, 123, 124, 126, 128, 129, 131, 133, 135, 137, 139, 140, 141, 142, 144, 146, 147, 148, 149, 150, 152, 154, 155, 157, 158, 160, 162, 163, 165, 167, 169, 171, 173, 175, 176, 178, 180, 182, 183, 185, 187, 189, 191, 193, 194, 195, 196, 197, 198, 199, 200, 201, 203, 205, 207, 208, 209, 211, 213, 214, 215, 217, 218, 219, 220, 222, 223, 224, 226, 228, 229, 231, 232, 233, 234, 235, 236, 237, 238, 239, 240, 242, 244, 245, 246, 247, 248, 249, 250, 251, 252, 254, 255, 256, 257, 258, 259, 260, 261, 262, 263, 264, 265, 266, 267, 268, 269, 270, 271, 272, 273, 274, 275, 276, 277, 278, 279, 281, 282, 284, 286, 287, 288, 289, 291, 293, 294, 295, 297, 299, 300, 302, 304, 306, 307, 308, 310, 311, 313, 315, 316, 317, 318, 319, 320, 322, 324, 326, 328, 330, 331, 333, 335, 337, 338, 340, 342, 343, 345, 346, 347, 349, 350, 351, 353, 354, 355, 357, 358, 360, 362, 363, 364, 365, 367, 369, 370, 371, 372, 373, 374, 375, 377, 378, 379, 380, 382, 383, 384, 385, 386, 387, 389, 390, 391, 393, 395, 396, 398, 400, 401, 403, 404, 406, 408, 409, 410, 411, 412, 414, 415, 417, 419, 420, 421, 422, 423, 424, 425, 426, 427, 428, 429, 430, 431, 432, 433, 434, 435, 436, 437, 438, 439, 440, 441, 442, 443, 444, 445, 446, 447, 448, 449, 450, 451, 452, 453, 454, 456, 457, 459, 461, 462, 464, 466, 467, 468, 469, 470, 472, 474, 475, 477, 479, 480, 482, 483, 484, 485, 487, 488, 489, 490, 491, 492, 493, 494, 495, 497, 499, 501, 502, 503, 504, 506, 507, 509, 510, 511, 512, 514, 515, 516, 517, 518, 520, 522, 524, 526, 528, 530, 531, 532, 533, 534, 535, 536, 537, 538, 539, 540, 542, 543, 545, 546, 547, 548, 550, 551, 553, 554, 555, 557, 559, 560, 562, 563, 565, 566, 568, 570, 572, 573, 575, 576, 577, 579, 580, 581, 582, 583, 584, 585, 586, 587, 589, 590, 591, 592, 593, 595, 596, 597, 598, 599, 601, 602, 604, 605, 607, 609, 610, 611, 612, 613, 614, 615, 616, 617, 618, 619, 620, 621, 622, 623, 624, 625, 626, 627, 629, 631, 633, 634, 635, 36, 637, 638, 640, 642, 644, 646, 648, 650, 651, 653, 654, 655, 656, 657, 658, 659, 660, 662, 663, 664, 665, 666, 667, 669, 671, 672, 674, 676, 677, 679, 680, 682, 684, 685, 687, 689, 690, 691, 693, 694, 696, 697, 698, 00, 702, 704, 705, 706, 707, 709, 710, 712, 714, 715, 717, 718, 719, 720, 721, 722, 723, 725, 726, 727, 728, 730, 731, 732, 733, 734, 735, 737, 739, 741, 743, 744, 745, 746, 747, 749, 751, 752, 753, 755, 757, 759, 760, 762, 764, 766, 768, 770, 772, 773, 775, 776, 778, 780, 782, 784, 786, 788, 789, 791, 793, 794, 795, 796, 798, 800, 801, 802, 804, 805, 807, 809, 811, 813, 815, 817, 819, 820, 822, 823, 824, 825, 827, 828, 830, 832, 834, 836, 838, 840, 842, 843, 844, 846, 848, 849, 850, 851, 853, 855, 856, 857, 858, 860, 861, 863, 864, 866, 868, 870, 871, 873, 874, 876, 878, 880, 882, 883, 885, 887, 889, 890, 892, 893, 895, 896, 897, 899, 901, 902, 903, 905, 907, 908, 909, 910, 912, 914, 915, 916, 917, 919, 921, 923, 925, 926, 928, 930, 932, 934, 935, 936, 937, 939, 941, 943, 945, 947, 949, 950, 952, 953, 955, 957, 959, 960, 962, 964, 965, 967, 968, 970, 972, 974, 976, 978, 980, 981, 983, 985, 86, 87, 989, 991, 993, 995, 997, 998, 1000, 1002, 1003, 1005, 1007, 1008, 1009, 1011, 1013, 1014, 1016, 1018, 1020, 1022, 1023, 1024, 1025, 1026, 1027, 1029, 1031, 1033, 1034, 1036, 1038, 1039, 1041, 1042, 1043, 1044, 1045, 1046, 1048, 1049, 1050, 1051, 1052, 1054, 1056, 1058, 1060, 1061, 1062, 1064, 1066, 1067, 1069, 1070, 1071, 1072, 1074, 1076, 1077, 1078, 1079, 1081, 1083, 1085, 1087, 1088, 1090, 1092, 1093, 1095, 1096, 1097, 1099, 1101, 1102, 1104, 1105, 1107, 1108, 1110, 1111, 1112, 1113, 1114, 1115, 1117, 1119, 1120, 1121, 1122, 1124, 1126, 1128, 1130, 1132, 1133, 1135, 1137, 1139, 1141, 1142, 1144, 1146, 1148, 1150, 1152, 1154, 1156, 1157, 1158, 1160, 1162, 1164, 1166, 1168, 1169, 1171, 1173, 1175, 1176, 1177, 1179, 1180, 1181, 1183, 1185, 1187, 1188, 1190, 1192, 1193, 1194, 1196, 1198, 1200, 1201, 1203, 1205, 1207, 1209, 1210, 1212, 1214, 1216, 1218, 1219, 1221, 1222, 1224, 1226, 1228, 1230, 1232, 1234, 1235, 1236, 1238, 1240, 1241, 1243, 1245, 1247, 1249, 1251, 1252, 1253, 1255, 1257, 1259, 1261, 1263, 1265, 1266, 1268, 1270, 1272, 1274, 1276, 1278, 1279, 1281, 1283, 1285, 1287, 1289, 1291, 1293, 1294, 1296, 1297, 1299, 1300, 1302, 1304, 1306, 1308, 1309, 1310, 1312, 1313, 1314, 1316, 1318, 1320, 1322, 1324, 1325, 1326, 1328, 1329, 1330, 1332, 1333, 1334, 1336, 1338, 1339, 1340, 1341, 1342, 1343, 1344, 1345, 1347, 1349, 1350, 1352, 1353, 1355, 1357, 1358, 1359, 1360, 1361, 1363, 1364, 1366, 1367, 1369, 1370, 1371, 1372, 1373, 1375, 1376, 1377, 1379, 1380, 1381, 1382, 1384, 1386, 1388, 1389, 1391, 1393, 1395, 1397, 1399, 1401, 1402, 1403, 1405, 1407, 1409, 1410, 1412, 1414, 1416, 1418, 1420, 1421, 1422, 1424, 1426, 1428, 1429, 1431, 1433, 1435, 1437, 1439, 1440, 1441, 1443, 1445, 1446, 1448, 1450, 1452, 1454, 1456, 1457, 1459, 1461, 1463, 1465, 1467, 1469, 1471, 1473, 1475, 1477, 1479, 1481, 1482, 1483, 1485, 1486, 1488, 1489, 1490, 1492, 1493, 1495, 1497, 1498, 1500, 1502, 1503, 1505, 1506, 1507, 1508, 1509, 1511, 1512, 1514, 1515, 1516, 1518, 1520, 1522, 1523, 1524, 1525, 1526, 1528, 1529, 1531, 1533, 1534, 1535, 1537, 1538, 1540, 1542, 1544, 1546, 1547, 1549, 1550, 1552, 1554, 1555, 1557, 1558, 1560, 1562, 1563, 1564, 1565, 1568, 1569, 1571, 1572, 1574, 1575, 1577, 1578, 1580, 1581, 1583, 1584, 1586, 1588, 1589, 1591, 1593, 1594, 1595, 1596, 1598, 1599, 1600, 1602, 1603, 1604, 1605, 1607, 1609, 1611, 1612, 1613, 1615, 1616, 1618, 1619, 1621, 1622, 1624, 1626, 1628, 1629, 1630, 1632, 1634, 1636, 1637, 1639, 1640, 1642, 1644, 1646, 1647, 1648, 1649, 1650, 1652, 1654, 1656, 1657, 1658, 1660, 1661, 1662, 1664, 1666, 1668, 1669, 1670, 1671, 1672, 1674, 1676, 1677, 1679, 1680, 1681, 1682, 1683, 1684, 1686, 1688, 1689, 1691, 1693, 1695, 1697, 1699, 1700, 1701, 1702, 1704, 1705, 1706, 1707, 1708, 1710, 1711, 1712, 1713, 1714, 1715, 1717, 1719, 1721, 1723, 1724, 1725, 1727, 1729, 1731, 1732, 1734, 1735, 1737, 1739, 1741, 1743, 1745, 1746, 1747, 1749, 1751, 1753, 1755, 1757, 1758, 1759, 1761, 1762, 1764, 1765, 1766, 1767, 1769, 1770, 1772, 1773, 1774, 1776, 1777, 1779, 1781, 1783, 1784, 1786, 1788, 1790, 1792, 1794, 1795, 1797, 798, 1799, 1801, 1803, 1804, 1805, 1806, 1807, 1808, 1809, 1810, 1811, 1812, 1813, 1815, 1816, 1817, 1819, 1821, 1822, 1823, 1825, 1826, 1827, 1828, 1829, 1831, 1833, 1834, 1835, 1837, 1839, 1841, 1842, 1844, 1845, 1847, 1849, 1850, 1852, 1853, 1854, 1855, 1856, 1857, 1858, 1859, 1861, 1863, 1865, 1866, 1867, 1869, 1871, 1872, 1874, 1876, 1877, 1879, 1881, 1882, 1883, 1885, 1887, 1889, 1891, 1893, 1894, 1895, 1897, 1898, 1900, 1902, 1903, 1904, 1906, 1908, 1910, 1912, 1913, 1915, 1917, 1918, 1919, 1920, 1922, 1924, 1926, 1928, 1929, 1931, 1933, 1935, 1936, 1938, 1940, 1942, 1944, 1946, 1948, 1949, 1951, 1953, 1955, 1957, 1959, 1961, 1963, 1965, 1967, 1969, 1971, 1972, 1973, 1974, 1975, 1976, 1978, 1979, 1980, 1982, 1983, 1985, 1986, 1987, 1989, 1990, 1992, 1994, 1996, 1997, 1999, 2000, 2002, 2003, 2005, 2007, 2008, 2009, 2010, 2011, 2013, 2015, 2016, 2017, 2018, 2019, 2021, 2022, 2023, 2024, 2026, 2028, 2030, 2031, 2032, 2034, 2036, 2037, 2038, 2040, 2041, 2042, 2043, 2044, 2046, 2047, 2048, 2049, 2051, 2053, 2055, 2056, 2058, 2060, 2062, 2064, 2066, 2067, 2069, 2070, 2072, 2073, 2074, 2075, 2076, 2077, 2078, 2079, 2081, 2083, 2085, 2087, 2088, 2090, 2091, 2092, 2093, 2095, 2097, 2098, 2100, 2102, 2104, 2105, 2106, 2108, 2110, 2112, 2113, 2115, 2117, 2118, 2119, 2120, 2121, 2122, 2124, 2126, 2128, 2129, 2130, 2132, 2133, 2135, 2136, 2137, 2138, 2140, 2141, 2142, 2143, 2144, 2146, 2148, 2149, 2150, 2151, 2152, 2153, 2154, 2156, 2158, 2159, 2160, 2161, 2162, 2163, 2165, 2167, 2169, 2170, 2171, 2172, 2173, 2174, 2175, 2176, 2177, 2178, 2179, 2181, 2183, 2184, 2186, 2187, 2188, 2190, 2192, 2194, 2195, 2196, 2197, 2198, 2199, 2200, 2201, 2202, 2203, 2205, 2207, 2209, 2211, 2213, 2215, 2217, 2219, 2221, 2223, 2225, 2226, 2228, 2229, 2231, 2233, 2235, 2236, 2237, 2238, 2239, 2240, 2241, 2243, 2244, 2246, 2248, 2250, 2251, 2253, 2255, 2257, 2259, 2261, 2262, 2264, 2265, 2267, 2269, 2270, 2272, 2273, 2275, 2276, 2278, 2279, 2281, 2282, 2284, 2285, 2286, 2288, 2289, 2291, 2293, 2295, 2296, 2297, 2298, 2299, 2300, 2302, 2304, 2306, 2307, 2309, 2310, 2312, 2313, 2314, 2315, 2316, 2317, 2318, 2320, 2321, 2323, 2325, 2327, 2329, 2330, 2332, 2334, 2335, 2337, 2339, 2341, 2343, 2345, 2346, 2347, 2348, 2350, 2352, 2354, 2356, 2357, 2358, 2360, 2361, 2362, 2364, 2366, 2367, 2369, 2371, 2373, 2375, 2376, 2378, 2380, 2381, 2383, 2384, 2386, 2388, 2390, 2391, 2392, 2394, 2396, 2397, 2399, 2401, 2402, 2403, 2405, 2407, 2408, 2409, 2411, 2413, 2415, 2417, 2418, 2419, 2421, 2422, 2423, 2424, 2425, 2427, 2428, 2429, 2430, 2432, 2434, 2435, 2437, 2439, 2440, 2441, 2442, 2443, 2445, 2446, 2448, 2449, 2451, 2452, 2454, 2456, 2457, 2458, 2459, 2460, 2461, 2462, 2463, 2464, 2466, 2468, 2469, 2470, 2471, 2472, 2474, 2475, 2476, 2477, 2478, 2480, 2482, 2483, 2484, 2485, 2486, 2487, 2488, 2489, 2490, 2491, 2493, 2494, 2495, 2496, 2497, 2498, 2499, 2500, 2502, 2503, 2505, 2506, 2507, 2509, 2510, 2511, 2512, 2513, 2514, 2516, 2517, 2518, 2519, 2521, 2522, 2523, 2525, 2527, 2529, 2530, 2531, 2533, 2535, 2537, 2539, 2540, 2541, 2542, 2544, 2546, 2547, 2548, 2550, 2551, 2552, 2554, 2556, 2557, 2558, 2559, 2561, 2562, 2564, 2565, 2567, 2569, 2571, 2572, 2573, 2574, 2575, 2576, 2578, 2580, 2581, 2583, 2584, 2585, 2587, 2588, 2589, 2590, 2592, 2593, 2594, 2595, 2597, 2599, 2601, 2603, 2604, 2606, 2608, 2609, 2611, 2612, 2614, 2615, 2616, 2617, 2619, 2621, 2623, 2624, 2626, 2627, 2628, 2629, 2631, 2632, 2634, 2636, 2638, 2640, 2641, 2642, 2644, 2646, 2647, 2648, 2649, 2650, 2652, 2654, 2656, 2658, 2659, 2661, 2663, 2665, 2667, 2668, 2670, 2672, 2674, 2675, 2677, 2679, 2681, 2683, 2685, 2687, 2689, 2691, 2693, 2695, 2697, 2699, 2701, 2703, 2704, 2706, 2708, 2710, 2711, 2712, 2714, 2716, 2717, 2719, 2721, 2722, 2724, 2726, 2728, 2730, 2732, 2734, 2735, 2736, 2738, 2739, 2740, 2741, 2743, 2745, 2746, 2748, 2750, 2751, 2753, 2754, 2756, 2758, 2760, 2762, 2764, 2766, 2768, 2770, 2771, 2772, 2773, 2775, 2777, 2778, 2780, 2781, 2782, 2784, 2786, 2788, 2790, 2791, 2792, 2794, 2796, 2797, 2799, 2801, 2802, 2803, 2804, 2806, 2807, 2809, 2810, 2811, 2813, 2815, 2816, 2818, 2819, 2821, 2822, 2823, 2825, 2826, 2828, 2830, 2832, 2833, 2835, 2836, 2838, 2840, 2842, 2844, 2845, 2846, 2847, 2849, 2850, 2851, 2852, 2853, 2855, 2856, 2857, 2858, 2859, 2861, 2862, 2863, 2864, 2866, 2867, 2868, 2869, 2870, 2872, 2873, 2875, 2876, 2877, 2878, 2880, 2882, 2883, 2885, 2886, 2888, 2890, 2891, 2892, 2893, 2894, 2896, 2898, 2900, 2902, 2903, 2904, 2906, 2907, 2908, 2909, 2910, 2911, 2915, 2917, 2918, 2919, 2920, 2921, 2922, 2923, 2924 and 2926, wherein a plant produced from said plant cell has a difference in the level of biomass as compared to the corresponding level of a control plant that does not comprise said nucleic acid.

66. (canceled)

67. A transgenic plant comprising the plant cell of claim 64.

68. The transgenic plant of claim 67, wherein said plant further exhibits an increase or decrease in lignin content of about 2 percent to 100 percent as compared to a control plant that does not express said exogenous nucleic acid, wherein said difference in lignin content is.

69. The transgenic plant of claim 68, wherein said increase in lignin content is a 2 percent to 85 percent increase and wherein said difference in the level of biomass is an increase in the level of biomass of about 17 percent to 100 percent.

70. The transgenic plant of claim 68, wherein said increase in lignin content is a 5 percent to 40 percent increase and wherein said plant further exhibits an increase in glucan content of 7 percent to 20 percent as compared to a control plant that does not express said exogenous nucleic acid.

71. The transgenic plant of claim 70, wherein said increase in lignin content is a 14 percent to 30 percent increase, said increase in glucan content is 7 percent to 20 percent and said difference in the level of biomass is an increase in biomass of 46 percent to 92 percent.

72. The transgenic plant of claim 68, wherein said decrease in lignin content is a 2 percent to 53 percent decrease and said difference in the level of biomass is a 14 percent to 120 percent increase.

73. The transgenic plant of claim 68, wherein said decrease in lignin content is a 3 percent to 40 percent decrease and said plant further exhibits a 19 percent to 53 percent increase glucan content as compared to a control plant that does not express said exogenous nucleic acid.

74. The transgenic plant of claim 67, wherein said plant further exhibits decreased ash content as compared to a control plant that does not express said exogenous nucleic acid.

75. The transgenic plant of claim 67, wherein said plant is a member of a species selected from the group consisting of Panicum virgatum (switchgrass), Sorghum bicolor (sorghum, sudangrass), Miscanthus giganteus (miscanthus), Saccharum sp. (energycane), Populus balsamifera (poplar), Zea mays (corn), Glycine max (soybean), Brassica napus (canola), Triticum aestivum (wheat), Gossypium hirsutum (cotton), Oryza sativa (rice), Helianthus annuus (sunflower), Medicago sativa (alfalfa), Beta vulgaris (sugarbeet), or Pennisetum glaucum (pearl millet).

76.-84. (canceled)

85. A transgenic plant comprising the plant cell of claim 65.

86. The transgenic plant of claim 85, wherein said difference in the composition of biomass comprises a difference in the level of a biomass component selected from the group consisting of lignin, glucan, S:G ratio, and ash, as compared to the corresponding level of the biomass composition of a control plant that does not comprise said nucleic acid.

87. The transgenic plant of claim 86, wherein said composition of biomass comprises increased lignin content of about 2 percent to 100 percent.

88. The transgenic plant of claim 87, wherein said lignin content is increased 5 percent to 40 percent and wherein said composition of biomass further comprises an increase in glucan content of 7 percent to 20 percent.

89. The transgenic plant of claim 86, wherein said composition of biomass comprises decreased lignin content of about 2 percent to 100 percent.

90. The transgenic plant of claim 89, wherein said lignin content is decreased 3 percent to 40 percent and said composition of biomass further comprises an increase in glucan content of 19 percent to 53 percent.

91. The transgenic plant of claim 86, wherein said composition of biomass comprises decreased ash content.

92. The transgenic plant of claim 86, wherein said composition of biomass comprises increased glucan content of 10 percent to 20 percent.

93. The transgenic plant of claim 85, wherein said plant is a member of a species selected from the group consisting of Panicum virgatum (switchgrass), Sorghum bicolor (sorghum, sudangrass), Miscanthus giganteus (miscanthus), Saccharum sp. (energycane), Populus balsamifera (poplar), Zea mays (corn), Glycine max (soybean), Brassica napus (canola), Triticum aestivum (wheat), Gossypium hirsutum (cotton), Oryza sativa (rice), Helianthus annuus (sunflower), Medicago sativa (alfalfa), Beta vulgaris (sugarbeet), or Pennisetum glaucum (pearl millet).

94.-103. (canceled)
